United States Patent Application Publication US 2012/0159672 A1 - sequence listing, part 7

SEQ ID NO: 14222 - DNA, 1016 bp, Triticum aestivum
  misc_feature (1)..(1016): Ceres Seq. ID no. 15173174
aaatgcagaaacaccacacgatctggaaaaaaaaaatcgacagaacatgtcgtcggagaaacaggagacggcggcggtgcgcgtgctgggcaggtggccgagcccgttcgtgatccgggtgctgatagttcttgggctcaagggcgtggaccacgagctcgtggaggaggccgtgggcaacaagagcgagctgctgctcgcctccaaccccgtgcacaagatgatccccgtgctcctgcaccacggcaggcccgtctccgagtccctcatcatcgtccagtacgtcgacgaggcctgggcctcccacgccccggcgctcctcccgtccgacccctacgcccgggcggccgagcggttctgggcccactacgtcgacgacaaggtaaaaggattaggcaatccagttttgattttcgctttgaacttctcagttctcagcgacaaaatgatagcctacgcagtttcccctgaacaaacgtgtgctgactgctcaatggatacgtagtttcctactgcgatccgggtcctgaggggaaggctggacggagacaaggacgaagcggcggctcaggtgtgcgctgctctgcagcgcctggaggtggccttcgtcgagtgcggccaagggaaggattacttcggcggcgacaacgtcggttacctggacattgctctggggtcgcacctcggatgggtcagggcggtagagaggatcgctgaaatcaggctgctcgacgcggccaaggttcctaagctggcggcgtgggcggatcggttctgcgcccacccagcggtggcggacgccatgcctgacgtggacaggttcgtggagttcagcctcaagaatgacggcgctctgaaggcggctagtgctaattccaagtgaacgaactgttgtggacactagacagtgctcgatggcatcacatagcggttagtgctaattctaatgatgcaaatggaataacataatatgttaccatagtagttcttaatgtataatgagtctacaaagtaac

SEQ ID NO: 14223 - protein, 167 aa, Triticum aestivum
  peptide (1)..(167): Ceres Seq. ID no. 15173175
  misc_feature (26)..(97): Pfam Name: Pfam Description:  Glutathione S-transferase, N-terminal domain
  misc_feature (152)..(167): NCBI GI NO: 11385519 NR Description: glutathione S-transferase GST 34 [Zea mays]
  misc_feature (24)..(128): NCBI GI NO: 11385519 NR Description: glutathione S-transferase GST 34 [Zea mays]
  misc_feature (24)..(128): NCBI GI NO: 11385513 NR Description: glutathione S-transferase GST 31 [Zea mays]
  misc_feature (17)..(128): NCBI GI NO: 37536246 NR Description: putative glutathione S-transferase
  misc_feature (145)..(167): NCBI GI NO: 37536248 NR Description: putative glutathione S-transferase
  misc_feature (17)..(127): NCBI GI NO: 37536248 NR Description: putative glutathione S-transferase
  misc_feature (152)..(167): NCBI GI NO: 11385525 NR Description: glutathione S-transferase GST 37 [Zea mays]
  misc_feature (26)..(128): NCBI GI NO: 11385525 NR Description: glutathione S-transferase GST 37 [Zea mays]
  misc_feature (26)..(127): NCBI GI NO: 37536350 NR Description: putative glutathione S-transferase
  misc_feature (13)..(127): NCBI GI NO: 6856103 NR Description: glutathione S-transferase [Gossypium hirsutum]
NAETPHDLEKKNRQNMSSEKQETAAVRVLGRWPSPFVIRVLIVLGLKGVDHELVEEAVGNKSELLLASNPVHKMIPVLLHHGRPVSESLIIVQYVDEAWASHAPALLPSDPYARAAERFWAHYVDDKVKGLGNPVLIFALNFSVLSDKMIAYAVSPEQTCADCSMDT

SEQ ID NO: 14224 - protein, 156 aa, Triticum aestivum
  peptide (1)..(156): Ceres Seq. ID no. 15173176
KCRNTTRSGKKKSTEHVVGETGDGGGARAGQVAEPVRDPGADSSWAQGRGPRARGGGRGQQERAAARLQPRAQDDPRAPAPRQARLRVPHHRPVRRRGLGLPRPGAPPVRPLRPGGRAVLGPLRRRQGKRIRQSSFDFRFELLSSQRQNDSLRSFP

SEQ ID NO: 14225 - protein, 152 aa, Triticum aestivum
  peptide (1)..(152): Ceres Seq. ID no. 15173177
  misc_feature (11)..(82): Pfam Name: Pfam Description:  Glutathione S-transferase, N-terminal domain
  misc_feature (137)..(152): NCBI GI NO: 11385519 NR Description: glutathione S-transferase GST 34 [Zea mays]
  misc_feature (9)..(113): NCBI GI NO: 11385519 NR Description: glutathione S-transferase GST 34 [Zea mays]
  misc_feature (9)..(113): NCBI GI NO: 11385513 NR Description: glutathione S-transferase GST 31 [Zea mays]
  misc_feature (2)..(113): NCBI GI NO: 37536246 NR Description: putative glutathione S-transferase
  misc_feature (130)..(152): NCBI GI NO: 37536248 NR Description: putative glutathione S-transferase
  misc_feature (2)..(112): NCBI GI NO: 37536248 NR Description: putative glutathione S-transferase
  misc_feature (137)..(152): NCBI GI NO: 11385525 NR Description: glutathione S-transferase GST 37 [Zea mays]
  misc_feature (11)..(113): NCBI GI NO: 11385525 NR Description: glutathione S-transferase GST 37 [Zea mays]
  misc_feature (11)..(112): NCBI GI NO: 37536350 NR Description: putative glutathione S-transferase
  misc_feature (1)..(112): NCBI GI NO: 6856103 NR Description: glutathione S-transferase [Gossypium hirsutum]
MSSEKQETAAVRVLGRWPSPFVIRVLIVLGLKGVDHELVEEAVGNKSELLLASNPVHKMIPVLLHHGRPVSESLIIVQYVDEAWASHAPALLPSDPYARAAERFWAHYVDDKVKGLGNPVLIFALNFSVLSDKMIAYAVSPEQTCADCSMDT

SEQ ID NO: 14226 - DNA, 1497 bp, Triticum aestivum
  misc_feature (1)..(1497): Ceres Seq. ID no. 12617368
ccccaatccccaaatcctccatggacgaacacgccggcggccgccgccgcgccgatccgcctccgtggtctcccccgcttcagcttcccccagacgacatgctcctggagatcctcctccgcctcccgccggagcccatccacctgttccgcgcctccttcgtctccaagcactggcgcggcctcgtccacgacgcccgcttccgccgccgcttccgcgagttccacggggggacgcctcccatgctcggcttcttcaacagctgcccaggggctcccatcttcgtccccacctccggcggcttcgcgctctccaccgccaacatgtccctcgattggcgggccctcgattgccgccacggccgcgccctcctgcacaactacggtaccaggacgctcctcgtctgggaccccatgaccggcgacgagcgctacctaccgttccccacgcgagcccatctggagaacgtccattacaatggcgcggttctctgcgcggctggccacacgggccacggggactgccattcctgcccgttcctcgtggcattcgtgttcagcagctacagatattgcatcacctctgcctgcgtctactcgtccgtgaccggcgtctggggtgagatcacttcgattcatacaccagattcattagttgatgcaaagccgacagctctggttggaaacacactctactgcctgttgagtaatgaggatagcatcattgagtttaatttggataagaatagcttggatttaattgaggttccatacggcggaaattttatcatcacactggcacaggatggtcccctaggtttcgccagtgttgatcgattcagcctacatttgtggtcaagggtagctagcatcgatggggtggcatcatgggaacatatcagggtcattgatctggagaagctttttgcgccacaagtattggcagcgtgtatggatcgaatgtggcctgttggctatgctgaagatgcgaatgtgatcttcattcatgtgtatcctcgcacctacatgatccatctcaagtccatgcagattgaggggattttagaggaagcaactggctggtccatttttccttatgcaagtttctacactccaggaccaggaatcaccactggtggtggagatgatcaagttgaactgttaaatggcacttgagatgattgggctttcacatcttctgtcatgcttttttggcctaagaggtacctaggattattggttgccgtgatcctgcaactacatgcagaaacaatttactcatgctggttcttcagtattttgtaaacgtcgacagctcaatgtggctgtaaagaaattcgtacaagttgccgaatgtggtgctaatcttacaaaatgtgctgaattttgaatgttatctttgccaattactatatgtggtaacaaaccggcagcacttggtaaaaattatttcatacttctgaatattgctgttgagaatatgacatttgtttggccc

SEQ ID NO: 14227 - protein, 390 aa, Triticum aestivum
  peptide (1)..(390): Ceres Seq. ID no. 12617369
  misc_feature (23)..(72): Pfam Name: Pfam Description:  F-box domain
  misc_feature (31)..(370): NCBI GI NO: 34915420 NR Description: contains EST C98814
  misc_feature (30)..(371): NCBI GI NO: 37531026 NR Description: hypothetical protein
  misc_feature (28)..(205): NCBI GI NO: 34395380 NR Description: unknown protein
  misc_feature (218)..(374): NCBI GI NO: 34395380 NR Description: unknown protein
  misc_feature (31)..(274): NCBI GI NO: 34915428 NR Description: hypothetical protein~similar to Oryza sativachromosome1
  misc_feature (323)..(370): NCBI GI NO: 34915428 NR Description: hypothetical protein~similar to Oryza sativachromosome1
  misc_feature (31)..(372): NCBI GI NO: 34394504 NR Description: unknown protein
  misc_feature (23)..(385): NCBI GI NO: 34394503 NR Description: unknown protein
  misc_feature (31)..(370): NCBI GI NO: 33146558 NR Description: unknown protein
  misc_feature (31)..(370): NCBI GI NO: 34915424 NR Description: hypothetical protein~similar to Oryza sativachromosome1
PIPKSSMDEHAGGRRRADPPPWSPPLQLPPDDMLLEILLRLPPEPIHLFRASFVSKHWRGLVHDARFRRRFREFHGGTPPMLGFFNSCPGAPIFVPTSGGFALSTANMSLDWRALDCRHGRALLHNYGTRTLLVWDPMTGDERYLPFPTRAHLENVHYNGAVLCAAGHTGHGDCHSCPFLVAFVFSSYRYCITSACVYSSVTGVWGEITSIHTPDSLVDAKPTALVGNTLYCLLSNEDSIIEFNLDKNSLDLIEVPYGGNFIITLAQDGPLGFASVDRFSLHLWSRVASIDGVASWEHIRVIDLEKLFAPQVLAACMDRMWPVGYAEDANVIFIHVYPRTYMIHLKSMQIEGILEEATGWSIFPYASFYTPGPGITTGGGDDQVELLNGT

SEQ ID NO: 14228 - protein, 384 aa, Triticum aestivum
  peptide (1)..(384): Ceres Seq. ID no. 12617370
  misc_feature (17)..(66): Pfam Name: Pfam Description:  F-box domain
  misc_feature (25)..(364): NCBI GI NO: 34915420 NR Description: contains EST C98814
  misc_feature (24)..(365): NCBI GI NO: 37531026 NR Description: hypothetical protein
  misc_feature (22)..(199): NCBI GI NO: 34395380 NR Description: unknown protein
  misc_feature (212)..(368): NCBI GI NO: 34395380 NR Description: unknown protein
  misc_feature (25)..(268): NCBI GI NO: 34915428 NR Description: hypothetical protein~similar to Oryza sativachromosome1
  misc_feature (317)..(364): NCBI GI NO: 34915428 NR Description: hypothetical protein~similar to Oryza sativachromosome1
  misc_feature (25)..(366): NCBI GI NO: 34394504 NR Description: unknown protein
  misc_feature (17)..(379): NCBI GI NO: 34394503 NR Description: unknown protein
  misc_feature (25)..(364): NCBI GI NO: 33146558 NR Description: unknown protein
  misc_feature (25)..(364): NCBI GI NO: 34915424 NR Description: hypothetical protein~similar to Oryza sativachromosome1
MDEHAGGRRRADPPPWSPPLQLPPDDMLLEILLRLPPEPIHLFRASFVSKHWRGLVHDARFRRRFREFHGGTPPMLGFFNSCPGAPIFVPTSGGFALSTANMSLDWRALDCRHGRALLHNYGTRTLLVWDPMTGDERYLPFPTRAHLENVHYNGAVLCAAGHTGHGDCHSCPFLVAFVFSSYRYCITSACVYSSVTGVWGEITSIHTPDSLVDAKPTALVGNTLYCLLSNEDSIIEFNLDKNSLDLIEVPYGGNFIITLAQDGPLGFASVDRFSLHLWSRVASIDGVASWEHIRVIDLEKLFAPQVLAACMDRMWPVGYAEDANVIFIHVYPRTYMIHLKSMQIEGILEEATGWSIFPYASFYTPGPGITTGGGDDQVELLNGT

SEQ ID NO: 14229 - protein, 358 aa, Triticum aestivum
  peptide (1)..(358): Ceres Seq. ID no. 12617371
  misc_feature (1)..(40): Pfam Name: Pfam Description:  F-box domain
  misc_feature (1)..(338): NCBI GI NO: 34915420 NR Description: contains EST C98814
  misc_feature (1)..(339): NCBI GI NO: 37531026 NR Description: hypothetical protein
  misc_feature (1)..(173): NCBI GI NO: 34395380 NR Description: unknown protein
  misc_feature (186)..(342): NCBI GI NO: 34395380 NR Description: unknown protein
  misc_feature (1)..(242): NCBI GI NO: 34915428 NR Description: hypothetical protein~similar to Oryza sativachromosome1
  misc_feature (291)..(338): NCBI GI NO: 34915428 NR Description: hypothetical protein~similar to Oryza sativachromosome1
  misc_feature (1)..(340): NCBI GI NO: 34394504 NR Description: unknown protein
  misc_feature (1)..(353): NCBI GI NO: 34394503 NR Description: unknown protein
  misc_feature (1)..(338): NCBI GI NO: 33146558 NR Description: unknown protein
  misc_feature (1)..(338): NCBI GI NO: 34915424 NR Description: hypothetical protein~similar to Oryza sativachromosome1
MLLEILLRLPPEPIHLFRASFVSKHWRGLVHDARFRRRFREFHGGTPPMLGFFNSCPGAPIFVPTSGGFALSTANMSLDWRALDCRHGRALLHNYGTRTLLVWDPMTGDERYLPFPTRAHLENVHYNGAVLCAAGHTGHGDCHSCPFLVAFVFSSYRYCITSACVYSSVTGVWGEITSIHTPDSLVDAKPTALVGNTLYCLLSNEDSIIEFNLDKNSLDLIEVPYGGNFIITLAQDGPLGFASVDRFSLHLWSRVASIDGVASWEHIRVIDLEKLFAPQVLAACMDRMWPVGYAEDANVIFIHVYPRTYMIHLKSMQIEGILEEATGWSIFPYASFYTPGPGITTGGGDDQVELLNGT

SEQ ID NO: 14230 - DNA, 1430 bp, Triticum aestivum
  misc_feature (1)..(1430): Ceres Seq. ID no. 13597380
agatcgtgcgcttctcctcacaagataatcacagactcgatcaagagcttgtcttggttctgcaatgggggtgaggtgcctgctgctcctggctgtgctcctcttggctggggatcatggcggggaggcgcagccgctcgtgcccggggtcttcacgttcggcgactcgtcggtggatataggtaacaacgactacctccacaccctcatcaaggcggacttccctccctacggcagggacttccccaaccgcgtggccaccgggaggttttgcaacggcaagctggccaccgacatcactgctgatacactggggttcacgagctacccgcccgcgtatctcagcccgcaggcgtcagggaagaaccttctgatcggcgtcaacttcgcatctgctggatcaggctactacgatcacaccgcgcttatgtatcatgccgtccctttctcccaacaactggagtacttcagggagtaccaatccaagctgacggcgttcgctgggagcagccaggccaagtccatcatcagtggctcattgtacatcgtcagcttcggtgcaagtgactttgtgcagaactactacatcaaccctctgctcttcaagacccagaccgtcgaccagttctcggaccggctcgtcagcatcttcgtcaacagcgcgacgcaactttacggcatgggagcgcggcgcatcgcggtgaccacgctgccgcccctgggctgcctccccgcggcgatcacgctgttcgggcacgggagtaccggttgcgtgtcgaggctcaacagcgactcccagcggttcaacgggaagatgagcgcggccgtcagctcgctgtcgaagcggtaccacgacctcaagatcgccgtctttgacatctacacgccgctcttcagcctcgtcacctctcctggagatcaagggttcacggaggcgaagcggggatgctgcgggacgggaaaggtggagttcacggtgttcctctgcaaccccaagtcggtggggacgtgctcgaacgcgtcaacctacgtgttctgggacgccgtccacccgtcggaggcggccaaccaagtgatcgccgacgccctcctcgtcactggcatcgacctcgtcacataatgaaccacgcactggtcggctaacgtcgtcggtcggaggacgacgatggcacacgcttttcaggcgtcctgaagggaaaataatgtgtgcccagagctcccgtgccaagcgtgtcgttgtggcgggaggggttactttctcgggctgtgccactcaccatatcgccagcgtttgtagctagggactgggacacatggaaacatggtttatacgtacgaaaagctcgaagttatgggtgcaagcactggatcttttcttcttttttctttcattcatgtccttcaaatttgatgataactgtgtttttttc

SEQ ID NO: 14231 - protein, 351 aa, Triticum aestivum
  peptide (1)..(351): Ceres Seq. ID no. 13597381
  misc_feature (29)..(342): Pfam Name: Pfam Description:  GDSL-like Lipase/Acylhydrolase
  misc_feature (6)..(350): NCBI GI NO: 15228189 NR Description: GDSL-motif lipase/hydrolase protein
  misc_feature (31)..(350): NCBI GI NO: 2062167 NR Description: Proline-rich protein APG isolog
  misc_feature (6)..(350): NCBI GI NO: 10638955 NR Description: putative proline-rich protein APG isolog
  misc_feature (1)..(351): NCBI GI NO: 13174242 NR Description: putative proline-rich protein [Oryza sativa]
  misc_feature (21)..(351): NCBI GI NO: 15237137 NR Description: lipase, putative [Arabidopsis thaliana]
  misc_feature (20)..(351): NCBI GI NO: 15237531 NR Description: GDSL-motif lipase/hydrolase protein
  misc_feature (5)..(351): NCBI GI NO: 9758010 NR Description: proline-rich protein APG-like
  misc_feature (33)..(351): NCBI GI NO: 15237528 NR Description: GDSL-motif lipase/hydrolase protein
  misc_feature (2)..(350): NCBI GI NO: 30693763 NR Description: GDSL-motif lipase/hydrolase protein
  misc_feature (2)..(288): NCBI GI NO: 11280580 NR Description: hypothetical protein T4D2
MGVRCLLLLAVLLLAGDHGGEAQPLVPGVFTFGDSSVDIGNNDYLHTLIKADFPPYGRDFPNRVATGRFCNGKLATDITADTLGFTSYPPAYLSPQASGKNLLIGVNFASAGSGYYDHTALMYHAVPFSQQLEYFREYQSKLTAFAGSSQAKSIISGSLYIVSFGASDFVQNYYINPLLFKTQTVDQFSDRLVSIFVNSATQLYGMGARRIAVTTLPPLGCLPAAITLFGHGSTGCVSRLNSDSQRFNGKMSAAVSSLSKRYHDLKIAVFDIYTPLFSLVTSPGDQGFTEAKRGCCGTGKVEFTVFLCNPKSVGTCSNASTYVFWDAVHPSEAANQVIADALLVTGIDLVT

SEQ ID NO: 14232 - protein, 230 aa, Triticum aestivum
  peptide (1)..(230): Ceres Seq. ID no. 13597382
  misc_feature (1)..(221): Pfam Name: Pfam Description:  GDSL-like Lipase/Acylhydrolase
  misc_feature (1)..(229): NCBI GI NO: 15228189 NR Description: GDSL-motif lipase/hydrolase protein
  misc_feature (1)..(229): NCBI GI NO: 2062167 NR Description: Proline-rich protein APG isolog
  misc_feature (1)..(229): NCBI GI NO: 10638955 NR Description: putative proline-rich protein APG isolog
  misc_feature (1)..(230): NCBI GI NO: 13174242 NR Description: putative proline-rich protein [Oryza sativa]
  misc_feature (1)..(230): NCBI GI NO: 15237137 NR Description: lipase, putative [Arabidopsis thaliana]
  misc_feature (1)..(230): NCBI GI NO: 15237531 NR Description: GDSL-motif lipase/hydrolase protein
  misc_feature (1)..(230): NCBI GI NO: 9758010 NR Description: proline-rich protein APG-like
  misc_feature (1)..(230): NCBI GI NO: 15237528 NR Description: GDSL-motif lipase/hydrolase protein
  misc_feature (1)..(229): NCBI GI NO: 30693763 NR Description: GDSL-motif lipase/hydrolase protein
  misc_feature (1)..(167): NCBI GI NO: 11280580 NR Description: hypothetical protein T4D2
MYHAVPFSQQLEYFREYQSKLTAFAGSSQAKSIISGSLYIVSFGASDFVQNYYINPLLFKTQTVDQFSDRLVSIFVNSATQLYGMGARRIAVTTLPPLGCLPAAITLFGHGSTGCVSRLNSDSQRFNGKMSAAVSSLSKRYHDLKIAVFDIYTPLFSLVTSPGDQGFTEAKRGCCGTGKVEFTVFLCNPKSVGTCSNASTYVFWDAVHPSEAANQVIADALLVTGIDLVT

SEQ ID NO: 14233 - DNA, 1302 bp, Triticum aestivum
  misc_feature (1)..(1302): Ceres Seq. ID no. 12616772
acaacagccaacaatggcggactctccctccttccgccgccacccgctccccttctcgatcgacatcgtccgctggctcccgtcctccgcctcctccggccgccacctcgcggcggccgtccacgacccctccgtgcccgcctcctcgcgcctcagcctcctaccgctccacgaccccgcctccccgctcgcctccctcccgctcccctcccggcccacggccctccgctgctccccttccgtcctcgccgccgccacctcctccggctccctccacctcctcccctcctccttcgacaccgactcggcggtgtccgtccccggcggcgcggggttccatgtggggcccgtgcgcgggctcgactgcggcggcgaggggtgggtgacggcgggggaggacgggagggtgcacgtggtgtcggacggcgacggcagggtggtggccaggagggtgtgggatgggaagggcatgtcagggtacggggcggcgagatgggcctcgtcggcggagttcgccaccggcggcgccggctgcggcgtgcagtggtgggaccgcaggaaaggggacgccgtggtggcgcagtgcaagggcgtctggggtcatggtgtcgccaccggcatggtgcactccattgatatacatccatcaagaaagcatgtctgtgtggtgggaggctcctcaggaacaatatttgcttgggacctacgctgggcacagcagccaataccactctctggtgtaggccttgacgaaacggcacaacccgtgtgcgagagtgaggtctgggaggttctttttgacaactacacacagtcttctgatattatctcgtctgtctcaacaagaatattacctgtgatgctgtgctcagaggatggaatccttgcaatcgtcgaacaagatgagaggcctcttgaattgcttgccgagccctgtgctatcaactcctttgatatcgatcctcagaacccttctgatgtcgtctgtgccctggaatgggaatcgattggtgtgcttacacgtggaagagatgcaatggcagaggaatgaatgcattcactccccaacaattctattgaatttccatgcataactttctgtgatggcccgtggcgtgactactcacgctgtccttttgttgctcatcagctatcaatgatggaagaggcgtgctcggcgtgtatcatttgcggttttgtgtgaaatcacggatcgtgtaaaacttactgtaactctggatcatacttagctgtgaattggtgttcagcataggtgaaatcggaagcttacttttactgttc

SEQ ID NO: 14234 - protein, 349 aa, Triticum aestivum
  peptide (1)..(349): Ceres Seq. ID no. 12616773
  misc_feature (81)..(341): NCBI GI NO: 18417678 NR Description: expressed protein; protein id: At4g30840
  misc_feature (81)..(341): NCBI GI NO: 21554881 NR Description: unknown [Arabidopsis thaliana]
  misc_feature (81)..(222): NCBI GI NO: 25372649 NR Description: hypothetical protein AT4g30840
  misc_feature (224)..(324): NCBI GI NO: 25372649 NR Description: hypothetical protein AT4g30840
  misc_feature (107)..(266): NCBI GI NO: 30851621 NR Description: 2610529I12Rik protein [Mus musculus]
QQPTMADSPSFRRHPLPFSIDIVRWLPSSASSGRHLAAAVHDPSVPASSRLSLLPLHDPASPLASLPLPSRPTALRCSPSVLAAATSSGSLHLLPSSFDTDSAVSVPGGAGFHVGPVRGLDCGGEGWVTAGEDGRVHVVSDGDGRVVARRVWDGKGMSGYGAARWASSAEFATGGAGCGVQWWDRRKGDAVVAQCKGVWGHGVATGMVHSIDIHPSRKHVCVVGGSSGTIFAWDLRWAQQPIPLSGVGLDETAQPVCESEVWEVLFDNYTQSSDIISSVSTRILPVMLCSEDGILAIVEQDERPLELLAEPCAINSFDIDPQNPSDVVCALEWESIGVLTRGRDAMAEE

SEQ ID NO: 14235 - protein, 345 aa, Triticum aestivum
  peptide (1)..(345): Ceres Seq. ID no. 12616774
  misc_feature (77)..(337): NCBI GI NO: 18417678 NR Description: expressed protein; protein id: At4g30840
  misc_feature (77)..(337): NCBI GI NO: 21554881 NR Description: unknown [Arabidopsis thaliana]
  misc_feature (77)..(218): NCBI GI NO: 25372649 NR Description: hypothetical protein AT4g30840
  misc_feature (220)..(320): NCBI GI NO: 25372649 NR Description: hypothetical protein AT4g30840
  misc_feature (103)..(262): NCBI GI NO: 30851621 NR Description: 2610529I12Rik protein [Mus musculus]
MADSPSFRRHPLPFSIDIVRWLPSSASSGRHLAAAVHDPSVPASSRLSLLPLHDPASPLASLPLPSRPTALRCSPSVLAAATSSGSLHLLPSSFDTDSAVSVPGGAGFHVGPVRGLDCGGEGWVTAGEDGRVHVVSDGDGRVVARRVWDGKGMSGYGAARWASSAEFATGGAGCGVQWWDRRKGDAVVAQCKGVWGHGVATGMVHSIDIHPSRKHVCVVGGSSGTIFAWDLRWAQQPIPLSGVGLDETAQPVCESEVWEVLFDNYTQSSDIISSVSTRILPVMLCSEDGILAIVEQDERPLELLAEPCAINSFDIDPQNPSDVVCALEWESIGVLTRGRDAMAEE

SEQ ID NO: 14236 - protein, 211 aa, Triticum aestivum
  peptide (1)..(211): Ceres Seq. ID no. 12616775
TTANNGGLSLLPPPPAPLLDRHRPLAPVLRLLRPPPRGGRPRPLRARLLAPQPPTAPRPRLPARLPPAPLPAHGPPLLPFRPRRRHLLRLPPPPPLLLRHRLGGVRPRRRGVPCGARARARLRRRGVGDGGGGREGARGVGRRRQGGGQEGVGWEGHVRVRGGEMGLVGGVRHRRRRLRRAVVGPQERGRRGGAVQGRLGSWCRHRHGALH

SEQ ID NO: 14237 - DNA, 1194 bp, Triticum aestivum
  misc_feature (1)..(1194): Ceres Seq. ID no. 15224924
cccgttccgttcccgaccccttccccgccacggacaaaaacccagcgagccgcgagccgcgcgcctccggaccctcctcgccggcatggcctgcacccacctcgccgccgcctcgtcaccggcgaccaccgccgccgcgctgcgtgcacgggcgacggcccccgccgccggtttcgcgcgccttcctgccaccctccatcctgagaacggtgggctggccctcaggggtaggagggcggtcacgcccgtggtcctcgccgccgggccggccgccgcggcgccggtggccgaccgtgacggaacaccggccgcggtgaagcagcccatcatcgtcatcgacaactatgatagctttacctacaacctgtgccagtatatgggggagcttggattaaattttgaggtgtaccgtaatgatgaacttaccatagaggaggtaaagaggatgaaaccacgaggaatacttatttcaccagggcctggtgaaccgcaagattcaggtatatcattgcagactgttctggaacttgggccaaccatcccaatattcggagtttgcatgggtctgcagtgcattggagaggcatttggagggaagattatccgcgttccttctggtgtgatgcatggaaaaagctctccagtttactatgacgaagttctaggaaagtccatattcgagggcttgtcaaacccttttaccgccgcaagatatcatagcttggtcatcgaggaggaaaccttcccgcacgatgaactggaagtcacggcatggactgaagatggacttgtcatggctgctcgccacaagaagtacacgcatatccagggtgttcagttccacccagagagcatcatcacccctgaaggcaagaaaatcatcctcaactttgcgagatatgtcgaggagtttgagaagcagacctccgaggggaagtagaggattcaggaagcagagcagttagaggaagtagagactattgttgagagatcaggcaggcaggaaggggcctaaaagccaagcagatttaggggaaatgaataagggaaaaagagcttttccattgccattcgtttggttcattgtaatatatcattgtggatctagatcccgtatgaacttcattcggtcaattatgttcgtcgtggtgctctttctcaaataataaatcggtggaagcagaagctgttagc

SEQ ID NO: 14238 - protein, 312 aa, Triticum aestivum
  peptide (1)..(312): Ceres Seq. ID no. 15224925
  misc_feature (110)..(299): Pfam Name: Pfam Description:  Glutamine amidotransferase class-I
  misc_feature (29)..(312): NCBI GI NO: 21741992 NR Description: OSJNBa0060P14.1
  misc_feature (91)..(307): NCBI GI NO: 15222532 NR Description: anthranilate synthase, beta subunit (ASB)
  misc_feature (108)..(307): NCBI GI NO: 15242893 NR Description: anthranilate synthase, beta subunit
  misc_feature (108)..(307): NCBI GI NO: 21594026 NR Description: anthranilate synthase beta chain
  misc_feature (91)..(307): NCBI GI NO: 25403004 NR Description: probable anthranilate synthase beta subunit
  misc_feature (95)..(307): NCBI GI NO: 15221840 NR Description: anthranilate synthase, beta subunit (ASB)
  misc_feature (43)..(305): NCBI GI NO: 28301926 NR Description: putative anthranilate synthase beta subunit
  misc_feature (108)..(307): NCBI GI NO: 15221810 NR Description: anthranilate synthase, beta subunit
  misc_feature (109)..(297): NCBI GI NO: 11467408 NR Description: anthranilate synthase component II
  misc_feature (109)..(297): NCBI GI NO: 37520452 NR Description: anthranilate synthase component II
PFRSRPLPRHGQKPSEPRAARLRTLLAGMACTHLAAASSPATTAAALRARATAPAAGFARLPATLHPENGGLALRGRRAVTPVVLAAGPAAAAPVADRDGTPAAVKQPIIVIDNYDSFTYNLCQYMGELGLNFEVYRNDELTIEEVKRMKPRGILISPGPGEPQDSGISLQTVLELGPTIPIFGVCMGLQCIGEAFGGKIIRVPSGVMHGKSSPVYYDEVLGKSIFEGLSNPFTAARYHSLVIEEETFPHDELEVTAWTEDGLVMAARHKKYTHIQGVQFHPESIITPEGKKIILNFARYVEEFEKQTSEGK

SEQ ID NO: 14239 - protein, 284 aa, Triticum aestivum
  peptide (1)..(284): Ceres Seq. ID no. 15224926
  misc_feature (82)..(271): Pfam Name: Pfam Description:  Glutamine amidotransferase class-I
  misc_feature (1)..(284): NCBI GI NO: 21741992 NR Description: OSJNBa0060P14.1
  misc_feature (63)..(279): NCBI GI NO: 15222532 NR Description: anthranilate synthase, beta subunit (ASB)
  misc_feature (80)..(279): NCBI GI NO: 15242893 NR Description: anthranilate synthase, beta subunit
  misc_feature (80)..(279): NCBI GI NO: 21594026 NR Description: anthranilate synthase beta chain
  misc_feature (63)..(279): NCBI GI NO: 25403004 NR Description: probable anthranilate synthase beta subunit
  misc_feature (67)..(279): NCBI GI NO: 15221840 NR Description: anthranilate synthase, beta subunit (ASB)
  misc_feature (15)..(277): NCBI GI NO: 28301926 NR Description: putative anthranilate synthase beta subunit
  misc_feature (80)..(279): NCBI GI NO: 15221810 NR Description: anthranilate synthase, beta subunit
  misc_feature (81)..(269): NCBI GI NO: 11467408 NR Description: anthranilate synthase component II
  misc_feature (81)..(269): NCBI GI NO: 37520452 NR Description: anthranilate synthase component II
MACTHLAAASSPATTAAALRARATAPAAGFARLPATLHPENGGLALRGRRAVTPVVLAAGPAAAAPVADRDGTPAAVKQPIIVIDNYDSFTYNLCQYMGELGLNFEVYRNDELTIEEVKRMKPRGILISPGPGEPQDSGISLQTVLELGPTIPIFGVCMGLQCIGEAFGGKIIRVPSGVMHGKSSPVYYDEVLGKSIFEGLSNPFTAARYHSLVIEEETFPHDELEVTAWTEDGLVMAARHKKYTHIQGVQFHPESIITPEGKKIILNFARYVEEFEKQTSEGK

SEQ ID NO: 14240 - protein, 187 aa, Triticum aestivum
  peptide (1)..(187): Ceres Seq. ID no. 15224927
  misc_feature (1)..(174): Pfam Name: Pfam Description:  Glutamine amidotransferase class-I
  misc_feature (1)..(187): NCBI GI NO: 21741992 NR Description: OSJNBa0060P14.1
  misc_feature (1)..(182): NCBI GI NO: 15222532 NR Description: anthranilate synthase, beta subunit (ASB)
  misc_feature (1)..(182): NCBI GI NO: 15242893 NR Description: anthranilate synthase, beta subunit
  misc_feature (1)..(182): NCBI GI NO: 21594026 NR Description: anthranilate synthase beta chain
  misc_feature (1)..(182): NCBI GI NO: 25403004 NR Description: probable anthranilate synthase beta subunit
  misc_feature (1)..(182): NCBI GI NO: 15221840 NR Description: anthranilate synthase, beta subunit (ASB)
  misc_feature (1)..(180): NCBI GI NO: 28301926 NR Description: putative anthranilate synthase beta subunit
  misc_feature (1)..(182): NCBI GI NO: 15221810 NR Description: anthranilate synthase, beta subunit
  misc_feature (1)..(172): NCBI GI NO: 11467408 NR Description: anthranilate synthase component II
  misc_feature (1)..(172): NCBI GI NO: 37520452 NR Description: anthranilate synthase component II
MGELGLNFEVYRNDELTIEEVKRMKPRGILISPGPGEPQDSGISLQTVLELGPTIPIFGVCMGLQCIGEAFGGKIIRVPSGVMHGKSSPVYYDEVLGKSIFEGLSNPFTAARYHSLVIEEETFPHDELEVTAWTEDGLVMAARHKKYTHIQGVQFHPESIITPEGKKIILNFARYVEEFEKQTSEGK

SEQ ID NO: 14241 - DNA, 1392 bp, Triticum aestivum
  misc_feature (1)..(1392): Ceres Seq. ID no. 12617253
aagcaaagcagcgccacctcgcgagcgccatgctgtccccggcgaccaccgccacggccgccgccttcctctccgcggcgcctgcctcctcatcctctacccaccgcaggcgtagccgtcgcgctgctatctccgcctccctctcgtccgaagaaccgctgctcatacgtgcggcgaggggcgaggatgggctgcctaggccgccggcgtggatgatgcggcaggctgggcggtacatggcgtcgtaccaggcgctgtccaagcgccacccttcgttccgggagcggtcggagaccaccgacctcatcgtcgaaatcacgctacagccgtggcacgccttcgcacccgacggcgtcatcctattctcggacatactcacgccgctgccggccatcggggtgccattcgatatctcggaatccaaggggccggtgatccagtcgcccgtgcggactgaggaacaggtcagggagctcgttcccatagatctcgataagctccagttcgttggggagtcgctcaagattctgcgcaacgagattgatggaaaagctgctttgctaggattcgtgggggccccatggacaattgcaacttacgttgttgaaggagggatgaccaacacttacacaaatataaagcgcatgtgccacacagcaccaaatgtcttgaggggccttctctctcacctcgcagaagctatatctgactatatcatttaccaagtaaactctggtgctcagtgtatacagatatttgattcatggggtgggcaacttccacctcatgtgtgggagcaatggtcaaaaccatatatcagacaaattgtggctaagattaagacagaatgccctcacataccacttgtgctgtatataaatggaaatggaggcttgctcgagcgcatgaaggacataggagttgatgttattggacttgactggacagtggatatggcagatggaaggaggcgcgttggtgatggaattagtgtacaagggaatgtggacccagcatatctattttccccattaccagtattgactgatgaaattcatagggttgtgaaagcagctggtccgaaaggtcatatacttaacttgggccatggtgttcttcaaaaaacaccagaagaagctgtagcacatttctttgatgtcacaaggagcttgagatatgacacccttttccagggtcatcttactgaagaattgcaacctgttgcttgatgatggccagtagccttgccatattttttttggtcttactgttctcagctcaacaccttctacattattagagttcattcccttttgctggagctgttccttgtagagacaccatggctaaatcaattcaattttgttcattatgcatctgtgtatttcagtc

SEQ ID NO: 14242 - protein, 408 aa, Triticum aestivum
  peptide (1)..(408): Ceres Seq. ID no. 12617254
  misc_feature (49)..(390): Pfam Name: URO-D Pfam Description: Uroporphyrinogen decarboxylase
  misc_feature (14)..(408): NCBI GI NO: 34912796 NR Description: putative uroporphyrinogen decarboxylase
  misc_feature (38)..(406): NCBI GI NO: 16323119 NR Description: AT3g14930/K15M2_7 [Arabidopsis thaliana]
  misc_feature (38)..(406): NCBI GI NO: 18400577 NR Description: uroporphyrinogen decarboxylase, putative
  misc_feature (71)..(406): NCBI GI NO: 8777476 NR Description: uroporphyrinogen decarboxylase
  misc_feature (9)..(392): NCBI GI NO: 15226690 NR Description: putative uroporphyrinogen decarboxylase
  misc_feature (9)..(392): NCBI GI NO: 14334768 NR Description: putative uroporphyrinogen decarboxylase
  misc_feature (46)..(392): NCBI GI NO: 2501647 NR Description: Uroporphyrinogen decarboxylase
  misc_feature (46)..(392): NCBI GI NO: 16975230 NR Description: Chain A
  misc_feature (49)..(390): NCBI GI NO: 23041382 NR Description: hypothetical protein
  misc_feature (13)..(392): NCBI GI NO: 6014938 NR Description: Uroporphyrinogen decarboxylase
AKQRHLASAMLSPATTATAAAFLSAAPASSSSTHRRRSRRAAISASLSSEEPLLIRAARGEDGLPRPPAWMMRQAGRYMASYQALSKRHPSFRERSETTDLIVEITLQPWHAFAPDGVILFSDILTPLPAIGVPFDISESKGPVIQSPVRTEEQVRELVPIDLDKLQFVGESLKILRNEIDGKAALLGFVGAPWTIATYVVEGGMTNTYTNIKRMCHTAPNVLRGLLSHLAEAISDYIIYQVNSGAQCIQIFDSWGGQLPPHVWEQWSKPYIRQIVAKIKTECPHIPLVLYINGNGGLLERMKDIGVDVIGLDWTVDMADGRRRVGDGISVQGNVDPAYLFSPLPVLTDEIHRVVKAAGPKGHILNLGHGVLQKTPEEAVAHFFDVTRSLRYDTLFQGHLTEELQPVA

SEQ ID NO: 14243 - protein, 399 aa, Triticum aestivum
  peptide (1)..(399): Ceres Seq. ID no. 12617255
  misc_feature (40)..(381): Pfam Name: URO-D Pfam Description: Uroporphyrinogen decarboxylase
  misc_feature (5)..(399): NCBI GI NO: 34912796 NR Description: putative uroporphyrinogen decarboxylase
  misc_feature (29)..(397): NCBI GI NO: 16323119 NR Description: AT3g14930/K15M2_7 [Arabidopsis thaliana]
  misc_feature (29)..(397): NCBI GI NO: 18400577 NR Description: uroporphyrinogen decarboxylase, putative
  misc_feature (62)..(397): NCBI GI NO: 8777476 NR Description: uroporphyrinogen decarboxylase
  misc_feature (1)..(383): NCBI GI NO: 15226690 NR Description: putative uroporphyrinogen decarboxylase
  misc_feature (1)..(383): NCBI GI NO: 14334768 NR Description: putative uroporphyrinogen decarboxylase
  misc_feature (37)..(383): NCBI GI NO: 2501647 NR Description: Uroporphyrinogen decarboxylase
  misc_feature (37)..(383): NCBI GI NO: 16975230 NR Description: Chain A
  misc_feature (40)..(381): NCBI GI NO: 23041382 NR Description: hypothetical protein
  misc_feature (4)..(383): NCBI GI NO: 6014938 NR Description: Uroporphyrinogen decarboxylase
MLSPATTATAAAFLSAAPASSSSTHRRRSRRAAISASLSSEEPLLIRAARGEDGLPRPPAWMMRQAGRYMASYQALSKRHPSFRERSETTDLIVEITLQPWHAFAPDGVILFSDILTPLPAIGVPFDISESKGPVIQSPVRTEEQVRELVPIDLDKLQFVGESLKILRNEIDGKAALLGFVGAPWTIATYVVEGGMTNTYTNIKRMCHTAPNVLRGLLSHLAEAISDYIIYQVNSGAQCIQIFDSWGGQLPPHVWEQWSKPYIRQIVAKIKTECPHIPLVLYINGNGGLLERMKDIGVDVIGLDWTVDMADGRRRVGDGISVQGNVDPAYLFSPLPVLTDEIHRVVKAAGPKGHILNLGHGVLQKTPEEAVAHFFDVTRSLRYDTLFQGHLTEELQPVA

SEQ ID NO: 14244 - protein, 338 aa, Triticum aestivum
  peptide (1)..(338): Ceres Seq. ID no. 12617256
  misc_feature (1)..(320): Pfam Name: URO-D Pfam Description: Uroporphyrinogen decarboxylase
  misc_feature (1)..(338): NCBI GI NO: 34912796 NR Description: putative uroporphyrinogen decarboxylase
  misc_feature (1)..(336): NCBI GI NO: 16323119 NR Description: AT3g14930/K15M2_7 [Arabidopsis thaliana]
  misc_feature (1)..(336): NCBI GI NO: 18400577 NR Description: uroporphyrinogen decarboxylase, putative
  misc_feature (1)..(336): NCBI GI NO: 8777476 NR Description: uroporphyrinogen decarboxylase
  misc_feature (1)..(322): NCBI GI NO: 15226690 NR Description: putative uroporphyrinogen decarboxylase
  misc_feature (1)..(322): NCBI GI NO: 14334768 NR Description: putative uroporphyrinogen decarboxylase
  misc_feature (1)..(322): NCBI GI NO: 2501647 NR Description: Uroporphyrinogen decarboxylase
  misc_feature (1)..(322): NCBI GI NO: 16975230 NR Description: Chain A
  misc_feature (1)..(320): NCBI GI NO: 23041382 NR Description: hypothetical protein
  misc_feature (1)..(322): NCBI GI NO: 6014938 NR Description: Uroporphyrinogen decarboxylase
MMRQAGRYMASYQALSKRHPSFRERSETTDLIVEITLQPWHAFAPDGVILFSDILTPLPAIGVPFDISESKGPVIQSPVRTEEQVRELVPIDLDKLQFVGESLKILRNEIDGKAALLGFVGAPWTIATYVVEGGMTNTYTNIKRMCHTAPNVLRGLLSHLAEAISDYIIYQVNSGAQCIQIFDSWGGQLPPHVWEQWSKPYIRQIVAKIKTECPHIPLVLYINGNGGLLERMKDIGVDVIGLDWTVDMADGRRRVGDGISVQGNVDPAYLFSPLPVLTDEIHRVVKAAGPKGHILNLGHGVLQKTPEEAVAHFFDVTRSLRYDTLFQGHLTEELQPVA

SEQ ID NO: 14245 - DNA, 1231 bp, Triticum aestivum
  misc_feature (1)..(1231): Ceres Seq. ID no. 13539874
agatcccgcaacccgcgaaacaaaccaccagccaagccggcaagcaatccgcgcgcccccattgttctcctctccctctctctctcagcatccgctccgagtcagctccgacggcatggacgcgcccgcacctgccaagaggagacgcggcggcggtggcggaagcggggagaagaaggatctgttccacgtcgtccacaaggtgcccgccggcgacagcccctacgtccgggccaagcacctccagctcgtggagaaggacgcggaggcgtcgatcgtgtggttctggaaggcgatcaactccggggacagggtagacagcgcgctcaaggacatggccgtggtgatgaagcagcaggaccgcgccgaggaggcgatagaggccatcagatccttcaggcacctctgctccaggcaggcccaggagtccctcgacaacctgctcatcgacctctacaagaaatgcggaaaagtcgacgagcagatagagctgctgaaacagaagctcaagatgatatgcctcggcgaggccttcaacgggaagatcaccaagacggcgcgatcccacggcaagaagttccaggtctcgatccagcaggagatgtcacgcattctgggtaaccttggctgggcttacatgcagcagaacaactatgaagccgctgaattggtttatcgaaaggcccagactatcgtacctgatgccaacagggcgtgcaacctcgggctgtgcctcattaagcagagcagacatgaggaggcagtgcaagtgcttgaggatgtcctacttcgcagaatctccgggttggatgacgacaaggcggttgcccgagctgagcagctcctccgtgagctcggtccgacaacacacatttcatcgccctttgatattggcttgagtttcaccgaagagatcatggagagactagaccttgtgatgaatgattggacaccgttcaggtcgaggcggctgcccgtatttgaggagttagatgcattcagggaccaaatggcttgttgattcattacttcgttggtttttaaactttaacgtgcatttgcgtgtggtaaatagaagttgatgtgcatgtatgtaggaggttttgtggatgttacaggtgtgaatgagagatttgataggttgtagatatcataagcagctagggttgatgcaaagcgttcccttgcggaataatgtggtttcagttttgaatgcagttggtctttgccc

SEQ ID NO: 14246 - protein, 339 aa, Triticum aestivum
  peptide (1)..(339): Ceres Seq. ID no. 13539875
  misc_feature (202)..(235): Pfam Name: Pfam Description:  TPR Domain
  misc_feature (45)..(339): NCBI GI NO: 3859116 NR Description: unknown [Oryza sativa]
  misc_feature (48)..(339): NCBI GI NO: 25406811 NR Description: hypothetical protein
  misc_feature (48)..(339): NCBI GI NO: 30678993 NR Description: male sterility MS5 family [Arabidopsis thaliana]
  misc_feature (60)..(339): NCBI GI NO: 9758884 NR Description: gb|AAC72543
  misc_feature (60)..(339): NCBI GI NO: 30695554 NR Description: male sterility MS5 family [Arabidopsis thaliana]
  misc_feature (53)..(286): NCBI GI NO: 15230439 NR Description: male sterility MS5, putative
  misc_feature (17)..(309): NCBI GI NO: 3859112 NR Description: male sterility MS5 [Arabidopsis thaliana]
  misc_feature (17)..(309): NCBI GI NO: 4028970 NR Description: pollenless3 [Arabidopsis thaliana]
  misc_feature (17)..(261): NCBI GI NO: 15233432 NR Description: male sterility MS5/pollenless 3
  misc_feature (72)..(290): NCBI GI NO: 29467532 NR Description: P0582D05.25
DPATRETNHQPSRQAIRAPPLFSSPSLSQHPLRVSSDGMDAPAPAKRRRGGGGGSGEKKDLFHVVHKVPAGDSPYVRAKHLQLVEKDAEASIVWFWKAINSGDRVDSALKDMAVVMKQQDRAEEAIEAIRSFRHLCSRQAQESLDNLLIDLYKKCGKVDEQIELLKQKLKMICLGEAFNGKITKTARSHGKKFQVSIQQEMSRILGNLGWAYMQQNNYEAAELVYRKAQTIVPDANRACNLGLCLIKQSRHEEAVQVLEDVLLRRISGLDDDKAVARAEQLLRELGPTTHISSPFDIGLSFTEEIMERLDLVMNDWTPFRSRRLPVFEELDAFRDQMAC

SEQ ID NO: 14247 - protein, 301 aa, Triticum aestivum
  peptide (1)..(301): Ceres Seq. ID no. 13539876
  misc_feature (164)..(197): Pfam Name: Pfam Description:  TPR Domain
  misc_feature (7)..(301): NCBI GI NO: 3859116 NR Description: unknown [Oryza sativa]
  misc_feature (10)..(301): NCBI GI NO: 25406811 NR Description: hypothetical protein
  misc_feature (10)..(301): NCBI GI NO: 30678993 NR Description: male sterility MS5 family [Arabidopsis thaliana]
  misc_feature (22)..(301): NCBI GI NO: 9758884 NR Description: gb|AAC72543
  misc_feature (22)..(301): NCBI GI NO: 30695554 NR Description: male sterility MS5 family [Arabidopsis thaliana]
  misc_feature (15)..(248): NCBI GI NO: 15230439 NR Description: male sterility MS5, putative
  misc_feature (1)..(271): NCBI GI NO: 3859112 NR Description: male sterility MS5 [Arabidopsis thaliana]
  misc_feature (1)..(271): NCBI GI NO: 4028970 NR Description: pollenless3 [Arabidopsis thaliana]
  misc_feature (1)..(223): NCBI GI NO: 15233432 NR Description: male sterility MS5/pollenless 3
  misc_feature (34)..(252): NCBI GI NO: 29467532 NR Description: P0582D05.25
MDAPAPAKRRRGGGGGSGEKKDLFHVVHKVPAGDSPYVRAKHLQLVEKDAEASIVWFWKAINSGDRVDSALKDMAVVMKQQDRAEEAIEAIRSFRHLCSRQAQESLDNLLIDLYKKCGKVDEQIELLKQKLKMICLGEAFNGKITKTARSHGKKFQVSIQQEMSRILGNLGWAYMQQNNYEAAELVYRKAQTIVPDANRACNLGLCLIKQSRHEEAVQVLEDVLLRRISGLDDDKAVARAEQLLRELGPTTHISSPFDIGLSFTEEIMERLDLVMNDWTPFRSRRLPVFEELDAFRDQMAC

SEQ ID NO: 14248 - protein, 228 aa, Triticum aestivum
  peptide (1)..(228): Ceres Seq. ID no. 13539877
  misc_feature (91)..(124): Pfam Name: Pfam Description:  TPR Domain
  misc_feature (1)..(228): NCBI GI NO: 3859116 NR Description: unknown [Oryza sativa]
  misc_feature (1)..(228): NCBI GI NO: 25406811 NR Description: hypothetical protein
  misc_feature (1)..(228): NCBI GI NO: 30678993 NR Description: male sterility MS5 family [Arabidopsis thaliana]
  misc_feature (1)..(228): NCBI GI NO: 9758884 NR Description: gb|AAC72543
  misc_feature (1)..(228): NCBI GI NO: 30695554 NR Description: male sterility MS5 family [Arabidopsis thaliana]
  misc_feature (1)..(175): NCBI GI NO: 15230439 NR Description: male sterility MS5, putative
  misc_feature (1)..(198): NCBI GI NO: 3859112 NR Description: male sterility MS5 [Arabidopsis thaliana]
  misc_feature (1)..(198): NCBI GI NO: 4028970 NR Description: pollenless3 [Arabidopsis thaliana]
  misc_feature (1)..(150): NCBI GI NO: 15233432 NR Description: male sterility MS5/pollenless 3
  misc_feature (1)..(179): NCBI GI NO: 29467532 NR Description: P0582D05.25
MAVVMKQQDRAEEAIEAIRSFRHLCSRQAQESLDNLLIDLYKKCGKVDEQIELLKQKLKMICLGEAFNGKITKTARSHGKKFQVSIQQEMSRILGNLGWAYMQQNNYEAAELVYRKAQTIVPDANRACNLGLCLIKQSRHEEAVQVLEDVLLRRISGLDDDKAVARAEQLLRELGPTTHISSPFDIGLSFTEEIMERLDLVMNDWTPFRSRRLPVFEELDAFRDQMAC

SEQ ID NO: 14249 - DNA, 1165 bp, Triticum aestivum
  misc_feature (1)..(1165): Ceres Seq. ID no. 13597435
actctagtacttgtcatcttcttccccgaagcttctcgtcctctcccctccccctcgcaccgccggagggaggcgccggccgcgccgtctcctcgccccgtccgtccggccgccgctcgtcgtgggtggttggttccgagcgagcgacgcccagccagcatggcggcaaatgtgggggagtccacgagcggcagcagcagcgtggccggcgacggcgggggcagcttcgagtgcaacatatgctttgagctgccgcaggagcccatcgtcacgctctgcggccacctcttctgctggccctgcctctacaagtggctgcacatccactcgcactcgcccgagtgccccgtctgcaaggccgtcgtcgaggaggacaagctcgtcccgctctacggccgcggcaaggaccgcgtcgaccccaggtccaagggggtgccggccggggccgagatccccaaccggccgaccgggcagcggcccgccaccgccccgcaggccgaccccaacaaccacttccccaacgcaaccctaacccctggttcatggggggagggggcgtccctttggccaacgcgcggtggggaaactacaccttctcggccgcgtttggcggcctgttcccgctgctgagcttccaggtgcatggattcccggacgcgaccgcgtacgggcagcctgccgggtttccctatggctacgggcatggccatggccatgggcatgctttccatggcgggcacgcccacgccgctgccccccggcacgcgccgcccgggcagcagcagcagcaggcggacgtgtacctcaaggcgctcctcatcctggttggctttctcgtgatcgcgagcctcatcacattctaggttcgtcaccattgtcatttgtcaccgtcataataagagaaacgattgtcatgatacttctcagatgttgtgtgcattaccttgcccccccgtacgaaagccccggtctaaatctgagtggtgcgttttgagcgaaagtgttcatagaactcatgtatatatgtgctatttagacgcggtctgaatggggggtgcctgtgtaccgtagtagtttcacactgattcgtgaatgatttggaaacctctgtttggagtggatgtaccagaccaattatatcatgtgtaattttgtttcgactgcc

SEQ ID NO: 14250 - protein, 209 aa, Triticum aestivum
  peptide (1)..(209): Ceres Seq. ID no. 13597436
  misc_feature (78)..(118): Pfam Name: RING finger Pfam Description: Zinc finger, C3HC4 type
  misc_feature (54)..(194): NCBI GI NO: 29150403 NR Description: unknown protein
  misc_feature (21)..(194): NCBI GI NO: 34909840 NR Description: P0403C05.28
  misc_feature (56)..(174): NCBI GI NO: 15224062 NR Description: zinc finger
  misc_feature (56)..(174): NCBI GI NO: 21553849 NR Description: putative RING zinc finger protein
  misc_feature (56)..(199): NCBI GI NO: 18394721 NR Description: zinc finger
  misc_feature (71)..(171): NCBI GI NO: 15222064 NR Description: zinc finger
  misc_feature (48)..(174): NCBI GI NO: 21912604 NR Description: putative ubiquitin ligase [Taenia solium]
  misc_feature (60)..(156): NCBI GI NO: 22795037 NR Description: putative RING protein [Populus x canescens]
  misc_feature (47)..(160): NCBI GI NO: 37590321 NR Description: Unknown (protein for MGC:73070) [Danio rerio]
  misc_feature (64)..(161): NCBI GI NO: 5902054 NR Description: ring finger protein 5 [Homo sapiens]
TLVLVIFFPEASRPLPSPSHRRREAPAAPSPRPVRPAAARRGWLVPSERRPASMAANVGESTSGSSSVAGDGGGSFECNICFELPQEPIVTLCGHLFCWPCLYKWLHIHSHSPECPVCKAVVEEDKLVPLYGRGKDRVDPRSKGVPAGAEIPNRPTGQRPATAPQADPNNHFPNATLTPGSWGEGASLWPTRGGETTPSRPRLAACSRC

SEQ ID NO: 14251 - protein, 156 aa, Triticum aestivum
  peptide (1)..(156): Ceres Seq. ID no. 13597437
  misc_feature (25)..(65): Pfam Name: RING finger Pfam Description: Zinc finger, C3HC4 type
  misc_feature (1)..(141): NCBI GI NO: 29150403 NR Description: unknown protein
  misc_feature (1)..(141): NCBI GI NO: 34909840 NR Description: P0403C05.28
  misc_feature (3)..(121): NCBI GI NO: 15224062 NR Description: zinc finger
  misc_feature (3)..(121): NCBI GI NO: 21553849 NR Description: putative RING zinc finger protein
  misc_feature (3)..(146): NCBI GI NO: 18394721 NR Description: zinc finger
  misc_feature (18)..(118): NCBI GI NO: 15222064 NR Description: zinc finger
  misc_feature (1)..(121): NCBI GI NO: 21912604 NR Description: putative ubiquitin ligase [Taenia solium]
  misc_feature (7)..(103): NCBI GI NO: 22795037 NR Description: putative RING protein [Populus x canescens]
  misc_feature (1)..(107): NCBI GI NO: 37590321 NR Description: Unknown (protein for MGC:73070) [Danio rerio]
  misc_feature (11)..(108): NCBI GI NO: 5902054 NR Description: ring finger protein 5 [Homo sapiens]
MAANVGESTSGSSSVAGDGGGSFECNICFELPQEPIVTLCGHLFCWPCLYKWLHIHSHSPECPVCKAVVEEDKLVPLYGRGKDRVDPRSKGVPAGAEIPNRPTGQRPATAPQADPNNHFPNATLTPGSWGEGASLWPTRGGETTPSRPRLAACSRC

SEQ ID NO: 14252 - protein, 120 aa, Triticum aestivum
  peptide (1)..(120): Ceres Seq. ID no. 13597438
  misc_feature (7)..(120): Pfam Name: Pfam Description:  Glycoprotein GG/GX
  misc_feature (1)..(120): NCBI GI NO: 22549323 NR Description: LppS protein [Mycoplasma conjunctivae]
MWGSPRAAAAAWPATAGAASSATYALSCRRSPSSRSAATSSAGPASTSGCTSTRTRPSAPSARPSSRRTSSSRSTAAARTASTPGPRGCRPGPRSPTGRPGSGPPPPRRPTPTTTSPTQP

SEQ ID NO: 14253 - DNA, 1114 bp, Triticum aestivum
  misc_feature (1)..(1114): Ceres Seq. ID no. 13655598
aatccgctaaggagtgtgtaacaacaccacacaattcaacactgctagctacacagcacacgaaccgatccatccatccagaaaaaaaagaaagagtgcccgtcgaaaatgccggtgagcaggatcgccatcggcgccccgggggagctgtcccacccggacaccttccgcgccggcgtcgccgagttcatctccatgctcatcttcgtcttcgccggctcaggctccggcatggccttcggcaagctgactgacggcggcgcgacgacgccggcggggcttatcgcggcggcgctggcgcacgcgttcgcgctcttcgtggccgtctccgtgggcgccaacatctccggcgggcacgtgaacccggccgtcacattcggcgccttcgtgggcggcaacatcagcctgctcaaggccgtggtgtactgggtggcgcagctgctcggctccgtcgtggcctgcctcctcctcaagatcgccaccggcggcgaggccgtgggcgccttctcgctctccgccggcgtcggcgtctggaacgccgtggtgttcgagatcgtcatgaccttcgggctcgtctacacggtgtacgccaccgcggtcgaccccaagcgcggcgacctcggggtgatcgcgcccatcgccatcggcttcatcgtcggcgccaacatcctcgccggcggcgccttcgacggcgcctccatgaaccccgccgtctccttcggccccgctgtcgtcagcggcgtctgggagaaccactgggtctactggctcggccccttcgccggcgccgccatcgccgccctcgtctacgacatctgcttcatcggccagcgcccccacgagcagctccccaccgccgactactgaaaacctcaatctcatctcgtccatccgtcatcgccatgagagattgaaatcgcttcaaaaattccagcaagtgtacgtcgtcgcgtcatcatcagtaagccagtttagtttcattgcgctatcttgtccttgagaaattcagggtaaacagtgtgtgcgagtcagtcagtcaggaataatctcatccttctcttatcttggtgtatgtatgtacgtcctcaattatgaatgcttctattccatggcc

SEQ ID NO: 14254 - protein, 252 aa, Triticum aestivum
  peptide (1)..(252): Ceres Seq. ID no. 13655599
  misc_feature (13)..(234): Pfam Name: Pfam Description:  Major intrinsic protein
  misc_feature (1)..(252): NCBI GI NO: 34906078 NR Description: putative tonoplast membrane integral protein
  misc_feature (1)..(252): NCBI GI NO: 13447819 NR Description: tonoplast membrane integral protein ZmTIP1-2
  misc_feature (1)..(252): NCBI GI NO: 8699604 NR Description: putative aquaporin TIP3
  misc_feature (1)..(252): NCBI GI NO: 15234189 NR Description: major intrinsic protein (MIP) family
  misc_feature (1)..(251): NCBI GI NO: 541951 NR Description: SPCP2 protein - soybean
  misc_feature (1)..(252): NCBI GI NO: 9988412 NR Description: gamma tonoplast intrinsic protein [Pyrus communis]
  misc_feature (1)..(252): NCBI GI NO: 21284370 NR Description: tonoplast intrinsic protein bobTIP26-1
  misc_feature (1)..(252): NCBI GI NO: 21593151 NR Description: putative aquaporin
  misc_feature (1)..(252): NCBI GI NO: 475048 NR Description: tonoplast intrinsic protein gamma (gamma-TIP)
  misc_feature (1)..(252): NCBI GI NO: 15228041 NR Description: major intrinsic protein (MIP) family
MPVSRIAIGAPGELSHPDTFRAGVAEFISMLIFVFAGSGSGMAFGKLTDGGATTPAGLIAAALAHAFALFVAVSVGANISGGHVNPAVTFGAFVGGNISLLKAVVYWVAQLLGSVVACLLLKIATGGEAVGAFSLSAGVGVWNAVVFEIVMTFGLVYTVYATAVDPKRGDLGVIAPIAIGFIVGANILAGGAFDGASMNPAVSFGPAVVSGVWENHWVYWLGPFAGAAIAALVYDICFIGQRPHEQLPTADY

SEQ ID NO: 14255 - protein, 223 aa, Triticum aestivum
  peptide (1)..(223): Ceres Seq. ID no. 13655600
  misc_feature (1)..(205): Pfam Name: Pfam Description:  Major intrinsic protein
  misc_feature (1)..(223): NCBI GI NO: 34906078 NR Description: putative tonoplast membrane integral protein
  misc_feature (1)..(223): NCBI GI NO: 13447819 NR Description: tonoplast membrane integral protein ZmTIP1-2
  misc_feature (1)..(223): NCBI GI NO: 8699604 NR Description: putative aquaporin TIP3
  misc_feature (1)..(223): NCBI GI NO: 15234189 NR Description: major intrinsic protein (MIP) family
  misc_feature (1)..(222): NCBI GI NO: 541951 NR Description: SPCP2 protein - soybean
  misc_feature (1)..(223): NCBI GI NO: 9988412 NR Description: gamma tonoplast intrinsic protein [Pyrus communis]
  misc_feature (1)..(223): NCBI GI NO: 21284370 NR Description: tonoplast intrinsic protein bobTIP26-1
  misc_feature (1)..(223): NCBI GI NO: 21593151 NR Description: putative aquaporin
  misc_feature (1)..(223): NCBI GI NO: 475048 NR Description: tonoplast intrinsic protein gamma (gamma-TIP)
  misc_feature (1)..(223): NCBI GI NO: 15228041 NR Description: major intrinsic protein (MIP) family
MLIFVFAGSGSGMAFGKLTDGGATTPAGLIAAALAHAFALFVAVSVGANISGGHVNPAVTFGAFVGGNISLLKAVVYWVAQLLGSVVACLLLKIATGGEAVGAFSLSAGVGVWNAVVFEIVMTFGLVYTVYATAVDPKRGDLGVIAPIAIGFIVGANILAGGAFDGASMNPAVSFGPAVVSGVWENHWVYWLGPFAGAAIAALVYDICFIGQRPHEQLPTADY

SEQ ID NO: 14256 - protein, 211 aa, Triticum aestivum
  peptide (1)..(211): Ceres Seq. ID no. 13655601
  misc_feature (1)..(193): Pfam Name: Pfam Description:  Major intrinsic protein
  misc_feature (1)..(211): NCBI GI NO: 34906078 NR Description: putative tonoplast membrane integral protein
  misc_feature (1)..(211): NCBI GI NO: 13447819 NR Description: tonoplast membrane integral protein ZmTIP1-2
  misc_feature (1)..(211): NCBI GI NO: 8699604 NR Description: putative aquaporin TIP3
  misc_feature (1)..(211): NCBI GI NO: 15234189 NR Description: major intrinsic protein (MIP) family
  misc_feature (1)..(210): NCBI GI NO: 541951 NR Description: SPCP2 protein - soybean
  misc_feature (1)..(211): NCBI GI NO: 9988412 NR Description: gamma tonoplast intrinsic protein [Pyrus communis]
  misc_feature (1)..(211): NCBI GI NO: 21284370 NR Description: tonoplast intrinsic protein bobTIP26-1
  misc_feature (1)..(211): NCBI GI NO: 21593151 NR Description: putative aquaporin
  misc_feature (1)..(211): NCBI GI NO: 475048 NR Description: tonoplast intrinsic protein gamma (gamma-TIP)
  misc_feature (1)..(211): NCBI GI NO: 15228041 NR Description: major intrinsic protein (MIP) family
MAFGKLTDGGATTPAGLIAAALAHAFALFVAVSVGANISGGHVNPAVTFGAFVGGNISLLKAVVYWVAQLLGSVVACLLLKIATGGEAVGAFSLSAGVGVWNAVVFEIVMTFGLVYTVYATAVDPKRGDLGVIAPIAIGFIVGANILAGGAFDGASMNPAVSFGPAVVSGVWENHWVYWLGPFAGAAIAALVYDICFIGQRPHEQLPTADY

SEQ ID NO: 14257 - DNA, 1284 bp, Triticum aestivum
  misc_feature (1)..(1284): Ceres Seq. ID no. 13597439
gaggccagccgagttatcgtcgtcacatcgaacgaacgctactcaaagaccagtccaaccacggaaggtcgtgcaagcgcaaactatggagagcacaggggtagcgagacggacgtcgacggtgcaggagctcgccagcgccctcggcaaaccagacgtgccggcccagtacgtctcacgcggacaccacgaaaacgaccagcagcccgccgcggtgccggtccctgtcatcgacatcggccgccttttcaaccaggacggcgccgccgcagctgacgacgaggcggcgaagctccggcaggcgctcgagtcgtggggcctcttcctggtgactaaccacggcgtggacacctcggtgatggacggcatgatggtcgcgtcgagggagttcttccggcagccacccgaagagaagcagagatacaccaacctcatcggcggcgagcggttccagctcgaggggtatgggaccgaccgggtgaactcatcggaacagatcctggactggtcagaccgcctctacctcaaggtggagcccgaagacgagcgcagcctcgccctctggccagcccatccccaaaccttcaggaatcttctgcacgagttcaccacgaaatgtagggtggtgaaggacggactggtccgggcaatggcgaggctgctcgagctcgacaacgactatatcattgaacagtttggggagaaggctgacacttacgctagattcagctactacccggagtgcccaaggccagagctcgtgttcggcctcaagccccactccgatgggagcgttcttaccgtgctcatggtcgatgacaccgttggtgggctgcagattttgagagacggtgtttggttcgatgtaccgatagttcctcacaccctgctgatcaacataggagaccaaactgagataatgagcaatgggatcttcaaaagccccgtgcatagagttgtgacaaatgctgagaaagaaaggctatcgctggctctattctactcgcttgatcccgagagagaaattgagccagcgactcagctggtagatgggaagagaccggcgttgtacagaaaggtcaaggtgaaggactacattgctggactctttgaacatgtgtcgcaaggaacgatggttattgatacagtgaagatataaacaagtgtggtatcatgctggtaatgcaaaacgtgtaatcgttctaggaacaatttatctccatgtattgttgcatgctaactttattaagtactccctttgttcagcatcacatatcgttttgg

SEQ ID NO: 14258 - protein, 385 aa, Triticum aestivum
  peptide (1)..(385): Ceres Seq. ID no. 13597440
  misc_feature (238)..(334): Pfam Name: II Pfam Description: 2OG-Fe
  misc_feature (36)..(385): NCBI GI NO: 34898468 NR Description: Similar to Prunus armeniaca ethylene-forming-enzyme-like dioxygenase
  misc_feature (36)..(285): NCBI GI NO: 24413981 NR Description: contains EST C72504
  misc_feature (306)..(385): NCBI GI NO: 24413981 NR Description: contains EST C72504
  misc_feature (41)..(385): NCBI GI NO: 33115140 NR Description: iron/ascorbate-dependent oxidoreductase
  misc_feature (36)..(385): NCBI GI NO: 24413984 NR Description: ethylene-forming-enzyme-like dioxygenase-like
  misc_feature (36)..(385): NCBI GI NO: 24413982 NR Description: ethylene-forming-enzyme-like dioxygenase-like
  misc_feature (36)..(359): NCBI GI NO: 34898470 NR Description: ESTs D47168
  misc_feature (41)..(385): NCBI GI NO: 34898472 NR Description: Similar to Prunus armeniaca ethylene-forming-enzyme-like dioxygenase
  misc_feature (197)..(385): NCBI GI NO: 24413983 NR Description: ethylene-forming-enzyme-like dioxygenase-like
  misc_feature (41)..(154): NCBI GI NO: 24413983 NR Description: ethylene-forming-enzyme-like dioxygenase-like
RPAELSSSHRTNATQRPVQPRKVVQAQTMESTGVARRTSTVQELASALGKPDVPAQYVSRGHHENDQQPAAVPVPVIDIGRLFNQDGAAAADDEAAKLRQALESWGLFLVTNHGVDTSVMDGMMVASREFFRQPPEEKQRYTNLIGGERFQLEGYGTDRVNSSEQILDWSDRLYLKVEPEDERSLALWPAHPQTFRNLLHEFTTKCRVVKDGLVRAMARLLELDNDYIIEQFGEKADTYARFSYYPECPRPELVFGLKPHSDGSVLTVLMVDDTVGGLQILRDGVWFDVPIVPHTLLINIGDQTEIMSNGIFKSPVHRVVTNAEKERLSLALFYSLDPEREIEPATQLVDGKRPALYRKVKVKDYIAGLFEHVSQGTMVIDTVKI

SEQ ID NO: 14259 - protein, 357 aa, Triticum aestivum
  peptide (1)..(357): Ceres Seq. ID no. 13597441
  misc_feature (210)..(306): Pfam Name: II Pfam Description: 2OG-Fe
  misc_feature (8)..(357): NCBI GI NO: 34898468 NR Description: Similar to Prunus armeniaca ethylene-forming-enzyme-like dioxygenase
  misc_feature (8)..(257): NCBI GI NO: 24413981 NR Description: contains EST C72504
  misc_feature (278)..(357): NCBI GI NO: 24413981 NR Description: contains EST C72504
  misc_feature (13)..(357): NCBI GI NO: 33115140 NR Description: iron/ascorbate-dependent oxidoreductase
  misc_feature (8)..(357): NCBI GI NO: 24413984 NR Description: ethylene-forming-enzyme-like dioxygenase-like
  misc_feature (8)..(357): NCBI GI NO: 24413982 NR Description: ethylene-forming-enzyme-like dioxygenase-like
  misc_feature (8)..(331): NCBI GI NO: 34898470 NR Description: ESTs D47168
  misc_feature (13)..(357): NCBI GI NO: 34898472 NR Description: Similar to Prunus armeniaca ethylene-forming-enzyme-like dioxygenase
  misc_feature (169)..(357): NCBI GI NO: 24413983 NR Description: ethylene-forming-enzyme-like dioxygenase-like
  misc_feature (13)..(126): NCBI GI NO: 24413983 NR Description: ethylene-forming-enzyme-like dioxygenase-like
MESTGVARRTSTVQELASALGKPDVPAQYVSRGHHENDQQPAAVPVPVIDIGRLFNQDGAAAADDEAAKLRQALESWGLFLVTNHGVDTSVMDGMMVASREFFRQPPEEKQRYTNLIGGERFQLEGYGTDRVNSSEQILDWSDRLYLKVEPEDERSLALWPAHPQTFRNLLHEFTTKCRVVKDGLVRAMARLLELDNDYIIEQFGEKADTYARFSYYPECPRPELVFGLKPHSDGSVLTVLMVDDTVGGLQILRDGVWFDVPIVPHTLLINIGDQTEIMSNGIFKSPVHRVVTNAEKERLSLALFYSLDPEREIEPATQLVDGKRPALYRKVKVKDYIAGLFEHVSQGTMVIDTVKI

SEQ ID NO: 14260 - protein, 266 aa, Triticum aestivum
  peptide (1)..(266): Ceres Seq. ID no. 13597442
  misc_feature (119)..(215): Pfam Name: II Pfam Description: 2OG-Fe
  misc_feature (1)..(266): NCBI GI NO: 34898468 NR Description: Similar to Prunus armeniaca ethylene-forming-enzyme-like dioxygenase
  misc_feature (1)..(166): NCBI GI NO: 24413981 NR Description: contains EST C72504
  misc_feature (187)..(266): NCBI GI NO: 24413981 NR Description: contains EST C72504
  misc_feature (1)..(266): NCBI GI NO: 33115140 NR Description: iron/ascorbate-dependent oxidoreductase
  misc_feature (1)..(266): NCBI GI NO: 24413984 NR Description: ethylene-forming-enzyme-like dioxygenase-like
  misc_feature (1)..(266): NCBI GI NO: 24413982 NR Description: ethylene-forming-enzyme-like dioxygenase-like
  misc_feature (1)..(240): NCBI GI NO: 34898470 NR Description: ESTs D47168
  misc_feature (1)..(266): NCBI GI NO: 34898472 NR Description: Similar to Prunus armeniaca ethylene-forming-enzyme-like dioxygenase
  misc_feature (78)..(266): NCBI GI NO: 24413983 NR Description: ethylene-forming-enzyme-like dioxygenase-like
  misc_feature (1)..(35): NCBI GI NO: 24413983 NR Description: ethylene-forming-enzyme-like dioxygenase-like
MDGMMVASREFFRQPPEEKQRYTNLIGGERFQLEGYGTDRVNSSEQILDWSDRLYLKVEPEDERSLALWPAHPQTFRNLLHEFTTKCRVVKDGLVRAMARLLELDNDYIIEQFGEKADTYARFSYYPECPRPELVFGLKPHSDGSVLTVLMVDDTVGGLQILRDGVWFDVPIVPHTLLINIGDQTEIMSNGIFKSPVHRVVTNAEKERLSLALFYSLDPEREIEPATQLVDGKRPALYRKVKVKDYIAGLFEHVSQGTMVIDTVKI

SEQ ID NO: 14261 - DNA, 1459 bp, Triticum aestivum
  misc_feature (1)..(1459): Ceres Seq. ID no. 13597403
cgaaaaaaattccattcaaaatccatttgagcttcacaacagctagtgtgtccgtgagcttctctcttcaatgtgcgtgtgtgtgtaagcagcactagtgagtgtgtgtgctttgctagtgtgctgagcgcaggcagtagtagcacttggctcttccgccggtcgtgtatcagtgtactcgagtgctagcaagtagttctgggctaacagaaggcagccgatcaccggctcccacgtcctctagatccacggctacaagcagatcaagaagatggtccccaacggcaaggcagtcgagtcagccccgttcgacgtcgccggccgcgcctgccgaatcaggtgctatccgaacggcagcggcaagaaacactacggctacacgtccctcttcctcaccagccactgcgacgacggcacggtaaggctagagctcagcgtgctcgatcgggacgggaatccgtctcgcactcgagccacggaaaagcggcgcttctggatcggcgacagctggggctggggctttaaggatttcgtgaagaacgacgatctggtcgagggagagcacctcgtggacgactgcctcatcgtcctctgcgacgtcaccgtccacgacccttccttgcacgccgaggaggttgccgcgccggttgtggcgcctccgttcgacctaagtggggagctcggggaggccatgtggaacgagacggacgtgacgatccacgtcggcgacgagacgttcccggcgcaccggtcggtgctggaggctgcgtccgccgtcttcaaggcggacctcgagaacaacggcaccggcgaggtacgcgtcgacgacatggacgcccaggtgttcaagaccctgctgcagttcatgtacacgagcgtgctgcctgacaagaaccagctcgaggcagacgccgcgacggcggagcggctgctcgtggcggcggacaggtacgggctggagaagataaaggtcgtctgcgaggaggcgctgtgcccgcgcgtcaacatgggctccgtgggcaccatgctggcgttggcggagcggcacggaggtgccgtcctgaagaaggcgtgcatggagttcctctcgatccccggtaacctattatcattcatggcgaccgagggttttgaggagctcaagagaacccagcttgggtgctggagcttcacgtgaacctgatggatacgtgcagcttgcttcctagctagttaaattagctattctcgctaagtcagataagttaattaggtactcttgcatatttttatatcaatcttgttaagtctcagtcgactgatcagactttaaatctcagtcgatgctatatccgtaagatcttacattggtatacatgtattttttttcagttttctcttttacatgtaatgtcatttgaccaaaaaaaaaaaaaaaaaagcttatcgataccgycracctcgaggcgrgkgcccgrta

SEQ ID NO: 14262 - protein, 301 aa, Triticum aestivum
  peptide (1)..(301): Ceres Seq. ID no. 15222094
  misc_feature (146)..(244): Pfam Name: Pfam Description:  BTB/POZ domain
  misc_feature (85)..(293): NCBI GI NO: 37534590 NR Description: putative speckle-type protein
  misc_feature (1)..(50): NCBI GI NO: 37534590 NR Description: putative speckle-type protein
  misc_feature (1)..(290): NCBI GI NO: 37534522 NR Description: putative speckle-type protein
  misc_feature (1)..(292): NCBI GI NO: 37534574 NR Description: putative speckle-type protein
  misc_feature (126)..(293): NCBI GI NO: 37534534 NR Description: putative speckle-type protein
  misc_feature (1)..(112): NCBI GI NO: 37534534 NR Description: putative speckle-type protein
  misc_feature (87)..(293): NCBI GI NO: 37534476 NR Description: hypothetical protein
  misc_feature (1)..(84): NCBI GI NO: 37534476 NR Description: hypothetical protein
  misc_feature (1)..(293): NCBI GI NO: 37534558 NR Description: putative speckle-type protein
  misc_feature (1)..(293): NCBI GI NO: 37534588 NR Description: putative speckle-type protein
MVPNGKAVESAPFDVAGRACRIRCYPNGSGKKHYGYTSLFLTSHCDDGTVRLELSVLDRDGNPSRTRATEKRRFWIGDSWGWGFKDFVKNDDLVEGEHLVDDCLIVLCDVTVHDPSLHAEEVAAPVVAPPFDLSGELGEAMWNETDVTIHVGDETFPAHRSVLEAASAVFKADLENNGTGEVRVDDMDAQVFKTLLQFMYTSVLPDKNQLEADAATAERLLVAADRYGLEKIKVVCEEALCPRVNMGSVGTMLALAERHGGAVLKKACMEFLSIPGNLLSFMATEGFEELKRTQLGCWSFT

SEQ ID NO: 14263 - protein, 161 aa, Triticum aestivum
  peptide (1)..(161): Ceres Seq. ID no. 15222095
  misc_feature (6)..(104): Pfam Name: Pfam Description:  BTB/POZ domain
  misc_feature (1)..(153): NCBI GI NO: 37534590 NR Description: putative speckle-type protein
  misc_feature (1)..(150): NCBI GI NO: 37534522 NR Description: putative speckle-type protein
  misc_feature (1)..(152): NCBI GI NO: 37534574 NR Description: putative speckle-type protein
  misc_feature (1)..(153): NCBI GI NO: 37534534 NR Description: putative speckle-type protein
  misc_feature (1)..(153): NCBI GI NO: 37534476 NR Description: hypothetical protein
  misc_feature (1)..(153): NCBI GI NO: 37534558 NR Description: putative speckle-type protein
  misc_feature (1)..(153): NCBI GI NO: 37534588 NR Description: putative speckle-type protein
  misc_feature (1)..(150): NCBI GI NO: 37534478 NR Description: hypothetical protein
  misc_feature (1)..(153): NCBI GI NO: 37534570 NR Description: putative speckle-type protein
  misc_feature (1)..(153): NCBI GI NO: 4680501 NR Description: hypothetical protein [Oryza sativa]
MWNETDVTIHVGDETFPAHRSVLEAASAVFKADLENNGTGEVRVDDMDAQVFKTLLQFMYTSVLPDKNQLEADAATAERLLVAADRYGLEKIKVVCEEALCPRVNMGSVGTMLALAERHGGAVLKKACMEFLSIPGNLLSFMATEGFEELKRTQLGCWSFT

SEQ ID NO: 14264 - DNA, 1400 bp, Triticum aestivum
  misc_feature (1)..(1400): Ceres Seq. ID no. 13598511
gttgccactcgctccagaagctgctcctgcccgggccagccgccgccactgagagtgagctcggctaccccagctcttccactctcgaagctaccctgctctctgtagcttcgctccctttctccttctttcgatggcgtcaggggaagcagagccgctgcagtacacgaccaccgtgctgcgggtgtccatccactgcgagggctgcaagaagaaggtcaagaaggtgctccacagcatcgaaggtgtgtacaaggtgacgatcgacgcgacgcagcacaaggtgacggtcaccggcagcgtggccgccgacgcactcgtcagacggctgctcaagtccggcaagcacgccgcgctctggccgatgccgccggcgccgcccgccacagaggccaagaagcccggggaggccccgtctgccgggaagggcgggaagggcgcggagaaggtggacgccaagcccaaaaaggtggccgacgaggcagagtcggagggctcggagaagccagccaaggacgaaggttcagagaagaaaccagagaaagcagcggcgaagaaacccaaggacgaggccaaggaggagggagaggttcctgagaagaaggagaagggctcgccggagccgccagccaaagaagctgcggtcggcgacgaggccccggaagcgggcggagaggagacggggggcaagaaggggaagaagaagaagaacaagcagcagaaggaargccggcgacggggacgccgctacggagaagccgccgccgccgccgccgcagcagcagcagcagcagcagccaaagacgaagcagccacagccacagcaggcgatgccgcccgtgccagcgccggggacggggccagagcgcgcgcacggccacggcggcccgttcccgtactacgcgccgcaaccggtgatgagctacaacatggcgcagccgagcgcgagcgtgtcgtactacgcgcccacgccggtggcgtccatgcagccaatgccgcctccgccgccgtacggcgggtactcgccttacccgccgatgatgatgccgccgccgccgccggagtacatgtacggcccgccaggcatgcggtcgtccccgccgcaggaaccgtacaacagcatgttcaacgaggagaaccccagttcctgtagcgtcatgtgacgccgccgccgcgccgccgccggcacgggatcgagtctgtagttaaaagtgggggtggggtgggagaggaggcttcgtaatagaagctttgtctaggctgagtggagtacgtaccctcttaattaggtggtcaaagctcttattgaccacactttttttctcttcaaattttcgacttgattagcttgtcatgtagtgacatgagtattttatttcactaatatggttatttttgcc

SEQ ID NO: 14265 - protein, 339 aa, Triticum aestivum
  peptide (1)..(339): Ceres Seq. ID no. 15222354
  misc_feature (81)..(309): Pfam Name: Pfam Description:  MARCKS family
  misc_feature (8)..(196): NCBI GI NO: 18405728 NR Description: copper chaperone (CCH)-related
  misc_feature (8)..(196): NCBI GI NO: 21536659 NR Description: unknown [Arabidopsis thaliana]
  misc_feature (8)..(196): NCBI GI NO: 27754505 NR Description: putative copper chaperone (CCH) protein
  misc_feature (1)..(180): NCBI GI NO: 12083536 NR Description: hypothetical protein [Oryza sativa]
  misc_feature (1)..(178): NCBI GI NO: 33146848 NR Description: copper chaperone
  misc_feature (7)..(79): NCBI GI NO: 18397481 NR Description: heavy-metal-associated domain-containing protein
  misc_feature (9)..(215): NCBI GI NO: 15219992 NR Description: heavy-metal-associated domain-containing protein
  misc_feature (7)..(102): NCBI GI NO: 30687142 NR Description: heavy-metal-associated domain-containing protein
  misc_feature (7)..(102): NCBI GI NO: 15239643 NR Description: heavy-metal-associated domain-containing protein
  misc_feature (7)..(77): NCBI GI NO: 15241025 NR Description: heavy-metal-associated domain-containing protein
  misc_feature (199)..(199): Xaa is any aa, unknown or other
MASGEAEPLQYTTTVLRVSIHCEGCKKKVKKVLHSIEGVYKVTIDATQHKVTVTGSVAADALVRRLLKSGKHAALWPMPPAPPATEAKKPGEAPSAGKGGKGAEKVDAKPKKVADEAESEGSEKPAKDEGSEKKPEKAAAKKPKDEAKEEGEVPEKKEKGSPEPPAKEAAVGDEAPEAGGEETGGKKGKKKKNKQQKEXRRRGRRYGEAAAAAAAAAAAAAAKDEAATATAGDAARASAGDGARARARPRRPVPVLRAATGDELQHGAAERERVVLRAHAGGVHAANAASAAVRRVLALPADDDAAAAAGVHVRPARHAVVPAAGTVQQHVQRGEPQFL

SEQ ID NO: 14266 - protein, 262 aa, Triticum aestivum
  peptide (1)..(262): Ceres Seq. ID no. 15222355
  misc_feature (4)..(232): Pfam Name: Pfam Description:  MARCKS family
  misc_feature (1)..(119): NCBI GI NO: 18405728 NR Description: copper chaperone (CCH)-related
  misc_feature (1)..(119): NCBI GI NO: 21536659 NR Description: unknown [Arabidopsis thaliana]
  misc_feature (1)..(119): NCBI GI NO: 27754505 NR Description: putative copper chaperone (CCH) protein
  misc_feature (1)..(103): NCBI GI NO: 12083536 NR Description: hypothetical protein [Oryza sativa]
  misc_feature (1)..(101): NCBI GI NO: 33146848 NR Description: copper chaperone
  misc_feature (1)..(138): NCBI GI NO: 15219992 NR Description: heavy-metal-associated domain-containing protein
  misc_feature (1)..(25): NCBI GI NO: 30687142 NR Description: heavy-metal-associated domain-containing protein
  misc_feature (1)..(25): NCBI GI NO: 15239643 NR Description: heavy-metal-associated domain-containing protein
  misc_feature (1)..(100): NCBI GI NO: 30685162 NR Description: leucine-rich repeat extensin family
  misc_feature (1)..(100): NCBI GI NO: 30685162 NR Description: leucine-rich repeat extensin family
  misc_feature (122)..(122): Xaa is any aa, unknown or other
MPPAPPATEAKKPGEAPSAGKGGKGAEKVDAKPKKVADEAESEGSEKPAKDEGSEKKPEKAAAKKPKDEAKEEGEVPEKKEKGSPEPPAKEAAVGDEAPEAGGEETGGKKGKKKKNKQQKEXRRRGRRYGEAAAAAAAAAAAAAAKDEAATATAGDAARASAGDGARARARPRRPVPVLRAATGDELQHGAAERERVVLRAHAGGVHAANAASAAVRRVLALPADDDAAAAAGVHVRPARHAVVPAAGTVQQHVQRGEPQFL

SEQ ID NO: 14267 - DNA, 521 bp, Triticum aestivum
  misc_feature (1)..(521): Ceres Seq. ID no. 13597443
atccagtatcttggccagcccatcttgacacgagaaaggaccaaacgagcctctctccgccggcggtgagaaaggagaggatggagcggcggcgcaagcctcttccgcgccggccgacgtactgcgctccttttaggtcaggtcgtccaccagccaagaagaggaagagattgggctccgagggagagattgaaccttcggccggggcggcaggagtcgaccggatcagcgccctccccgacgaactcctcggcgagatcatctccctcctccccatcaaggacggcgcccgcacccagatcctcgcgtcccggtggcgccacctctggctctccgcccctctcaacctcgactgccgtggcttcgccaccgccgccgatctcgcggtcgtcagataccgcagggtctacaacaacgtcccctctgctgtagcgcacattcttgaccgccaccaaggccccggccgccgcctccgtgtcaaggggtaccgtctccccgtcgccgccgcagccgccgccgcc

SEQ ID NO: 14268 - protein, 173 aa, Triticum aestivum
  peptide (1)..(173): Ceres Seq. ID no. 13597444
  misc_feature (75)..(120): Pfam Name: Pfam Description:  F-box domain
  misc_feature (49)..(164): NCBI GI NO: 34897696 NR Description: putative ribosomal RNA apurinic site specific lyase
  misc_feature (49)..(164): NCBI GI NO: 34897676 NR Description: putative ribosomal RNA apurinic site specific lyase
  misc_feature (51)..(164): NCBI GI NO: 34897688 NR Description: putative ribosomal RNA apurinic site specific lyase
  misc_feature (59)..(155): NCBI GI NO: 20521319 NR Description: putative ribosomal RNA apurinic site specific lyase
  misc_feature (58)..(172): NCBI GI NO: 34912330 NR Description: putative ribosomal RNA apurinic site specific lyase
  misc_feature (66)..(164): NCBI GI NO: 34912334 NR Description: putative ribosomal RNA apurinic site specific lyase
  misc_feature (48)..(119): NCBI GI NO: 34900708 NR Description: similar to ribosomal RNA apurinic site specificlyase
  misc_feature (7)..(159): NCBI GI NO: 34897702 NR Description: putative ribosomal RNA apurinic site specific lyase
  misc_feature (18)..(159): NCBI GI NO: 34393661 NR Description: putative RNA apurinic site specific lyase
  misc_feature (68)..(153): NCBI GI NO: 34913044 NR Description: putative ribosomal RNA apurinic site specific lyase
PVSWPAHLDTRKDQTSLSPPAVRKERMERRRKPLPRRPTYCAPFRSGRPPAKKRKRLGSEGEIEPSAGAAGVDRISALPDELLGEIISLLPIKDGARTQILASRWRHLWLSAPLNLDCRGFATAADLAVVRYRRVYNNVPSAVAHILDRHQGPGRRLRVKGYRLPVAAAAAAA

SEQ ID NO: 14269 - protein, 147 aa, Triticum aestivum
  peptide (1)..(147): Ceres Seq. ID no. 13597445
  misc_feature (49)..(94): Pfam Name: Pfam Description:  F-box domain
  misc_feature (23)..(138): NCBI GI NO: 34897696 NR Description: putative ribosomal RNA apurinic site specific lyase
  misc_feature (23)..(138): NCBI GI NO: 34897676 NR Description: putative ribosomal RNA apurinic site specific lyase
  misc_feature (25)..(138): NCBI GI NO: 34897688 NR Description: putative ribosomal RNA apurinic site specific lyase
  misc_feature (33)..(129): NCBI GI NO: 20521319 NR Description: putative ribosomal RNA apurinic site specific lyase
  misc_feature (32)..(146): NCBI GI NO: 34912330 NR Description: putative ribosomal RNA apurinic site specific lyase
  misc_feature (40)..(138): NCBI GI NO: 34912334 NR Description: putative ribosomal RNA apurinic site specific lyase
  misc_feature (22)..(93): NCBI GI NO: 34900708 NR Description: similar to ribosomal RNA apurinic site specificlyase
  misc_feature (1)..(133): NCBI GI NO: 34897702 NR Description: putative ribosomal RNA apurinic site specific lyase
  misc_feature (1)..(133): NCBI GI NO: 34393661 NR Description: putative RNA apurinic site specific lyase
  misc_feature (42)..(127): NCBI GI NO: 34913044 NR Description: putative ribosomal RNA apurinic site specific lyase
MERRRKPLPRRPTYCAPFRSGRPPAKKRKRLGSEGEIEPSAGAAGVDRISALPDELLGEIISLLPIKDGARTQILASRWRHLWLSAPLNLDCRGFATAADLAVVRYRRVYNNVPSAVAHILDRHQGPGRRLRVKGYRLPVAAAAAAA

SEQ ID NO: 14270 - DNA, 1851 bp, Triticum aestivum
  misc_feature (1)..(1851): Ceres Seq. ID no. 13598512
aaaattaggatcgacagtaggagtaggatttagggggaaagtagagggggaccctgcagatcgaagaaagcacagccgccgccgatgagcgcaacggagaagagcacggagggggagggggagggggaggggtcccagcgcgtggaggcgttcctcgacatcctcggccgcgtcccgatgggggaggtggagggggcgctgacctcctgcggcgtcggcccgacggcggaggccgcggagcaggtgctcaagtccgaaacctgctactcccgccccaaatcggccgtccgcttcttccgctgggcgaaggcgtccgtgcagctcacccccttggcctggaacctcctcgtcgacatcctcggtaaggccgccatgttcgatcccatgtgggacgccgtcctctccatgagccaggagggcggcctcctctccgtcgccacattcgcctccatgttcgcctcctactgcgcgcgcggcaacttcaaggaagccgccakggccttcgacgtcatggagcgccacggcgtgacgccggacgccgttgccctcaactccctcctcgccgccatgtgccgccgggatggcggcgggcaggccgcgtgggagcttttcgaacgctacaagaccacggtcgcgcccgacgccgacaccttcgcgatactgctcgaggcgtgggagaaggaggggaacgtccagcgcgccaagagcaccttcggcgagatggtcgtccgcgtcgggtgggacgccagcaacatgcctgcctacgatgctttcctctccacgctcgtgcgaggggaccagttcaacgaggcactcaagttcctccaggtgatgcggaccaagggctgcctcccggggctcaagttctttgccaacgcgatcgaccttgtcgtccgcaagggagaccatgccaatgctattgctatctggcaaattatggtctcggatgcaggactggttcccaatctcccaatgtacaacgccgtaattggcctctgctctagtgtcggtaacaccgactacgccttccagatgctcgatgaaatgcccttaaatggggtctttgcagattctgatacatataattccatacttgaggggctcatcaagcagcgcaaggctcgtgagactgaaggtttcctcgcggagatgagcaagaacgagcagctgccctccgcctccaactgtgctgctgctatcagcttattttgtcaggagtttaacccatctgccgcagttgacgtttggcactgcatcgtggagcaccaaattactccggctgaggaatcagccaaagagttaatagctgggcttctcgactttagcaggttcgccgaggtgaagaaatataccgatcagatgcttgacatgggaattgagttgccccagtccaccattgaaaaaatgaagcgagcattttacaaggctgagaggcaccacacatatgaccaacttgcacgaaggttgaagcggcggtaacaacacattgatggtataattcattagaaacgagcgagaccgagaagctgtaggatgaggtttcatgctgccagagcaagctgcggtatgtattcaaagtggaaagtggatggaagtctttggtgcagcgggtacaggttctggatgttgttttgcgccactggttgtatggaagatgtttcctggaagtatagcattgtactgttgtacttggcatggaagagcagtttctgagatagctgtaatgctgtacttttgcgttaactggagtagcctgttgccttttaaaaaaaaaaaaaaaaaagcttatcgataccgtcgacctcgagggggggcccgkttaaacmcaataaagttggaactggagggggg

SEQ ID NO: 14271 - protein, 464 aa, Triticum aestivum
  peptide (1)..(464): Ceres Seq. ID no. 15222356
  misc_feature (35)..(461): NCBI GI NO: 14488357 NR Description: unknown protein
  misc_feature (26)..(450): NCBI GI NO: 15223926 NR Description: pentatricopeptide (PPR) repeat-containing protein
  misc_feature (15)..(463): NCBI GI NO: 15223927 NR Description: pentatricopeptide (PPR) repeat-containing protein
  misc_feature (1)..(462): NCBI GI NO: 15228767 NR Description: pentatricopeptide (PPR) repeat-containing protein
  misc_feature (1)..(464): NCBI GI NO: 15228788 NR Description: pentatricopeptide (PPR) repeat-containing protein
  misc_feature (1)..(464): NCBI GI NO: 15241508 NR Description: pentatricopeptide (PPR) repeat-containing protein
  misc_feature (29)..(463): NCBI GI NO: 15219049 NR Description: hypothetical protein [Arabidopsis thaliana]
  misc_feature (1)..(457): NCBI GI NO: 21686921 NR Description: putative reverse transcriptase
  misc_feature (5)..(441): NCBI GI NO: 15228825 NR Description: pentatricopeptide (PPR) repeat-containing protein
  misc_feature (34)..(434): NCBI GI NO: 15219461 NR Description: pentatricopeptide (PPR) repeat-containing protein
  misc_feature (138)..(138): Xaa is any aa, unknown or other
MSATEKSTEGEGEGEGSQRVEAFLDILGRVPMGEVEGALTSCGVGPTAEAAEQVLKSETCYSRPKSAVRFFRWAKASVQLTPLAWNLLVDILGKAAMFDPMWDAVLSMSQEGGLLSVATFASMFASYCARGNFKEAAXAFDVMERHGVTPDAVALNSLLAAMCRRDGGGQAAWELFERYKTTVAPDADTFAILLEAWEKEGNVQRAKSTFGEMVVRVGWDASNMPAYDAFLSTLVRGDQFNEALKFLQVMRTKGCLPGLKFFANAIDLVVRKGDHANAIAIWQIMVSDAGLVPNLPMYNAVIGLCSSVGNTDYAFQMLDEMPLNGVFADSDTYNSILEGLIKQRKARETEGFLAEMSKNEQLPSASNCAAAISLFCQEFNPSAAVDVWHCIVEHQITPAEESAKELIAGLLDFSRFAEVKKYTDQMLDMGIELPQSTIEKMKRAFYKAERHHTYDQLARRLKRR

SEQ ID NO: 14272 - protein, 433 aa, Triticum aestivum
  peptide (1)..(433): Ceres Seq. ID no. 15222357
  misc_feature (4)..(430): NCBI GI NO: 14488357 NR Description: unknown protein
  misc_feature (1)..(419): NCBI GI NO: 15223926 NR Description: pentatricopeptide (PPR) repeat-containing protein
  misc_feature (1)..(432): NCBI GI NO: 15223927 NR Description: pentatricopeptide (PPR) repeat-containing protein
  misc_feature (1)..(431): NCBI GI NO: 15228767 NR Description: pentatricopeptide (PPR) repeat-containing protein
  misc_feature (1)..(433): NCBI GI NO: 15228788 NR Description: pentatricopeptide (PPR) repeat-containing protein
  misc_feature (1)..(433): NCBI GI NO: 15241508 NR Description: pentatricopeptide (PPR) repeat-containing protein
  misc_feature (1)..(432): NCBI GI NO: 15219049 NR Description: hypothetical protein [Arabidopsis thaliana]
  misc_feature (1)..(426): NCBI GI NO: 21686921 NR Description: putative reverse transcriptase
  misc_feature (1)..(410): NCBI GI NO: 15228825 NR Description: pentatricopeptide (PPR) repeat-containing protein
  misc_feature (3)..(403): NCBI GI NO: 15219461 NR Description: pentatricopeptide (PPR) repeat-containing protein
  misc_feature (107)..(107): Xaa is any aa, unknown or other
MGEVEGALTSCGVGPTAEAAEQVLKSETCYSRPKSAVRFFRWAKASVQLTPLAWNLLVDILGKAAMFDPMWDAVLSMSQEGGLLSVATFASMFASYCARGNFKEAAXAFDVMERHGVTPDAVALNSLLAAMCRRDGGGQAAWELFERYKTTVAPDADTFAILLEAWEKEGNVQRAKSTFGEMVVRVGWDASNMPAYDAFLSTLVRGDQFNEALKFLQVMRTKGCLPGLKFFANAIDLVVRKGDHANAIAIWQIMVSDAGLVPNLPMYNAVIGLCSSVGNTDYAFQMLDEMPLNGVFADSDTYNSILEGLIKQRKARETEGFLAEMSKNEQLPSASNCAAAISLFCQEFNPSAAVDVWHCIVEHQITPAEESAKELIAGLLDFSRFAEVKKYTDQMLDMGIELPQSTIEKMKRAFYKAERHHTYDQLARRLKRR

SEQ ID NO: 14273 - protein, 368 aa, Triticum aestivum
  peptide (1)..(368): Ceres Seq. ID no. 15222358
  misc_feature (1)..(365): NCBI GI NO: 14488357 NR Description: unknown protein
  misc_feature (1)..(354): NCBI GI NO: 15223926 NR Description: pentatricopeptide (PPR) repeat-containing protein
  misc_feature (1)..(367): NCBI GI NO: 15223927 NR Description: pentatricopeptide (PPR) repeat-containing protein
  misc_feature (1)..(366): NCBI GI NO: 15228767 NR Description: pentatricopeptide (PPR) repeat-containing protein
  misc_feature (1)..(368): NCBI GI NO: 15228788 NR Description: pentatricopeptide (PPR) repeat-containing protein
  misc_feature (1)..(368): NCBI GI NO: 15241508 NR Description: pentatricopeptide (PPR) repeat-containing protein
  misc_feature (1)..(367): NCBI GI NO: 15219049 NR Description: hypothetical protein [Arabidopsis thaliana]
  misc_feature (1)..(361): NCBI GI NO: 21686921 NR Description: putative reverse transcriptase
  misc_feature (1)..(345): NCBI GI NO: 15228825 NR Description: pentatricopeptide (PPR) repeat-containing protein
  misc_feature (1)..(338): NCBI GI NO: 15219461 NR Description: pentatricopeptide (PPR) repeat-containing protein
  misc_feature (42)..(42): Xaa is any aa, unknown or other
MFDPMWDAVLSMSQEGGLLSVATFASMFASYCARGNFKEAAXAFDVMERHGVTPDAVALNSLLAAMCRRDGGGQAAWELFERYKTTVAPDADTFAILLEAWEKEGNVQRAKSTFGEMVVRVGWDASNMPAYDAFLSTLVRGDQFNEALKFLQVMRTKGCLPGLKFFANAIDLVVRKGDHANAIAIWQIMVSDAGLVPNLPMYNAVIGLCSSVGNTDYAFQMLDEMPLNGVFADSDTYNSILEGLIKQRKARETEGFLAEMSKNEQLPSASNCAAAISLFCQEFNPSAAVDVWHCIVEHQITPAEESAKELIAGLLDFSRFAEVKKYTDQMLDMGIELPQSTIEKMKRAFYKAERHHTYDQLARRLKRR

SEQ ID NO: 14274 - DNA, 1662 bp, Triticum aestivum
  misc_feature (1)..(1662): Ceres Seq. ID no. 13597446
aaacgaaaaaggtggcgagagggagagggagaggaaggtgccggccctagcaatggcggggtggtacgaggaggcggcgggtctgctgctgcgccggtcggcgttggcggagatggcggtagatgtgctgctgtgcgccgtgccgatctgggcggcggtcatgatctgcctcttcatagggtgggcatggcggccgcgctggaccgggctgatcttcctcggtttccgcagccgtctccggctcctctacgtgcctcccgggctcggcgcgcgccgcctatggctcgcctgcaccgcgctctccgccttctccgtcgcgccgcagctgctctcctccgccttccgccgccatgggaagtaccagcgcaaggattcctcgaacgacgacacggacgcctgcggggattctggcgcttgcgctaacggcaggtcaatttttgaggtcaagcatggtattgtcactgagaaggacctagatcacctcgtgcagcttttagataataaggagagtgggcatacaacatggcagcatttgatggagcgtaccacttccaacatgacgtacaaggcctggaggcatgagcccgaggtgggacctataatgcattgtagccagaccattttcgaggatgctactcctgaactggttagagatttcttctgggatgatgattttcgtctaaagtgggaccccatgcttgtgtgcttcaaaattttggatgagttccctctgaatggaaccacaattattcactggattaaaaagttccctttcttctgcagtgaccgtgaatacatttttgggcggcgtatctgggagtcggggaaggcttactattgtgttacgaagggaattccttatccatctttgcccaagaaggaaaaaccgaggcgtgtggaattgtacttctcgagttggcgtattagacctgttcaatcgcccaaaaaagatggccagcaacacatggcatgtgaagtaacactgtttcactacgaggatatgggcatacccaaggatgttgctaaagttggtgtccgccacggcatgtggggtgctgttaaaaagctgcagtccggctttagagcatatcagctaatgagaaaatcagaaaacatcctgtcacgcagtgccatcatggctcgggtgaccaccaagacatgcattgctggttctgatggctccttggatcaagggcccttcagcacagaacaagccagtacagaggacgacaactccagggcagtccaacatggtttcgactggaagtgggtggtggtcggtggcgcggtggctgccgtttgcgtgcttaacaccggaattgtagggaaggccctcttacttggagctgcaagaaggcaggcaaagaagtgatgagcatctaccagcatccacaaagtgagcttcacgaccatcagggcctgtctctgtctagaaagtcgcaatcgagaccgaggataaaggaatgaaatccataccatactacaggatgcagataattcgggtgcctaattttggattgtgccttttaagcagtatatcgcaaatgtgtcttgctataaccgattatgtggtatcaggaatcgttagatgacgatgtatctcaagatgtgagttctgttaacaacatttgctaacttccaagttccaagagtgcacttttc

SEQ ID NO: 14275 - protein, 456 aa, Triticum aestivum
  peptide (1)..(456): Ceres Seq. ID no. 13597447
  misc_feature (204)..(281): Pfam Name: Pfam Description:  START domain
  misc_feature (109)..(456): NCBI GI NO: 34393225 NR Description: putative membrane related protein CP5
  misc_feature (18)..(60): NCBI GI NO: 34393225 NR Description: putative membrane related protein CP5
  misc_feature (31)..(456): NCBI GI NO: 18414239 NR Description: expressed protein [Arabidopsis thaliana]
  misc_feature (32)..(456): NCBI GI NO: 18403635 NR Description: expressed protein [Arabidopsis thaliana]
  misc_feature (32)..(456): NCBI GI NO: 15810257 NR Description: unknown protein [Arabidopsis thaliana]
  misc_feature (147)..(454): NCBI GI NO: 38344869 NR Description: OSJNBa0020P07.12
  misc_feature (29)..(74): NCBI GI NO: 38344869 NR Description: OSJNBa0020P07.12
  misc_feature (31)..(394): NCBI GI NO: 7485064 NR Description: hypothetical protein - Arabidopsis thaliana
  misc_feature (149)..(455): NCBI GI NO: 22135902 NR Description: membrane related protein CP5, putative
  misc_feature (41)..(70): NCBI GI NO: 22135902 NR Description: membrane related protein CP5, putative
NEKGGERERERKVPALAMAGWYEEAAGLLLRRSALAEMAVDVLLCAVPIWAAVMICLFIGWAWRPRWTGLIFLGFRSRLRLLYVPPGLGARRLWLACTALSAFSVAPQLLSSAFRRHGKYQRKDSSNDDTDACGDSGACANGRSIFEVKHGIVTEKDLDHLVQLLDNKESGHTTWQHLMERTTSNMTYKAWRHEPEVGPIMHCSQTIFEDATPELVRDFFWDDDFRLKWDPMLVCFKILDEFPLNGTTIIHWIKKFPFFCSDREYIFGRRIWESGKAYYCVTKGIPYPSLPKKEKPRRVELYFSSWRIRPVQSPKKDGQQHMACEVTLFHYEDMGIPKDVAKVGVRHGMWGAVKKLQSGFRAYQLMRKSENILSRSAIMARVTTKTCIAGSDGSLDQGPFSTEQASTEDDNSRAVQHGFDWKWVVVGGAVAAVCVLNTGIVGKALLLGAARRQAKK

SEQ ID NO: 14276 - protein, 439 aa, Triticum aestivum
  peptide (1)..(439): Ceres Seq. ID no. 13597448
  misc_feature (187)..(264): Pfam Name: Pfam Description:  START domain
  misc_feature (92)..(439): NCBI GI NO: 34393225 NR Description: putative membrane related protein CP5
  misc_feature (1)..(43): NCBI GI NO: 34393225 NR Description: putative membrane related protein CP5
  misc_feature (14)..(439): NCBI GI NO: 18414239 NR Description: expressed protein [Arabidopsis thaliana]
  misc_feature (15)..(439): NCBI GI NO: 18403635 NR Description: expressed protein [Arabidopsis thaliana]
  misc_feature (15)..(439): NCBI GI NO: 15810257 NR Description: unknown protein [Arabidopsis thaliana]
  misc_feature (130)..(437): NCBI GI NO: 38344869 NR Description: OSJNBa0020P07.12
  misc_feature (12)..(57): NCBI GI NO: 38344869 NR Description: OSJNBa0020P07.12
  misc_feature (14)..(377): NCBI GI NO: 7485064 NR Description: hypothetical protein - Arabidopsis thaliana
  misc_feature (132)..(438): NCBI GI NO: 22135902 NR Description: membrane related protein CP5, putative
  misc_feature (24)..(53): NCBI GI NO: 22135902 NR Description: membrane related protein CP5, putative
MAGWYEEAAGLLLRRSALAEMAVDVLLCAVPIWAAVMICLFIGWAWRPRWTGLIFLGFRSRLRLLYVPPGLGARRLWLACTALSAFSVAPQLLSSAFRRHGKYQRKDSSNDDTDACGDSGACANGRSIFEVKHGIVTEKDLDHLVQLLDNKESGHTTWQHLMERTTSNMTYKAWRHEPEVGPIMHCSQTIFEDATPELVRDFFWDDDFRLKWDPMLVCFKILDEFPLNGTTIIHWIKKFPFFCSDREYIFGRRIWESGKAYYCVTKGIPYPSLPKKEKPRRVELYFSSWRIRPVQSPKKDGQQHMACEVTLFHYEDMGIPKDVAKVGVRHGMWGAVKKLQSGFRAYQLMRKSENILSRSAIMARVTTKTCIAGSDGSLDQGPFSTEQASTEDDNSRAVQHGFDWKWVVVGGAVAAVCVLNTGIVGKALLLGAARRQAKK

SEQ ID NO: 14277 - protein, 419 aa, Triticum aestivum
  peptide (1)..(419): Ceres Seq. ID no. 13597449
  misc_feature (167)..(244): Pfam Name: Pfam Description:  START domain
  misc_feature (72)..(419): NCBI GI NO: 34393225 NR Description: putative membrane related protein CP5
  misc_feature (1)..(23): NCBI GI NO: 34393225 NR Description: putative membrane related protein CP5
  misc_feature (1)..(419): NCBI GI NO: 18414239 NR Description: expressed protein [Arabidopsis thaliana]
  misc_feature (1)..(419): NCBI GI NO: 18403635 NR Description: expressed protein [Arabidopsis thaliana]
  misc_feature (1)..(419): NCBI GI NO: 15810257 NR Description: unknown protein [Arabidopsis thaliana]
  misc_feature (110)..(417): NCBI GI NO: 38344869 NR Description: OSJNBa0020P07.12
  misc_feature (1)..(37): NCBI GI NO: 38344869 NR Description: OSJNBa0020P07.12
  misc_feature (1)..(357): NCBI GI NO: 7485064 NR Description: hypothetical protein - Arabidopsis thaliana
  misc_feature (112)..(418): NCBI GI NO: 22135902 NR Description: membrane related protein CP5, putative
  misc_feature (4)..(33): NCBI GI NO: 22135902 NR Description: membrane related protein CP5, putative
MAVDVLLCAVPIWAAVMICLFIGWAWRPRWTGLIFLGFRSRLRLLYVPPGLGARRLWLACTALSAFSVAPQLLSSAFRRHGKYQRKDSSNDDTDACGDSGACANGRSIFEVKHGIVTEKDLDHLVQLLDNKESGHTTWQHLMERTTSNMTYKAWRHEPEVGPIMHCSQTIFEDATPELVRDFFWDDDFRLKWDPMLVCFKILDEFPLNGTTIIHWIKKFPFFCSDREYIFGRRIWESGKAYYCVTKGIPYPSLPKKEKPRRVELYFSSWRIRPVQSPKKDGQQHMACEVTLFHYEDMGIPKDVAKVGVRHGMWGAVKKLQSGFRAYQLMRKSENILSRSAIMARVTTKTCIAGSDGSLDQGPFSTEQASTEDDNSRAVQHGFDWKWVVVGGAVAAVCVLNTGIVGKALLLGAARRQAKK

SEQ ID NO: 14278 - DNA, 1412 bp, Triticum aestivum
  misc_feature (1)..(1412): Ceres Seq. ID no. 13598513
atgtacctaaccttgcaacaaagttcagttgaaaaccaccactagtctgtgcccatggcgaccttctccaacgaggagcttctgcaggcgcacaccgagctctgggacctcaccttcggctacctcaaatccatggcgctcgagtgcgccatcaagctcggcctcccaaacgccatccaccgccgcggcggcgacgccacgctgccggacttgctcgacgcagtttccgtcccggagagcaagaaggcgcacctgcctcgcctcatgaggtttctcggcgcgttcggcatcttcaccgccgacgcacccgctgcaggggagcgcgcgaatggggaggaggcgggcgccgtctacggcctcacgccggtgtcccgcctcctcgtggacgactccggcgccaacgggtcgtgcgggagcctctcgccgttcgtgctctcccagacgaccaagtaccacgtgaaggcggccatgcacctgccggagtggttcacgagcgacgacggcgcggccgcggcggagatgccgttccggacggcgcacggcgcagacctgtggggcgtcatggaccgcgaccccaagatgaaccaggtcttcaacgccggcatggggtccgacacccagctcgcgatggacttcgtcatcggcaactacggcgacgtgttcgacggggtgacctcgctggtcgacgtcggcggcgggacaggctccgcggcgagggccatagccaaggccttcccgcacgtcaagtgctccgtgctcgacctccccaacgtggtcaattccgtcccgcccgacggcgtggtcgagtacatctcaggcgacatgatgagctccattccggcgaccgatgcggtcttcctcaagtacatcatgcatgactggaacgacgaggactgcgtgaagatcctgaagcagtgcaagaaggcgatccccgaatcaggcgggaaagtgataatcgtggacatagtggtgggatctcctttgaaagccatgctggaagcccaggtctcgtttgatctgctgatgatggtgatcacgggaggcaaggagcgcgacgagcatgagtggcgcaagattttcatggacgcggggttcagccatcacaagacaagacctgttttgggatttatggccatcaccgagctgtatgcttagccctgcatgcctgattgcagcagatatctgctgtaacgtgtgtgtaagcgttggtcctgcgatgttcgtcgtggttgtgcagccccaaagtgtctttctgcagcaacgatttgttcctacgcctttaaaggctcccatatttgtatgatctgttgctagggtatatgcacttaataaactagatgacaccccgcccgttgctgcgggaattgtagcaattaaaaaattggaaattggacaaatgaaaagataattcg

SEQ ID NO: 14279 - protein, 366 aa, Triticum aestivum
  peptide (1)..(366): Ceres Seq. ID no. 13598514
  misc_feature (99)..(342): Pfam Name: Pfam Description:  O-methyltransferase
  misc_feature (1)..(365): NCBI GI NO: 38175602 NR Description: putative catechol O-methyltransferase
  misc_feature (1)..(364): NCBI GI NO: 2130032 NR Description: catechol O-methyltransferase (EC 2.1.1.6) - barley
  misc_feature (1)..(364): NCBI GI NO: 453244 NR Description: flavonoid 7-O-methyltransferase
  misc_feature (6)..(365): NCBI GI NO: 22093735 NR Description: putative o-methyltransferase
  misc_feature (7)..(365): NCBI GI NO: 34909608 NR Description: putative o-methyltransferase
  misc_feature (5)..(365): NCBI GI NO: 37530600 NR Description: putative o-methyltransferase ZRP4
  misc_feature (5)..(365): NCBI GI NO: 37530606 NR Description: putative o-methyltransferase ZRP4
  misc_feature (5)..(365): NCBI GI NO: 1353193 NR Description: O-METHYLTRANSFERASE ZRP4 (OMT)
  misc_feature (11)..(365): NCBI GI NO: 27777630 NR Description: O-methyltransferase [Secale cereale]
  misc_feature (94)..(365): NCBI GI NO: 26891694 NR Description: O-methyltransferase [Catharanthus roseus]
MATFSNEELLQAHTELWDLTFGYLKSMALECAIKLGLPNAIHRRGGDATLPDLLDAVSVPESKKAHLPRLMRFLGAFGIFTADAPAAGERANGEEAGAVYGLTPVSRLLVDDSGANGSCGSLSPFVLSQTTKYHVKAAMHLPEWFTSDDGAAAAEMPFRTAHGADLWGVMDRDPKMNQVFNAGMGSDTQLAMDFVIGNYGDVFDGVTSLVDVGGGTGSAARAIAKAFPHVKCSVLDLPNVVNSVPPDGVVEYISGDMMSSIPATDAVFLKYIMHDWNDEDCVKILKQCKKAIPESGGKVIIVDIVVGSPLKAMLEAQVSFDLLMMVITGGKERDEHEWRKIFMDAGFSHHKTRPVLGFMAITELYA

SEQ ID NO: 14280 - protein, 340 aa, Triticum aestivum
  peptide (1)..(340): Ceres Seq. ID no. 13598515
  misc_feature (73)..(316): Pfam Name: Pfam Description:  O-methyltransferase
  misc_feature (1)..(339): NCBI GI NO: 38175602 NR Description: putative catechol O-methyltransferase
  misc_feature (1)..(338): NCBI GI NO: 2130032 NR Description: catechol O-methyltransferase (EC 2.1.1.6) - barley
  misc_feature (1)..(338): NCBI GI NO: 453244 NR Description: flavonoid 7-O-methyltransferase
  misc_feature (1)..(339): NCBI GI NO: 22093735 NR Description: putative o-methyltransferase
  misc_feature (1)..(339): NCBI GI NO: 34909608 NR Description: putative o-methyltransferase
  misc_feature (1)..(339): NCBI GI NO: 37530600 NR Description: putative o-methyltransferase ZRP4
  misc_feature (1)..(339): NCBI GI NO: 37530606 NR Description: putative o-methyltransferase ZRP4
  misc_feature (1)..(339): NCBI GI NO: 1353193 NR Description: O-METHYLTRANSFERASE ZRP4 (OMT)
  misc_feature (1)..(339): NCBI GI NO: 27777630 NR Description: O-methyltransferase [Secale cereale]
  misc_feature (68)..(339): NCBI GI NO: 26891694 NR Description: O-methyltransferase [Catharanthus roseus]
MALECAIKLGLPNAIHRRGGDATLPDLLDAVSVPESKKAHLPRLMRFLGAFGIFTADAPAAGERANGEEAGAVYGLTPVSRLLVDDSGANGSCGSLSPFVLSQTTKYHVKAAMHLPEWFTSDDGAAAAEMPFRTAHGADLWGVMDRDPKMNQVFNAGMGSDTQLAMDFVIGNYGDVFDGVTSLVDVGGGTGSAARAIAKAFPHVKCSVLDLPNVVNSVPPDGVVEYISGDMMSSIPATDAVFLKYIMHDWNDEDCVKILKQCKKAIPESGGKVIIVDIVVGSPLKAMLEAQVSFDLLMMVITGGKERDEHEWRKIFMDAGFSHHKTRPVLGFMAITELYA

SEQ ID NO: 14281 - protein, 296 aa, Triticum aestivum
  peptide (1)..(296): Ceres Seq. ID no. 13598516
  misc_feature (29)..(272): Pfam Name: Pfam Description:  O-methyltransferase
  misc_feature (1)..(295): NCBI GI NO: 38175602 NR Description: putative catechol O-methyltransferase
  misc_feature (1)..(294): NCBI GI NO: 2130032 NR Description: catechol O-methyltransferase (EC 2.1.1.6) - barley
  misc_feature (1)..(294): NCBI GI NO: 453244 NR Description: flavonoid 7-O-methyltransferase
  misc_feature (1)..(295): NCBI GI NO: 22093735 NR Description: putative o-methyltransferase
  misc_feature (1)..(295): NCBI GI NO: 34909608 NR Description: putative o-methyltransferase
  misc_feature (1)..(295): NCBI GI NO: 37530600 NR Description: putative o-methyltransferase ZRP4
  misc_feature (1)..(295): NCBI GI NO: 37530606 NR Description: putative o-methyltransferase ZRP4
  misc_feature (1)..(295): NCBI GI NO: 1353193 NR Description: O-METHYLTRANSFERASE ZRP4 (OMT)
  misc_feature (1)..(295): NCBI GI NO: 27777630 NR Description: O-methyltransferase [Secale cereale]
  misc_feature (24)..(295): NCBI GI NO: 26891694 NR Description: O-methyltransferase [Catharanthus roseus]
MRFLGAFGIFTADAPAAGERANGEEAGAVYGLTPVSRLLVDDSGANGSCGSLSPFVLSQTTKYHVKAAMHLPEWFTSDDGAAAAEMPFRTAHGADLWGVMDRDPKMNQVFNAGMGSDTQLAMDFVIGNYGDVFDGVTSLVDVGGGTGSAARAIAKAFPHVKCSVLDLPNVVNSVPPDGVVEYISGDMMSSIPATDAVFLKYIMHDWNDEDCVKILKQCKKAIPESGGKVIIVDIVVGSPLKAMLEAQVSFDLLMMVITGGKERDEHEWRKIFMDAGFSHHKTRPVLGFMAITELYA

SEQ ID NO: 14282 - DNA, 1594 bp, Triticum aestivum
  misc_feature (1)..(1594): Ceres Seq. ID no. 13597407
accaagacgacgcgagcgccatggcgcacgatggagcttcccatggagcgaccaccgccccgctgctcgcgtcgacggagaagccaccgcggaacatgtacgccttcggctgcgccacgctggcctccatgaccacgatcctcatgggttacaatctcgcgctgatgagcggcgcgcagctcttcatccgggaggacctggggcttaccgacgagcaggtggaggtactggctgggtccatgaacgtgtacatgctcgtgtccatcctcgccgccggctgggcggccgacctcctgggccgccgcggcacgctcgtgctcgccaacggcttcctcatggccggcgcgctcgccatgtcgcttggcggcagctacgcggcgctcatggccgcgcgcttcatcaccagcatcggcgttggcttctccctcgtcgtcgcgccggtctacaacgccgagatctcgccggcctccgcgcgtggcgtgctttcctcgttactcgatatatttgtcaacgtcggcatcctgctcagttacgtgtcgaactacgccttggctggcctgccggtgcacctcagttggcgcgtcatgtacgccatcggcgtgctcccaccggtgctcctcgccgccggggtgctcgccatgccggagtccccgcggtggctcgccatgcgcgggcgcgaggacgacgcgcgcgcagtgctcgtgcgcacctccgataccgccgccgaggccgagctccggtttgaggagatcaagcgggtcgtcgaggcgccgcgagaagccgatagcggcgtgtggcgggagctgatctttcgaccgtcagcgatggtccggcggatccttgtcttcgtggtcgggctcaacttcctccagcaagcgttgggcgtcgacgccatcctgctgtacagcccgctcatgttcaagaaggcaggcatgtcgtcgaatagcgccatcttgggcgccaccgtggccatcggtgtcgtcaagacgtgcttcatactcgtggtctcgctcttttccgaccgcttcggccggcggccgctcctgctggccagcgccggcggcgtggccgcctcgctgaccggcctggctctcacactctgcatcggcgagacgtcgccagcgagcacggctgcctgcgtggcgttcacgctggccacggtcgcggcgttttcggtcgggtgggggtcgctcccgtccacgtacacggcagagatcacgccgctgcggctgcgtgcgcagggctcgagcctgggcatggcggtgaaccggctgacttgcggggtggtaagcatgtcgttcatatcgctagcgggctggatcaccatgcccgggtgcttctttctgtacgccagtatggcggccacggcgtacgtgttcgtcttcctgcgcctgccagagacgaagggccggaccctagaggagatggacgtgctcttttccaaatgattatgtcatctgtaggttttcggccacagttcaatgcacgctgttgcggcccgcagcacgtttggtagaaacctttgaaaaaaaaatgtgtgaactcttttgtgattgcatcatcgatagggatcaataaaaggcttctactcctc

SEQ ID NO: 14283 - protein, 481 aa, Triticum aestivum
  peptide (1)..(481): Ceres Seq. ID no. 13597408
  misc_feature (37)..(479): Pfam Name: and other Pfam Description: Sugar
  misc_feature (8)..(481): NCBI GI NO: 28316433 NR Description: sorbitol transporter [Prunus cerasus]
  misc_feature (27)..(481): NCBI GI NO: 30025133 NR Description: putative sorbitol transporter [Prunus cerasus]
  misc_feature (43)..(481): NCBI GI NO: 29691878 NR Description: sorbitol transporter [Malus x domestica]
  misc_feature (26)..(479): NCBI GI NO: 33636088 NR Description: sorbitol-like transporter [Glycine max]
  misc_feature (27)..(479): NCBI GI NO: 12004316 NR Description: mannitol transporter [Apium graveolens var. dulce]
  misc_feature (30)..(481): NCBI GI NO: 13129489 NR Description: Putative sugar transporter [Oryza sativa]
  misc_feature (30)..(481): NCBI GI NO: 37533402 NR Description: putative mannitol transporter protein
  misc_feature (24)..(479): NCBI GI NO: 15224183 NR Description: mannitol transporter, putative
  misc_feature (24)..(481): NCBI GI NO: 15234491 NR Description: mannitol transporter, putative
  misc_feature (27)..(421): NCBI GI NO: 15230212 NR Description: mannitol transporter, putative
QDDASAMAHDGASHGATTAPLLASTEKPPRNMYAFGCATLASMTTILMGYNLALMSGAQLFIREDLGLTDEQVEVLAGSMNVYMLVSILAAGWAADLLGRRGTLVLANGFLMAGALAMSLGGSYAALMAARFITSIGVGFSLVVAPVYNAEISPASARGVLSSLLDIFVNVGILLSYVSNYALAGLPVHLSWRVMYAIGVLPPVLLAAGVLAMPESPRWLAMRGREDDARAVLVRTSDTAAEAELRFEEIKRVVEAPREADSGVWRELIFRPSAMVRRILVFVVGLNFLQQALGVDAILLYSPLMFKKAGMSSNSAILGATVAIGVVKTCFILVVSLFSDRFGRRPLLLASAGGVAASLTGLALTLCIGETSPASTAACVAFTLATVAAFSVGWGSLPSTYTAEITPLRLRAQGSSLGMAVNRLTCGVVSMSFISLAGWITMPGCFFLYASMAATAYVFVFLRLPETKGRTLEEMDVLFSK

SEQ ID NO: 14284 - protein, 475 aa, Triticum aestivum
  peptide (1)..(475): Ceres Seq. ID no. 13597409
  misc_feature (31)..(473): Pfam Name: and other Pfam Description: Sugar
  misc_feature (2)..(475): NCBI GI NO: 28316433 NR Description: sorbitol transporter [Prunus cerasus]
  misc_feature (21)..(475): NCBI GI NO: 30025133 NR Description: putative sorbitol transporter [Prunus cerasus]
  misc_feature (37)..(475): NCBI GI NO: 29691878 NR Description: sorbitol transporter [Malus x domestica]
  misc_feature (20)..(473): NCBI GI NO: 33636088 NR Description: sorbitol-like transporter [Glycine max]
  misc_feature (21)..(473): NCBI GI NO: 12004316 NR Description: mannitol transporter [Apium graveolens var. dulce]
  misc_feature (24)..(475): NCBI GI NO: 13129489 NR Description: Putative sugar transporter [Oryza sativa]
  misc_feature (24)..(475): NCBI GI NO: 37533402 NR Description: putative mannitol transporter protein
  misc_feature (18)..(473): NCBI GI NO: 15224183 NR Description: mannitol transporter, putative
  misc_feature (18)..(475): NCBI GI NO: 15234491 NR Description: mannitol transporter, putative
  misc_feature (21)..(415): NCBI GI NO: 15230212 NR Description: mannitol transporter, putative
MAHDGASHGATTAPLLASTEKPPRNMYAFGCATLASMTTILMGYNLALMSGAQLFIREDLGLTDEQVEVLAGSMNVYMLVSILAAGWAADLLGRRGTLVLANGFLMAGALAMSLGGSYAALMAARFITSIGVGFSLVVAPVYNAEISPASARGVLSSLLDIFVNVGILLSYVSNYALAGLPVHLSWRVMYAIGVLPPVLLAAGVLAMPESPRWLAMRGREDDARAVLVRTSDTAAEAELRFEEIKRVVEAPREADSGVWRELIFRPSAMVRRILVFVVGLNFLQQALGVDAILLYSPLMFKKAGMSSNSAILGATVAIGVVKTCFILVVSLFSDRFGRRPLLLASAGGVAASLTGLALTLCIGETSPASTAACVAFTLATVAAFSVGWGSLPSTYTAEITPLRLRAQGSSLGMAVNRLTCGVVSMSFISLAGWITMPGCFFLYASMAATAYVFVFLRLPETKGRTLEEMDVLFSK

SEQ ID NO: 14285 - protein, 450 aa, Triticum aestivum
  peptide (1)..(450): Ceres Seq. ID no. 13597410
  misc_feature (6)..(448): Pfam Name: and other Pfam Description: Sugar
  misc_feature (1)..(450): NCBI GI NO: 28316433 NR Description: sorbitol transporter [Prunus cerasus]
  misc_feature (1)..(450): NCBI GI NO: 30025133 NR Description: putative sorbitol transporter [Prunus cerasus]
  misc_feature (12)..(450): NCBI GI NO: 29691878 NR Description: sorbitol transporter [Malus x domestica]
  misc_feature (1)..(448): NCBI GI NO: 33636088 NR Description: sorbitol-like transporter [Glycine max]
  misc_feature (1)..(448): NCBI GI NO: 12004316 NR Description: mannitol transporter [Apium graveolens var. dulce]
  misc_feature (1)..(450): NCBI GI NO: 13129489 NR Description: Putative sugar transporter [Oryza sativa]
  misc_feature (1)..(450): NCBI GI NO: 37533402 NR Description: putative mannitol transporter protein
  misc_feature (1)..(448): NCBI GI NO: 15224183 NR Description: mannitol transporter, putative
  misc_feature (1)..(450): NCBI GI NO: 15234491 NR Description: mannitol transporter, putative
  misc_feature (1)..(390): NCBI GI NO: 15230212 NR Description: mannitol transporter, putative
MYAFGCATLASMTTILMGYNLALMSGAQLFIREDLGLTDEQVEVLAGSMNVYMLVSILAAGWAADLLGRRGTLVLANGFLMAGALAMSLGGSYAALMAARFITSIGVGFSLVVAPVYNAEISPASARGVLSSLLDIFVNVGILLSYVSNYALAGLPVHLSWRVMYAIGVLPPVLLAAGVLAMPESPRWLAMRGREDDARAVLVRTSDTAAEAELRFEEIKRVVEAPREADSGVWRELIFRPSAMVRRILVFVVGLNFLQQALGVDAILLYSPLMFKKAGMSSNSAILGATVAIGVVKTCFILVVSLFSDRFGRRPLLLASAGGVAASLTGLALTLCIGETSPASTAACVAFTLATVAAFSVGWGSLPSTYTAEITPLRLRAQGSSLGMAVNRLTCGVVSMSFISLAGWITMPGCFFLYASMAATAYVFVFLRLPETKGRTLEEMDVLFSK

SEQ ID NO: 14286 - DNA, 1115 bp, Triticum aestivum
  misc_feature (1)..(1115): Ceres Seq. ID no. 13584234
agggtaaagcggcctggcgatggccacagcgcgactactgctccgaagcgcctccctgctccccctccgccgctcgcccctgcactcatccggcttccagccccgagccgccatggcctccgatgccgccagccagttccagaagatccagatccagcgcgaggacacgacctttgatgtctatgttgttggcaaagaaaatgctcctggagtcgtagtgttgcaagagtggtggggtgttgactatgaggtcaagaatcatgccatccatatttcccaaatcggcgatggatacagagcacttattccagatttgtaccgtgggaaggttgctttggaggtagctgaggcacaacatctgatggaaggactagactggcagggtgcaatcaaggatattcaggcttcagttaaatggctgaaggaaaatggatcgcccaaggttggtgttactggttattgcatgggaggtgctttggcggtcgcaagtggagttttggtcccagaggttgatgctgttgttgctttctacgggacgccatcttcggagcttgctgatgcttccaaggctcaggctccaatccaggctcattttggggagcttgacagttttgttgggtttgcggatgttaccgcggccaagtcattggaggagaagctcaaggcttctggagtggcacatgaagtccacatatactctggatgctcccatgccttcatgaacgcatcgcctgaggccctcaagaggaggaagggcatgggtttgactgatgagaatcagggggccattgacctggcatggtcccgcttctccacttggatgggtcgtttcctggggtctgcatgagccattaccatatccatatggtctctgaatgatgtatatggagtctgtcggctcagaagaataaaatgtttgggtgcaatatgtagccagtgcccaatctagacaagcagtgtgttttgtgttagtactactatatgttccaactcgtcatggttttgccagaacatctcggggtacttgattggaggggaaatgaaacacttacgacgctgtcatacgagtttgttttgtgttttaataggcttcagccgagtgctttctggatttt

SEQ ID NO: 14287 - protein, 275 aa, Triticum aestivum
  peptide (1)..(275): Ceres Seq. ID no. 13584235
  misc_feature (52)..(272): Pfam Name: Pfam Description:  Dienelactone hydrolase family
  misc_feature (1)..(275): NCBI GI NO: 34913460 NR Description: putative carboxymethylenebutenolidase
  misc_feature (36)..(272): NCBI GI NO: 15225693 NR Description: carboxymethylenebutenolidase -related
  misc_feature (36)..(272): NCBI GI NO: 21554208 NR Description: putative carboxymethylenebutenolidase
  misc_feature (60)..(272): NCBI GI NO: 22988407 NR Description: hypothetical protein [Burkholderia fungorum]
  misc_feature (37)..(272): NCBI GI NO: 17549527 NR Description: PUTATIVE TRANSMEMBRANE PROTEIN
  misc_feature (61)..(273): NCBI GI NO: 27377598 NR Description: blr2487 [Bradyrhizobium japonicum]
  misc_feature (62)..(272): NCBI GI NO: 22963172 NR Description: hypothetical protein [Rhodopseudomonas palustris]
  misc_feature (63)..(272): NCBI GI NO: 28869992 NR Description: dienelactone hydrolase family protein
  misc_feature (63)..(272): NCBI GI NO: 23472687 NR Description: hypothetical protein
  misc_feature (63)..(272): NCBI GI NO: 23105000 NR Description: hypothetical protein [Azotobacter vinelandii]
MATARLLLRSASLLPLRRSPLHSSGFQPRAAMASDAASQFQKIQIQREDTTFDVYVVGKENAPGVVVLQEWWGVDYEVKNHAIHISQIGDGYRALIPDLYRGKVALEVAEAQHLMEGLDWQGAIKDIQASVKWLKENGSPKVGVTGYCMGGALAVASGVLVPEVDAVVAFYGTPSSELADASKAQAPIQAHFGELDSFVGFADVTAAKSLEEKLKASGVAHEVHIYSGCSHAFMNASPEALKRRKGMGLTDENQGAIDLAWSRFSTWMGRFLGSA

SEQ ID NO: 14288 - protein, 244 aa, Triticum aestivum
  peptide (1)..(244): Ceres Seq. ID no. 13584236
  misc_feature (21)..(241): Pfam Name: Pfam Description:  Dienelactone hydrolase family
  misc_feature (1)..(244): NCBI GI NO: 34913460 NR Description: putative carboxymethylenebutenolidase
  misc_feature (5)..(241): NCBI GI NO: 15225693 NR Description: carboxymethylenebutenolidase -related
  misc_feature (5)..(241): NCBI GI NO: 21554208 NR Description: putative carboxymethylenebutenolidase
  misc_feature (29)..(241): NCBI GI NO: 22988407 NR Description: hypothetical protein [Burkholderia fungorum]
  misc_feature (6)..(241): NCBI GI NO: 17549527 NR Description: PUTATIVE TRANSMEMBRANE PROTEIN
  misc_feature (30)..(242): NCBI GI NO: 27377598 NR Description: blr2487 [Bradyrhizobium japonicum]
  misc_feature (31)..(241): NCBI GI NO: 22963172 NR Description: hypothetical protein [Rhodopseudomonas palustris]
  misc_feature (32)..(241): NCBI GI NO: 28869992 NR Description: dienelactone hydrolase family protein
  misc_feature (32)..(241): NCBI GI NO: 23472687 NR Description: hypothetical protein
  misc_feature (32)..(241): NCBI GI NO: 23105000 NR Description: hypothetical protein [Azotobacter vinelandii]
MASDAASQFQKIQIQREDTTFDVYVVGKENAPGVVVLQEWWGVDYEVKNHAIHISQIGDGYRALIPDLYRGKVALEVAEAQHLMEGLDWQGAIKDIQASVKWLKENGSPKVGVTGYCMGGALAVASGVLVPEVDAVVAFYGTPSSELADASKAQAPIQAHFGELDSFVGFADVTAAKSLEEKLKASGVAHEVHIYSGCSHAFMNASPEALKRRKGMGLTDENQGAIDLAWSRFSTWMGRFLGSA

SEQ ID NO: 14289 - protein, 161 aa, Triticum aestivum
  peptide (1)..(161): Ceres Seq. ID no. 13584237
  misc_feature (1)..(158): Pfam Name: Pfam Description:  Dienelactone hydrolase family
  misc_feature (1)..(161): NCBI GI NO: 34913460 NR Description: putative carboxymethylenebutenolidase
  misc_feature (1)..(158): NCBI GI NO: 15225693 NR Description: carboxymethylenebutenolidase -related
  misc_feature (1)..(158): NCBI GI NO: 21554208 NR Description: putative carboxymethylenebutenolidase
  misc_feature (1)..(158): NCBI GI NO: 22988407 NR Description: hypothetical protein [Burkholderia fungorum]
  misc_feature (1)..(158): NCBI GI NO: 17549527 NR Description: PUTATIVE TRANSMEMBRANE PROTEIN
  misc_feature (1)..(159): NCBI GI NO: 27377598 NR Description: blr2487 [Bradyrhizobium japonicum]
  misc_feature (1)..(158): NCBI GI NO: 22963172 NR Description: hypothetical protein [Rhodopseudomonas palustris]
  misc_feature (1)..(158): NCBI GI NO: 28869992 NR Description: dienelactone hydrolase family protein
  misc_feature (1)..(158): NCBI GI NO: 23472687 NR Description: hypothetical protein
  misc_feature (1)..(158): NCBI GI NO: 23105000 NR Description: hypothetical protein [Azotobacter vinelandii]
MEGLDWQGAIKDIQASVKWLKENGSPKVGVTGYCMGGALAVASGVLVPEVDAVVAFYGTPSSELADASKAQAPIQAHFGELDSFVGFADVTAAKSLEEKLKASGVAHEVHIYSGCSHAFMNASPEALKRRKGMGLTDENQGAIDLAWSRFSTWMGRFLGSA

SEQ ID NO: 14290 - DNA, 1083 bp, Triticum aestivum
  misc_feature (1)..(1083): Ceres Seq. ID no. 12617391
acacactagagaaactcaccagctccacgggcagaggagccgacacccaacccagcccaacgcaggcacgccaagaccaggagagagacaacatgcgtccatcacgggatcttcgcctcgccgtgcttctcctcttctccgcagccgtcctcctctcggcagtcccggcggccagagcccagcaggaaaccgaggaggaggaggagttcagctactcgctggacgcggagaatgggccggcgcactggggcgacatcaaggaggagtggtccgcgtgcggcaagggcaacatgcagtcgcccatcgaccttgccagcccgcgtgtctccctcgtgcgcggcctcggctacctcaaccactcctactcccccgccaacgccaccatcatcaaccgcggccacgacatcatgctcaagttcgagggcgacgccgggagcgtctccatcggcggtacgccctacttcctccggcagctgcactggcactcgcccactgagcatagcgtcaacggccgtcggtacgacatggagctccacatgttccacgagagcgctcagggcaaagcagccgtcatcggcgtcttctacgagatcggcgcccacgacgccttcctacacaagctggagccatacctggagatgatagcggatcgcaaggacagggaggagaagatgggcatgatggatcccaggggcgccagaggcaaggccagcgtctactaccgctacgtgggctccctcaccaccccaccctgctcagaaggggtcatctggaccatcatcaagagggtccgcactgtgtcgaggcaccagctggagcttctacgggaggccgttcacgacgacatggagaagaacgcgaggccccgtcaggaggtgaacagcagagatatcagcatgtcccggccttttgaccaaaatagacattcatcattagctagggtcgattctctacttaattagtttgttgttacagttattgtatatgcacatggttataccattttttgtagttttttcttcccatattagatgccttgtatccagtcattgaataataaaggaccacgtccagtatatttcc

SEQ ID NO: 14291 - protein, 319 aa, Triticum aestivum
  peptide (1)..(319): Ceres Seq. ID no. 12617392
  misc_feature (78)..(299): Pfam Name: Pfam Description:  Eukaryotic-type carbonic anhydrase
  misc_feature (44)..(302): NCBI GI NO: 15223122 NR Description: storage protein, putative; protein id: At1g08080.1
  misc_feature (38)..(302): NCBI GI NO: 37806288 NR Description: putative dioscorin
  misc_feature (41)..(302): NCBI GI NO: 34904986 NR Description: putative carbonic anhydrase precursor
  misc_feature (64)..(302): NCBI GI NO: 25291473 NR Description: probable carbonic anhydrase
  misc_feature (44)..(302): NCBI GI NO: 25407021 NR Description: protein T6D22.16 [imported] - Arabidopsis thaliana
  misc_feature (60)..(302): NCBI GI NO: 15223097 NR Description: carbonic anhydrase, putative; protein id:At1g08065
  misc_feature (37)..(298): NCBI GI NO: 29468280 NR Description: nectarin III
  misc_feature (49)..(297): NCBI GI NO: 15233471 NR Description: carbonic anhydrase -like protein
  misc_feature (64)..(265): NCBI GI NO: 30683808 NR Description: carbonic anhydrase -related [Arabidopsis thaliana]
  misc_feature (43)..(297): NCBI GI NO: 1364059 NR Description: dioscorin class A precursor - Dioscorea cayenensis
TLEKLTSSTGRGADTQPSPTQARQDQERDNMRPSRDLRLAVLLLFSAAVLLSAVPAARAQQETEEEEEFSYSLDAENGPAHWGDIKEEWSACGKGNMQSPIDLASPRVSLVRGLGYLNHSYSPANATIINRGHDIMLKFEGDAGSVSIGGTPYFLRQLHWHSPTEHSVNGRRYDMELHMFHESAQGKAAVIGVFYEIGAHDAFLHKLEPYLEMIADRKDREEKMGMMDPRGARGKASVYYRYVGSLTTPPCSEGVIWTIIKRVRTVSRHQLELLREAVHDDMEKNARPRQEVNSRDISMSRPFDQNRHSSLARVDSLLN

SEQ ID NO: 14292 - protein, 289 aa, Triticum aestivum
  peptide (1)..(289): Ceres Seq. ID no. 12617393
  misc_feature (48)..(269): Pfam Name: Pfam Description:  Eukaryotic-type carbonic anhydrase
  misc_feature (14)..(272): NCBI GI NO: 15223122 NR Description: storage protein, putative; protein id: At1g08080.1
  misc_feature (8)..(272): NCBI GI NO: 37806288 NR Description: putative dioscorin
  misc_feature (11)..(272): NCBI GI NO: 34904986 NR Description: putative carbonic anhydrase precursor
  misc_feature (34)..(272): NCBI GI NO: 25291473 NR Description: probable carbonic anhydrase
  misc_feature (14)..(272): NCBI GI NO: 25407021 NR Description: protein T6D22.16 [imported] - Arabidopsis thaliana
  misc_feature (30)..(272): NCBI GI NO: 15223097 NR Description: carbonic anhydrase, putative; protein id:At1g08065
  misc_feature (7)..(268): NCBI GI NO: 29468280 NR Description: nectarin III
  misc_feature (19)..(267): NCBI GI NO: 15233471 NR Description: carbonic anhydrase -like protein
  misc_feature (34)..(235): NCBI GI NO: 30683808 NR Description: carbonic anhydrase -related [Arabidopsis thaliana]
  misc_feature (13)..(267): NCBI GI NO: 1364059 NR Description: dioscorin class A precursor - Dioscorea cayenensis
MRPSRDLRLAVLLLFSAAVLLSAVPAARAQQETEEEEEFSYSLDAENGPAHWGDIKEEWSACGKGNMQSPIDLASPRVSLVRGLGYLNHSYSPANATIINRGHDIMLKFEGDAGSVSIGGTPYFLRQLHWHSPTEHSVNGRRYDMELHMFHESAQGKAAVIGVFYEIGAHDAFLHKLEPYLEMIADRKDREEKMGMMDPRGARGKASVYYRYVGSLTTPPCSEGVIWTIIKRVRTVSRHQLELLREAVHDDMEKNARPRQEVNSRDISMSRPFDQNRHSSLARVDSLLN

SEQ ID NO: 14293 - protein, 223 aa, Triticum aestivum
  peptide (1)..(223): Ceres Seq. ID no. 12617394
  misc_feature (1)..(203): Pfam Name: Pfam Description:  Eukaryotic-type carbonic anhydrase
  misc_feature (1)..(206): NCBI GI NO: 15223122 NR Description: storage protein, putative; protein id: At1g08080.1
  misc_feature (1)..(206): NCBI GI NO: 37806288 NR Description: putative dioscorin
  misc_feature (1)..(206): NCBI GI NO: 34904986 NR Description: putative carbonic anhydrase precursor
  misc_feature (1)..(206): NCBI GI NO: 25291473 NR Description: probable carbonic anhydrase
  misc_feature (1)..(206): NCBI GI NO: 25407021 NR Description: protein T6D22.16 [imported] - Arabidopsis thaliana
  misc_feature (1)..(206): NCBI GI NO: 15223097 NR Description: carbonic anhydrase, putative; protein id:At1g08065
  misc_feature (1)..(202): NCBI GI NO: 29468280 NR Description: nectarin III
  misc_feature (1)..(201): NCBI GI NO: 15233471 NR Description: carbonic anhydrase -like protein
  misc_feature (1)..(169): NCBI GI NO: 30683808 NR Description: carbonic anhydrase -related [Arabidopsis thaliana]
  misc_feature (1)..(201): NCBI GI NO: 1364059 NR Description: dioscorin class A precursor - Dioscorea cayenensis
MQSPIDLASPRVSLVRGLGYLNHSYSPANATIINRGHDIMLKFEGDAGSVSIGGTPYFLRQLHWHSPTEHSVNGRRYDMELHMFHESAQGKAAVIGVFYEIGAHDAFLHKLEPYLEMIADRKDREEKMGMMDPRGARGKASVYYRYVGSLTTPPCSEGVIWTIIKRVRTVSRHQLELLREAVHDDMEKNARPRQEVNSRDISMSRPFDQNRHSSLARVDSLLN

SEQ ID NO: 14294 - DNA, 1208 bp, Triticum aestivum
  misc_feature (1)..(1208): Ceres Seq. ID no. 13597234
gccgaaaacacaccgtcaaaacgttttgtattcgatttcgtgcccctttcgcgtgcgtacgagcgagaccttctcccccttccccttccctgccggtggcagcgaccgaggcagccgtcggagcggacggggcgcgcgtcagcgagtttgcccggatcccccgaagcgcgcgtggttccggcgggccatgggcacgccggagttccctgacctggggcggcactgcagcgtcggcgactgccaccagatcgatttcctccccttcacctgcgaccgatgcgacttcgtcttttgccttcagcaccgaagttatacatcacataaatgtccaaaggctaataacaaggatgtcactgtcgtcatctgcccattatgtgctaaaggagttcgcctgaatccaaatgaagatgcaaacatcacctgggagtctcatgttaatactgattgcgatccatcaaattaccagagagcaacaaagaaaaagaaatgcccagttcctgggtgcagagaacagctgacattttcaaacacaatcatgtgcaaagattgtagcaaagagcactgcctcaagcacagatttggtcctgatcacaagtgcccgggcccaagaaaaccagagcctaccttcccctttgccaacatgctaagaagaagtcagaaagttgagccacgcgcaaacagcagtggcagtggttcttcctggtggagctccagccttttgaatgcagcatcaagtttcagatcatcggcagaagcaggaatgcagaaactgagcattgccaccagcgaagccgtccagaaggctaaggatggggtcaccccgagcagcagtggtggtggcctcgtggagcaatgtgttcagtgtccagcaaggttttccactgtgggggccctaatcgagcacgccgagaaatcccatgggaacaactcgcgaccgagccgtggcaaagtgacgattgatgcttgccccaaatgtagcaagggatttcaagatccggtgttactagtggagcatgttgagagggaacatggaggaacttcaaaagcataaacctgcccgtgagtcatttctcatgagtatgtctatgttatatgcctgattgctgtgtaatttattcctcatttactcgatttgattgtactctagtgagctctgggctcgaattgtgcacatgaaagaaagtcttatctcaagcctgtttaaacac

SEQ ID NO: 14295 - protein, 349 aa, Triticum aestivum
  peptide (1)..(349): Ceres Seq. ID no. 13597235
  misc_feature (163)..(206): Pfam Name: Pfam Description:  AN1-like Zinc finger
  misc_feature (63)..(349): NCBI GI NO: 33146779 NR Description: putative arsenite inducible RNA associated protein
  misc_feature (63)..(349): NCBI GI NO: 30688811 NR Description: zinc finger protein (PMZ) -related
  misc_feature (63)..(311): NCBI GI NO: 15230311 NR Description: expressed protein [Arabidopsis thaliana]
  misc_feature (64)..(199): NCBI GI NO: 15232930 NR Description: zinc finger protein (PMZ) -related
  misc_feature (67)..(349): NCBI GI NO: 33416395 NR Description: Unknown (protein for MGC:66295) [Danio rerio]
  misc_feature (67)..(268): NCBI GI NO: 20270357 NR Description: hypothetical protein BC018415 [Homo sapiens]
  misc_feature (67)..(221): NCBI GI NO: 21749694 NR Description: unnamed protein product [Homo sapiens]
  misc_feature (67)..(268): NCBI GI NO: 34876869 NR Description: similar to RIKEN cDNA 1110060O18
  misc_feature (67)..(268): NCBI GI NO: 21312112 NR Description: RIKEN cDNA 1110060O18 [Mus musculus]
  misc_feature (67)..(268): NCBI GI NO: 15079311 NR Description: RIKEN cDNA 1110060O18 [Mus musculus]
PKTHRQNVLYSISCPFRVRTSETFSPFPFPAGGSDRGSRRSGRGARQRVCPDPPKRAWFRRAMGTPEFPDLGRHCSVGDCHQIDFLPFTCDRCDFVFCLQHRSYTSHKCPKANNKDVTVVICPLCAKGVRLNPNEDANITWESHVNTDCDPSNYQRATKKKKCPVPGCREQLTFSNTIMCKDCSKEHCLKHRFGPDHKCPGPRKPEPTFPFANMLRRSQKVEPRANSSGSGSSWWSSSLLNAASSFRSSAEAGMQKLSIATSEAVQKAKDGVTPSSSGGGLVEQCVQCPARFSTVGALIEHAEKSHGNNSRPSRGKVTIDACPKCSKGFQDPVLLVEHVEREHGGTSKA

SEQ ID NO: 14296 - protein, 287 aa, Triticum aestivum
  peptide (1)..(287): Ceres Seq. ID no. 13597236
  misc_feature (101)..(144): Pfam Name: Pfam Description:  AN1-like Zinc finger
  misc_feature (1)..(287): NCBI GI NO: 33146779 NR Description: putative arsenite inducible RNA associated protein
  misc_feature (1)..(287): NCBI GI NO: 30688811 NR Description: zinc finger protein (PMZ) -related
  misc_feature (1)..(249): NCBI GI NO: 15230311 NR Description: expressed protein [Arabidopsis thaliana]
  misc_feature (2)..(137): NCBI GI NO: 15232930 NR Description: zinc finger protein (PMZ) -related
  misc_feature (5)..(287): NCBI GI NO: 33416395 NR Description: Unknown (protein for MGC:66295) [Danio rerio]
  misc_feature (5)..(206): NCBI GI NO: 20270357 NR Description: hypothetical protein BC018415 [Homo sapiens]
  misc_feature (5)..(159): NCBI GI NO: 21749694 NR Description: unnamed protein product [Homo sapiens]
  misc_feature (5)..(206): NCBI GI NO: 34876869 NR Description: similar to RIKEN cDNA 1110060O18
  misc_feature (5)..(206): NCBI GI NO: 21312112 NR Description: RIKEN cDNA 1110060O18 [Mus musculus]
  misc_feature (5)..(206): NCBI GI NO: 15079311 NR Description: RIKEN cDNA 1110060O18 [Mus musculus]
MGTPEFPDLGRHCSVGDCHQIDFLPFTCDRCDFVFCLQHRSYTSHKCPKANNKDVTVVICPLCAKGVRLNPNEDANITWESHVNTDCDPSNYQRATKKKKCPVPGCREQLTFSNTIMCKDCSKEHCLKHRFGPDHKCPGPRKPEPTFPFANMLRRSQKVEPRANSSGSGSSWWSSSLLNAASSFRSSAEAGMQKLSIATSEAVQKAKDGVTPSSSGGGLVEQCVQCPARFSTVGALIEHAEKSHGNNSRPSRGKVTIDACPKCSKGFQDPVLLVEHVEREHGGTSKA

SEQ ID NO: 14297 - DNA, 1577 bp, Triticum aestivum
  misc_feature (1)..(1577): Ceres Seq. ID no. 13597454
acaaaaagcaagctctatatccagctgactagccacaagtacgacacacatactgcagtgttagcgctacacacacgggcaccagagttatggggaggcaggtcgccgccctgtgcgggcttctcgtcgtgctgctccggctcacgtccggcgtcaatgcacagacggagatcttgttccaggggttcaactgggactcgtggagcaagcaggggggctggtacaacatgctcaaggcccaggttggcgacatcgccggcgccggggtcactcacgtctggctgcccccacctacacactccgtttcatctcaaggatacatgccgggccggctctacgacctggacgcgtccaagtacggcacggcggtggagctcaggtcgctcatcgcggccttcggtgccaagggcatcaagtgcgtcgccgacatcgtcatcaaccaccgctgcgccgaggacaaggacgggcgcggcatctactgcatcttcaagggcggaggacccgagggcctcctggactggggtccgggcatgatctgcagcgacgacaccaagttctccgacggcacgggctaccgtgataccggcgcggacttcgccgccgcgcccgacatcgaccacctcaacccgcgcgtccagaaggagctctccgactggctcaactggctcaagtccgacctcggcttcgacggctggcgcctcgacttcgccaagggctactcggccgacgtcgccaggacgtacgtgcagaacacgagccccggcttcgtcgtcgcggaaatatggaactccctgagctacgacggcgacgggaagcccgccgtcaaccaggacggggagcggcaggagctggtgaactgggcgaaggcggtcggcggccctgccatggcgttcgacttcacgaccaagggcatcctgcagtcggcggtgcagggcgagctgtggaggatgcgggacaaggagggcaacgctcccgggatgatcggcctgttgccggagaaggcggtcacgttcgtggacaaccacgacacgggctcgtcgcagaagaaatggccgttcccggccgacaaggtcatgatgggctacgcctacatcctcacccaccctggagtcccatgcatcttctacgatcacgtgttcgactggaacctgaagcaagagatcaacgcgctggcggcggtgaggaaccgcaacgggatcaacgccgggagcaagctgcgcatcctggcggcggagagcgacatgtacgtggcgacggttgacgagaaagttatcgtcaagctcggaccgaggttcgacgctggcagcgtcatcccgtcggacttccacgtcgtggctcacggcaataactactgcgtctgggagaagagcggccttagggtgccggccgggcggcgctagctacctagtagacgttagcaacttcgcaccggcggccagaccgttgtactcctacaagaaatgtttgttccagttcgtcgtagactaggcaataaagtttgtaccaccaccgctctccttccaaccttgcggaaggagcgtgagctatcaaatatattattaattttacgcgtttgt

SEQ ID NO: 14298 - protein, 436 aa, Triticum aestivum
  peptide (1)..(436): Ceres Seq. ID no. 13597455
  misc_feature (1)..(436): NCBI GI NO: 113679 NR Description: ALPHA-AMYLASE ISOZYME 3A PRECURSOR
  misc_feature (1)..(435): NCBI GI NO: 113680 NR Description: ALPHA-AMYLASE ISOZYME 3B PRECURSOR
  misc_feature (1)..(435): NCBI GI NO: 7435329 NR Description: alpha-amylase (EC 3.2.1.1) - maize
  misc_feature (3)..(435): NCBI GI NO: 113682 NR Description: ALPHA-AMYLASE ISOZYME 3D PRECURSOR
  misc_feature (3)..(435): NCBI GI NO: 11263717 NR Description: alpha-amylase (EC 3.2.1.1) isozyme I - rice
  misc_feature (9)..(436): NCBI GI NO: 113681 NR Description: ALPHA-AMYLASE ISOZYME 3C PRECURSOR
  misc_feature (3)..(435): NCBI GI NO: 169755 NR Description: alpha-amylase (EC 3.2.1.1)
  misc_feature (1)..(436): NCBI GI NO: 113683 NR Description: ALPHA-AMYLASE ISOZYME 3E PRECURSOR
  misc_feature (1)..(436): NCBI GI NO: 11263719 NR Description: alpha-amylase (EC 3.2.1.1) isozyme III - rice
  misc_feature (12)..(426): NCBI GI NO: 27413645 NR Description: alpha-amylase precursor [Musa acuminata]
MGRQVAALCGLLVVLLRLTSGVNAQTEILFQGFNWDSWSKQGGWYNMLKAQVGDIAGAGVTHVWLPPPTHSVSSQGYMPGRLYDLDASKYGTAVELRSLIAAFGAKGIKCVADIVINHRCAEDKDGRGIYCIFKGGGPEGLLDWGPGMICSDDTKFSDGTGYRDTGADFAAAPDIDHLNPRVQKELSDWLNWLKSDLGFDGWRLDFAKGYSADVARTYVQNTSPGFVVAEIWNSLSYDGDGKPAVNQDGERQELVNWAKAVGGPAMAFDFTTKGILQSAVQGELWRMRDKEGNAPGMIGLLPEKAVTFVDNHDTGSSQKKWPFPADKVMMGYAYILTHPGVPCIFYDHVFDWNLKQEINALAAVRNRNGINAGSKLRILAAESDMYVATVDEKVIVKLGPRFDAGSVIPSDFHVVAHGNNYCVWEKSGLRVPAGRR

SEQ ID NO: 14299 - protein, 390 aa, Triticum aestivum
  peptide (1)..(390): Ceres Seq. ID no. 13597456
  misc_feature (1)..(390): NCBI GI NO: 113679 NR Description: ALPHA-AMYLASE ISOZYME 3A PRECURSOR
  misc_feature (1)..(389): NCBI GI NO: 113680 NR Description: ALPHA-AMYLASE ISOZYME 3B PRECURSOR
  misc_feature (1)..(389): NCBI GI NO: 7435329 NR Description: alpha-amylase (EC 3.2.1.1) - maize
  misc_feature (1)..(389): NCBI GI NO: 113682 NR Description: ALPHA-AMYLASE ISOZYME 3D PRECURSOR
  misc_feature (1)..(389): NCBI GI NO: 11263717 NR Description: alpha-amylase (EC 3.2.1.1) isozyme I - rice
  misc_feature (1)..(390): NCBI GI NO: 113681 NR Description: ALPHA-AMYLASE ISOZYME 3C PRECURSOR
  misc_feature (1)..(389): NCBI GI NO: 169755 NR Description: alpha-amylase (EC 3.2.1.1)
  misc_feature (1)..(390): NCBI GI NO: 113683 NR Description: ALPHA-AMYLASE ISOZYME 3E PRECURSOR
  misc_feature (1)..(390): NCBI GI NO: 11263719 NR Description: alpha-amylase (EC 3.2.1.1) isozyme III - rice
  misc_feature (1)..(380): NCBI GI NO: 27413645 NR Description: alpha-amylase precursor [Musa acuminata]
MLKAQVGDIAGAGVTHVWLPPPTHSVSSQGYMPGRLYDLDASKYGTAVELRSLIAAFGAKGIKCVADIVINHRCAEDKDGRGIYCIFKGGGPEGLLDWGPGMICSDDTKFSDGTGYRDTGADFAAAPDIDHLNPRVQKELSDWLNWLKSDLGFDGWRLDFAKGYSADVARTYVQNTSPGFVVAEIWNSLSYDGDGKPAVNQDGERQELVNWAKAVGGPAMAFDFTTKGILQSAVQGELWRMRDKEGNAPGMIGLLPEKAVTFVDNHDTGSSQKKWPFPADKVMMGYAYILTHPGVPCIFYDHVFDWNLKQEINALAAVRNRNGINAGSKLRILAAESDMYVATVDEKVIVKLGPRFDAGSVIPSDFHVVAHGNNYCVWEKSGLRVPAGRR

SEQ ID NO: 14300 - protein, 359 aa, Triticum aestivum
  peptide (1)..(359): Ceres Seq. ID no. 13597457
  misc_feature (1)..(359): NCBI GI NO: 113679 NR Description: ALPHA-AMYLASE ISOZYME 3A PRECURSOR
  misc_feature (1)..(358): NCBI GI NO: 113680 NR Description: ALPHA-AMYLASE ISOZYME 3B PRECURSOR
  misc_feature (1)..(358): NCBI GI NO: 7435329 NR Description: alpha-amylase (EC 3.2.1.1) - maize
  misc_feature (1)..(358): NCBI GI NO: 113682 NR Description: ALPHA-AMYLASE ISOZYME 3D PRECURSOR
  misc_feature (1)..(358): NCBI GI NO: 11263717 NR Description: alpha-amylase (EC 3.2.1.1) isozyme I - rice
  misc_feature (1)..(359): NCBI GI NO: 113681 NR Description: ALPHA-AMYLASE ISOZYME 3C PRECURSOR
  misc_feature (1)..(358): NCBI GI NO: 169755 NR Description: alpha-amylase (EC 3.2.1.1)
  misc_feature (1)..(359): NCBI GI NO: 113683 NR Description: ALPHA-AMYLASE ISOZYME 3E PRECURSOR
  misc_feature (1)..(359): NCBI GI NO: 11263719 NR Description: alpha-amylase (EC 3.2.1.1) isozyme III - rice
  misc_feature (1)..(349): NCBI GI NO: 27413645 NR Description: alpha-amylase precursor [Musa acuminata]
MPGRLYDLDASKYGTAVELRSLIAAFGAKGIKCVADIVINHRCAEDKDGRGIYCIFKGGGPEGLLDWGPGMICSDDTKFSDGTGYRDTGADFAAAPDIDHLNPRVQKELSDWLNWLKSDLGFDGWRLDFAKGYSADVARTYVQNTSPGFVVAEIWNSLSYDGDGKPAVNQDGERQELVNWAKAVGGPAMAFDFTTKGILQSAVQGELWRMRDKEGNAPGMIGLLPEKAVTFVDNHDTGSSQKKWPFPADKVMMGYAYILTHPGVPCIFYDHVFDWNLKQEINALAAVRNRNGINAGSKLRILAAESDMYVATVDEKVIVKLGPRFDAGSVIPSDFHVVAHGNNYCVWEKSGLRVPAGRR

SEQ ID NO: 14301 - DNA, 1696 bp, Triticum aestivum
  misc_feature (1)..(1696): Ceres Seq. ID no. 13597411
aaaagacaattcttttcttcctcttctgttccggcaggggcggcggggatggcgatggcgtcgcgcgcgcggacgcggtggtcggcgctggcggcgagcacgctgatccagtgcttcgcgggcggcagctactgcttcggcgtctactcgccggcgctcaaggcgtcgcagggctacgaccagtccgcgctcgacgccgtcgccttcttcaaggacgtcggcgctaacgtcggggtcctctccggcctcctcgccgcgtgggctccctctgggggccggaggcgaccctggctcgtcctcctcaccggcgccgcgctctgcgccgccgggtacctccccatgtggctcgccgtcgccggggtcgtccccgccccgctcccgctcgtctgcctctacatgctgctcgccgcgcaggcgcagaccttcatgaacacggccgatgtcgtcaccgccgtagagaacttccccgaccgccgcggcaccgtcatcggcatcatgaaggggtttctaggcttgagtggggcgatactggtccaagtacagcggactctccgtattgatcccggcagtttcatacttatgctggcaatactacccacagccatcgcgttgctgctcatgtactttgtcgacgtccacagcgctcatgagcggtacaacaagaagttcctcgatgctttctctctcatggccgttactgttgctgggttcctgatggttgtcataatctgcgaccaagtattcgtgataagttcagccgggcagagcgtttgctttgggatactccttctattgatcctgtctcccgcagctattgttgtaagggttcagaggacggaaccgaagcagcaagaagaaccaacgccggaagaacaaactggtttacttcttcatgaggagactgcgcagcaggattcggagaacgccagctctagcatggcgctcgtgggatctaacagtcaggacatgtcgtcggacaaagcagagaacctgaacgtggtgcaggccatgtgcaaacttgacttctggctgctcttcgttgcgatggcctgcgggatggggtcggggctggccaccgtgaacaacatcagccagatcgggggctcccttggctacacgagcagggagaccagcactctggtgtcgctatggagcatctggaacttctcagggaggttcggcgcaggctacgtctctgatcacttcctccggtcgcgaggagtcggcaggcctttcttcatagccgcgacgcttctggtcatgggcgtaggccatgccatcatctcctccggtttccacgcgtcgctctacgtcggctccgtccttgtaggactgtgctacgggtctcagtgggctttgatgccgagcataacttcagagatcttcgggctaaaccatttcggcaccatattcaacacggtggccgtcgcgagccctgttggctcttacatcctctcggtgtgcgtggtcgggttcatctatgacaaggagtcaccgcaaggtgagcttgcctgcgccggtaagcactgctttgcgctctccttcatgatcatggcatgtgtctgcgtcttcgggtctgctgttgcttttgtattgtttgtcagaacaaggaagttttataggcgggttatatacgcccgactgctctcttttgtagataaatgaagaaatgcatatatgcaaacgattctcagtc

SEQ ID NO: 14302 - protein, 554 aa, Triticum aestivum
  peptide (1)..(554): Ceres Seq. ID no. 13597412
  misc_feature (93)..(209): Pfam Name: and other Pfam Description: Sugar
  misc_feature (24)..(548): NCBI GI NO: 15221382 NR Description: expressed protein [Arabidopsis thaliana]
  misc_feature (24)..(548): NCBI GI NO: 29824365 NR Description: unknown protein [Arabidopsis thaliana]
  misc_feature (24)..(549): NCBI GI NO: 15221898 NR Description: hypothetical protein [Arabidopsis thaliana]
  misc_feature (23)..(549): NCBI GI NO: 30686019 NR Description: nodulin-related protein [Arabidopsis thaliana]
  misc_feature (23)..(549): NCBI GI NO: 7485467 NR Description: nodulin-like protein
  misc_feature (22)..(550): NCBI GI NO: 30686022 NR Description: 68409.m03800 nodulin-related protein
  misc_feature (22)..(554): NCBI GI NO: 7485467 NR Description: nodulin-like protein
  misc_feature (26)..(547): NCBI GI NO: 34394606 NR Description: putative nodule-specific protein
  misc_feature (26)..(547): NCBI GI NO: 15225053 NR Description: nodulin-related protein [Arabidopsis thaliana]
  misc_feature (26)..(293): NCBI GI NO: 34897160 NR Description: putative nodule-specific protein
KRQFFSSSSVPAGAAGMAMASRARTRWSALAASTLIQCFAGGSYCFGVYSPALKASQGYDQSALDAVAFFKDVGANVGVLSGLLAAWAPSGGRRRPWLVLLTGAALCAAGYLPMWLAVAGVVPAPLPLVCLYMLLAAQAQTFMNTADVVTAVENFPDRRGTVIGIMKGFLGLSGAILVQVQRTLRIDPGSFILMLAILPTAIALLLMYFVDVHSAHERYNKKFLDAFSLMAVTVAGFLMVVIICDQVFVISSAGQSVCFGILLLLILSPAAIVVRVQRTEPKQQEEPTPEEQTGLLLHEETAQQDSENASSSMALVGSNSQDMSSDKAENLNVVQAMCKLDFWLLFVAMACGMGSGLATVNNISQIGGSLGYTSRETSTLVSLWSIWNFSGRFGAGYVSDHFLRSRGVGRPFFIAATLLVMGVGHAIISSGFHASLYVGSVLVGLCYGSQWALMPSITSEIFGLNHFGTIFNTVAVASPVGSYILSVCVVGFIYDKESPQGELACAGKHCFALSFMIMACVCVFGSAVAFVLFVRTRKFYRRVIYARLLSFVDK

SEQ ID NO: 14303 - protein, 538 aa, Triticum aestivum
  peptide (1)..(538): Ceres Seq. ID no. 13597413
  misc_feature (77)..(193): Pfam Name: and other Pfam Description: Sugar
  misc_feature (8)..(532): NCBI GI NO: 15221382 NR Description: expressed protein [Arabidopsis thaliana]
  misc_feature (8)..(532): NCBI GI NO: 29824365 NR Description: unknown protein [Arabidopsis thaliana]
  misc_feature (8)..(533): NCBI GI NO: 15221898 NR Description: hypothetical protein [Arabidopsis thaliana]
  misc_feature (7)..(533): NCBI GI NO: 30686019 NR Description: nodulin-related protein [Arabidopsis thaliana]
  misc_feature (7)..(533): NCBI GI NO: 7485467 NR Description: nodulin-like protein
  misc_feature (6)..(534): NCBI GI NO: 30686022 NR Description: 68409.m03800 nodulin-related protein
  misc_feature (6)..(538): NCBI GI NO: 7485467 NR Description: nodulin-like protein
  misc_feature (10)..(531): NCBI GI NO: 34394606 NR Description: putative nodule-specific protein
  misc_feature (10)..(531): NCBI GI NO: 15225053 NR Description: nodulin-related protein [Arabidopsis thaliana]
  misc_feature (10)..(277): NCBI GI NO: 34897160 NR Description: putative nodule-specific protein
MAMASRARTRWSALAASTLIQCFAGGSYCFGVYSPALKASQGYDQSALDAVAFFKDVGANVGVLSGLLAAWAPSGGRRRPWLVLLTGAALCAAGYLPMWLAVAGVVPAPLPLVCLYMLLAAQAQTFMNTADVVTAVENFPDRRGTVIGIMKGFLGLSGAILVQVQRTLRIDPGSFILMLAILPTAIALLLMYFVDVHSAHERYNKKFLDAFSLMAVTVAGFLMVVIICDQVFVISSAGQSVCFGILLLLILSPAAIVVRVQRTEPKQQEEPTPEEQTGLLLHEETAQQDSENASSSMALVGSNSQDMSSDKAENLNVVQAMCKLDFWLLFVAMACGMGSGLATVNNISQIGGSLGYTSRETSTLVSLWSIWNFSGRFGAGYVSDHFLRSRGVGRPFFIAATLLVMGVGHAIISSGFHASLYVGSVLVGLCYGSQWALMPSITSEIFGLNHFGTIFNTVAVASPVGSYILSVCVVGFIYDKESPQGELACAGKHCFALSFMIMACVCVFGSAVAFVLFVRTRKFYRRVIYARLLSFVDK

SEQ ID NO: 14304 - protein, 536 aa, Triticum aestivum
  peptide (1)..(536): Ceres Seq. ID no. 13597414
  misc_feature (75)..(191): Pfam Name: and other Pfam Description: Sugar
  misc_feature (6)..(530): NCBI GI NO: 15221382 NR Description: expressed protein [Arabidopsis thaliana]
  misc_feature (6)..(530): NCBI GI NO: 29824365 NR Description: unknown protein [Arabidopsis thaliana]
  misc_feature (6)..(531): NCBI GI NO: 15221898 NR Description: hypothetical protein [Arabidopsis thaliana]
  misc_feature (5)..(531): NCBI GI NO: 30686019 NR Description: nodulin-related protein [Arabidopsis thaliana]
  misc_feature (5)..(531): NCBI GI NO: 7485467 NR Description: nodulin-like protein
  misc_feature (4)..(532): NCBI GI NO: 30686022 NR Description: 68409.m03800 nodulin-related protein
  misc_feature (4)..(536): NCBI GI NO: 7485467 NR Description: nodulin-like protein
  misc_feature (8)..(529): NCBI GI NO: 34394606 NR Description: putative nodule-specific protein
  misc_feature (8)..(529): NCBI GI NO: 15225053 NR Description: nodulin-related protein [Arabidopsis thaliana]
  misc_feature (8)..(275): NCBI GI NO: 34897160 NR Description: putative nodule-specific protein
MASRARTRWSALAASTLIQCFAGGSYCFGVYSPALKASQGYDQSALDAVAFFKDVGANVGVLSGLLAAWAPSGGRRRPWLVLLTGAALCAAGYLPMWLAVAGVVPAPLPLVCLYMLLAAQAQTFMNTADVVTAVENFPDRRGTVIGIMKGFLGLSGAILVQVQRTLRIDPGSFILMLAILPTAIALLLMYFVDVHSAHERYNKKFLDAFSLMAVTVAGFLMVVIICDQVFVISSAGQSVCFGILLLLILSPAAIVVRVQRTEPKQQEEPTPEEQTGLLLHEETAQQDSENASSSMALVGSNSQDMSSDKAENLNVVQAMCKLDFWLLFVAMACGMGSGLATVNNISQIGGSLGYTSRETSTLVSLWSIWNFSGRFGAGYVSDHFLRSRGVGRPFFIAATLLVMGVGHAIISSGFHASLYVGSVLVGLCYGSQWALMPSITSEIFGLNHFGTIFNTVAVASPVGSYILSVCVVGFIYDKESPQGELACAGKHCFALSFMIMACVCVFGSAVAFVLFVRTRKFYRRVIYARLLSFVDK

SEQ ID NO: 14305 - DNA, 1403 bp, Triticum aestivum
  misc_feature (1)..(1403): Ceres Seq. ID no. 12617323
tagaacatcctaattgaaaacccaaatcaccgttctccccccaaatcacatcccactctcagatctcggaatggccgactcctccgcgccgcactccaacggcggcgccggcgccgaggcggaggcggtgccccgttccctggcgccgccgcggagggtggcgctggtgacgggcatcacggggcaggacgggagctacctgactgagctgctcctgtccaaggggtacgaggtgcacggcctcatccgccgctcctccaacttcaacacccagcgcctcgaccacatctaccacgacccgcacgcgacgccctccgccgcgcgcccgccgatgcgcctccactacgccgacctctccgactcgtcctccctccgccgcgcgctcgaccacgtgctccccgacgaggtctacaacctcgccgcccagtcccacgtcgccgtctccttcgaggtgcccgactacaccgccgacgtcaccgccacgggcgcgctccgcctgctcgaggccgtccgcctctcctcgaagcccatgcgctactaccaggcggggtcctcggagatgttcggctccacgccgccgccgcagagcgaggccacccccttccacccgcgctccccctacgccgccgccaaggtcgccgcgcactggtacaccgtcaactaccgcgaggcgtacggcctcttcgcctgcaacggcgtgctcttcaaccacgagtccccccggcgcggcgagaacttcgtcacccgcaagatcacccgcgccatcggccgcatcaaggtcgggctccagaccaaggtcttcctcggcaacctctccgccgccagggattggggcttcgccggggattatgttgaggccatgtggctcatgctccagcaggacaagcctgatgattatgttgtcgccactgaagagtgccacaccgtggaggagttcttgcaggctgcttttgggtatgccggcctcaactggaaggatcatgtggtcattgacaagaagtactttcgcccttcggaggtggactgcctgcagggagattcatccaagtcaaggagagtgcttgggtggaagcccaaggttggcttccagcagctagttgagatgatggttgataacgacatcgagcttgccaagaaggagaaggtccttgtggatgctgggtaccgcgaccccaagcagcagccatagagttggaatcaatagtttggttaaaatggagcttggtttggatttcccacccttagaagctgatacagtgtggccattgcagtagaggttggctgaagttattgttgtttgtctcagggtagaaataaggaggtttaaagtttgatcctacaagactgttgattaagttactatgtcatgtgcttttctcatatgaatgaatcagacaatttat

SEQ ID NO: 14306 - protein, 372 aa, Triticum aestivum
  peptide (1)..(372): Ceres Seq. ID no. 12617324
  misc_feature (31)..(354): Pfam Name: Pfam Description:  NAD dependent epimerase/dehydratase family
  misc_feature (2)..(372): NCBI GI NO: 7939611 NR Description: root cap-specific protein [Zea mays]
  misc_feature (10)..(372): NCBI GI NO: 1764100 NR Description: GDP-D-mannose-4,6-dehydratase
  misc_feature (10)..(372): NCBI GI NO: 28373938 NR Description: Chain A
  misc_feature (10)..(372): NCBI GI NO: 21536808 NR Description: GDP-D-mannose-4,6-dehydratase MUR1
  misc_feature (24)..(372): NCBI GI NO: 15239334 NR Description: GDP-D-mannose 4,6-dehydratase; GMD1(gb|AAF07199
  misc_feature (10)..(372): NCBI GI NO: 15230418 NR Description: GDP-D-mannose-4,6-dehydratase
  misc_feature (28)..(351): NCBI GI NO: 22298176 NR Description: GDP-mannose 4,6-dehydratase
  misc_feature (31)..(352): NCBI GI NO: 4097914 NR Description: putative GDP-D-mannose dehydratase
  misc_feature (31)..(352): NCBI GI NO: 23128163 NR Description: hypothetical protein [Nostoc punctiforme]
  misc_feature (29)..(351): NCBI GI NO: 16329177 NR Description: GDP-D-mannose dehydratase
MADSSAPHSNGGAGAEAEAVPRSLAPPRRVALVTGITGQDGSYLTELLLSKGYEVHGLIRRSSNFNTQRLDHIYHDPHATPSAARPPMRLHYADLSDSSSLRRALDHVLPDEVYNLAAQSHVAVSFEVPDYTADVTATGALRLLEAVRLSSKPMRYYQAGSSEMFGSTPPPQSEATPFHPRSPYAAAKVAAHWYTVNYREAYGLFACNGVLFNHESPRRGENFVTRKITRAIGRIKVGLQTKVFLGNLSAARDWGFAGDYVEAMWLMLQQDKPDDYVVATEECHTVEEFLQAAFGYAGLNWKDHVVIDKKYFRPSEVDCLQGDSSKSRRVLGWKPKVGFQQLVEMMVDNDIELAKKEKVLVDAGYRDPKQQP

SEQ ID NO: 14307 - protein, 285 aa, Triticum aestivum
  peptide (1)..(285): Ceres Seq. ID no. 12617325
  misc_feature (1)..(267): Pfam Name: Pfam Description:  NAD dependent epimerase/dehydratase family
  misc_feature (1)..(285): NCBI GI NO: 7939611 NR Description: root cap-specific protein [Zea mays]
  misc_feature (1)..(285): NCBI GI NO: 1764100 NR Description: GDP-D-mannose-4,6-dehydratase
  misc_feature (1)..(285): NCBI GI NO: 28373938 NR Description: Chain A
  misc_feature (1)..(285): NCBI GI NO: 21536808 NR Description: GDP-D-mannose-4,6-dehydratase MUR1
  misc_feature (1)..(285): NCBI GI NO: 15239334 NR Description: GDP-D-mannose 4,6-dehydratase; GMD1(gb|AAF07199
  misc_feature (1)..(285): NCBI GI NO: 15230418 NR Description: GDP-D-mannose-4,6-dehydratase
  misc_feature (1)..(264): NCBI GI NO: 22298176 NR Description: GDP-mannose 4,6-dehydratase
  misc_feature (1)..(265): NCBI GI NO: 4097914 NR Description: putative GDP-D-mannose dehydratase
  misc_feature (1)..(265): NCBI GI NO: 23128163 NR Description: hypothetical protein [Nostoc punctiforme]
  misc_feature (1)..(264): NCBI GI NO: 16329177 NR Description: GDP-D-mannose dehydratase
MRLHYADLSDSSSLRRALDHVLPDEVYNLAAQSHVAVSFEVPDYTADVTATGALRLLEAVRLSSKPMRYYQAGSSEMFGSTPPPQSEATPFHPRSPYAAAKVAAHWYTVNYREAYGLFACNGVLFNHESPRRGENFVTRKITRAIGRIKVGLQTKVFLGNLSAARDWGFAGDYVEAMWLMLQQDKPDDYVVATEECHTVEEFLQAAFGYAGLNWKDHVVIDKKYFRPSEVDCLQGDSSKSRRVLGWKPKVGFQQLVEMMVDNDIELAKKEKVLVDAGYRDPKQQP

SEQ ID NO: 14308 - protein, 219 aa, Triticum aestivum
  peptide (1)..(219): Ceres Seq. ID no. 12617326
  misc_feature (1)..(201): Pfam Name: Pfam Description:  NAD dependent epimerase/dehydratase family
  misc_feature (1)..(219): NCBI GI NO: 7939611 NR Description: root cap-specific protein [Zea mays]
  misc_feature (1)..(219): NCBI GI NO: 1764100 NR Description: GDP-D-mannose-4,6-dehydratase
  misc_feature (1)..(219): NCBI GI NO: 28373938 NR Description: Chain A
  misc_feature (1)..(219): NCBI GI NO: 21536808 NR Description: GDP-D-mannose-4,6-dehydratase MUR1
  misc_feature (1)..(219): NCBI GI NO: 15239334 NR Description: GDP-D-mannose 4,6-dehydratase; GMD1(gb|AAF07199
  misc_feature (1)..(219): NCBI GI NO: 15230418 NR Description: GDP-D-mannose-4,6-dehydratase
  misc_feature (1)..(198): NCBI GI NO: 22298176 NR Description: GDP-mannose 4,6-dehydratase
  misc_feature (1)..(199): NCBI GI NO: 4097914 NR Description: putative GDP-D-mannose dehydratase
  misc_feature (1)..(199): NCBI GI NO: 23128163 NR Description: hypothetical protein [Nostoc punctiforme]
  misc_feature (1)..(198): NCBI GI NO: 16329177 NR Description: GDP-D-mannose dehydratase
MRYYQAGSSEMFGSTPPPQSEATPFHPRSPYAAAKVAAHWYTVNYREAYGLFACNGVLFNHESPRRGENFVTRKITRAIGRIKVGLQTKVFLGNLSAARDWGFAGDYVEAMWLMLQQDKPDDYVVATEECHTVEEFLQAAFGYAGLNWKDHVVIDKKYFRPSEVDCLQGDSSKSRRVLGWKPKVGFQQLVEMMVDNDIELAKKEKVLVDAGYRDPKQQP

SEQ ID NO: 14309 - DNA, 907 bp, Triticum aestivum
  misc_feature (1)..(907): Ceres Seq. ID no. 15178576
gaggtgtgaacgatgggctctctgtcggactcgcaggcgaatggcgaccgtcagccgccgccggcggaggcggaggatgctggggcgcaagtcgaggagggagatactggcgagaagatggagggcgtcgcgtccatagcgctgctgccctctggcgccatctccggccacttcatccgccttccggactccgcctgctacggcctccagggcaccccgataccatgcgagagggaatgtagccgaggagatgattaccgccttataaagctctccatcattaattttaagaggaagacagagaaggtggttgtggtggaatgcagggggcatgatgctgctcgattacaaaacattgaccatttgcatggatgggaagatgacgttgttggattggttcaaaagaaacatgggaataagaaagtcttggtctctttcgaatgcgagacgctgaaggccgataaagccgctgaagaacatattagcaagtatatgccaaatctttgcggactggacgcagttgtaaacacagggaagatgagcatctctggcatcaacctcgacgaggacgatgaaccaagcggtaacagctgagagcggaaacactgtgtcagtgtgttagctgcgagccgtcaatgccgtcgacaaaggaggaccacgtgtcgctgttacaacggcatgagttttatgcgacaaatcagcgcttctgtttctgcacttgaaacggtgcgctttgtagcagttctgtttctgcacttgaaacggtgcgctttgtagcaagtctcttaacggaatgtgtgtttgctgttgcttcatctggcatgatcctgatgagggaattatacacccttggtcttggacttgggggtttggtgggccagtcggcggcacaaaaaaaaaaaaaaaa

SEQ ID NO: 14310 - protein, 193 aa, Triticum aestivum
  peptide (1)..(193): Ceres Seq. ID no. 15178577
  misc_feature (28)..(188): NCBI GI NO: 15228659 NR Description: hypothetical protein [Arabidopsis thaliana]
  misc_feature (57)..(170): NCBI GI NO: 11994768 NR Description: gene_id:MMF24.3~unknown protein
MGSLSDSQANGDRQPPPAEAEDAGAQVEEGDTGEKMEGVASIALLPSGAISGHFIRLPDSACYGLQGTPIPCERECSRGDDYRLIKLSIINFKRKTEKVVVVECRGHDAARLQNIDHLHGWEDDVVGLVQKKHGNKKVLVSFECETLKADKAAEEHISKYMPNLCGLDAVVNTGKMSISGINLDEDDEPSGNS

SEQ ID NO: 14311 - protein, 158 aa, Triticum aestivum
  peptide (1)..(158): Ceres Seq. ID no. 15178578
  misc_feature (1)..(153): NCBI GI NO: 15228659 NR Description: hypothetical protein [Arabidopsis thaliana]
  misc_feature (22)..(135): NCBI GI NO: 11994768 NR Description: gene_id:MMF24.3~unknown protein
MEGVASIALLPSGAISGHFIRLPDSACYGLQGTPIPCERECSRGDDYRLIKLSIINFKRKTEKVVVVECRGHDAARLQNIDHLHGWEDDVVGLVQKKHGNKKVLVSFECETLKADKAAEEHISKYMPNLCGLDAVVNTGKMSISGINLDEDDEPSGNS

SEQ ID NO: 14312 - DNA, 1286 bp, Triticum aestivum
  misc_feature (1)..(1286): Ceres Seq. ID no. 13597237
acacaaactcctctcctcatcgcctctcctcgccccctctgcccttcctcatcttcctcccgttcggttgtggctccgtcttccctcacgattggtgcccgggcgccgccgccatcgccatggacggcctgcacggcgccgacgcctgcttctcccccgggagggccatgtcgccgcaggtccggccccccgccggcccgccggacgtaggcagccactacttggcggagctgttgcaggagcaccagaagctcgtcccgttcacgcaggtgctaccaatctgcagcaagctgttgagcaacgagataatgcgggtgacctgcctgcttaagcaccagcatggcggggactttgagaggctgccgccgatggcgagtccaaaccagatgcatcatcatccgtcgcccccaatgcctaatttctgcggaaatggttttggcccgtggaaccacggggcgcatccagagagggtaggttttcctcaaggacctgtgggttggcaaggagcaccacaaagcccctcttcatacattgtcaagaagattttgcggttggagataccaacagatacttaccctaatttcaattttattggccgtcttcttgggccaagaggaaactcgttgaagaggattgaagcctctacgggttgtcgtgtttttatcagagggaagggctcaattaaagatcctgggaaggaggaactgctgaagggaagacctggttacgaacacttggatgatcccctgcatatcttgattgaagcagagttacctgccaatgtcattgatgcaagactctcaaaagcacaagagatcctagaagagttgttgaaaccagtggatgaatcacaagactactacaagaggcagcaactccgtgagcttgccatgctgaactcaccgctccgagaggagagccctcgtctaagcccgcatccaagtccgcacccaagcccgcatcaaggcggcgcttcacccttcagtaacggtgggatgaaacgaagcaaacaatgactgcagaggcctgctcctcccaactttgacccttccagaaacctgctctcaatcggtgccctcacaacctaatttttcatgagcaagctttcatgatggtgttggcatccgtgcgaaacctgtgttactagtagaattttgatgagtctcccttgtgacattagcctgtgatgactgactgagaatgatctatgatagcgaatcctccgcctttataattagaacatttgatttatttgttgttggtaatcatcagatatggcactgtgc

SEQ ID NO: 14313 - protein, 337 aa, Triticum aestivum
  peptide (1)..(337): Ceres Seq. ID no. 13597238
  misc_feature (183)..(238): Pfam Name: Pfam Description:  KH domain
  misc_feature (40)..(337): NCBI GI NO: 34909270 NR Description: P0454H12.18
  misc_feature (42)..(336): NCBI GI NO: 34900448 NR Description: contains EST C27129
  misc_feature (40)..(336): NCBI GI NO: 12322716 NR Description: unknown protein; 28504-31237
  misc_feature (40)..(336): NCBI GI NO: 30680583 NR Description: KH domain protein [Arabidopsis thaliana]
  misc_feature (40)..(336): NCBI GI NO: 15224909 NR Description: KH domain protein [Arabidopsis thaliana]
  misc_feature (40)..(336): NCBI GI NO: 40645104 NR Description: hypothetical protein [Nicotiana tabacum]
  misc_feature (34)..(336): NCBI GI NO: 16930473 NR Description: At1g09660/F21M12_5 [Arabidopsis thaliana]
  misc_feature (34)..(336): NCBI GI NO: 22329449 NR Description: KH domain quaking protein, putative
  misc_feature (73)..(336): NCBI GI NO: 15236738 NR Description: KH domain protein [Arabidopsis thaliana]
  misc_feature (73)..(336): NCBI GI NO: 20268733 NR Description: unknown protein [Arabidopsis thaliana]
TNSSPHRLSSPPLPFLIFLPFGCGSVFPHDWCPGAAAIAMDGLHGADACFSPGRAMSPQVRPPAGPPDVGSHYLAELLQEHQKLVPFTQVLPICSKLLSNEIMRVTCLLKHQHGGDFERLPPMASPNQMHHHPSPPMPNFCGNGFGPWNHGAHPERVGFPQGPVGWQGAPQSPSSYIVKKILRLEIPTDTYPNFNFIGRLLGPRGNSLKRIEASTGCRVFIRGKGSIKDPGKEELLKGRPGYEHLDDPLHILIEAELPANVIDARLSKAQEILEELLKPVDESQDYYKRQQLRELAMLNSPLREESPRLSPHPSPHPSPHQGGASPFSNGGMKRSKQ

SEQ ID NO: 14314 - protein, 298 aa, Triticum aestivum
  peptide (1)..(298): Ceres Seq. ID no. 13597239
  misc_feature (144)..(199): Pfam Name: Pfam Description:  KH domain
  misc_feature (1)..(298): NCBI GI NO: 34909270 NR Description: P0454H12.18
  misc_feature (3)..(297): NCBI GI NO: 34900448 NR Description: contains EST C27129
  misc_feature (1)..(297): NCBI GI NO: 12322716 NR Description: unknown protein; 28504-31237
  misc_feature (1)..(297): NCBI GI NO: 30680583 NR Description: KH domain protein [Arabidopsis thaliana]
  misc_feature (1)..(297): NCBI GI NO: 15224909 NR Description: KH domain protein [Arabidopsis thaliana]
  misc_feature (1)..(297): NCBI GI NO: 40645104 NR Description: hypothetical protein [Nicotiana tabacum]
  misc_feature (1)..(297): NCBI GI NO: 16930473 NR Description: At1g09660/F21M12_5 [Arabidopsis thaliana]
  misc_feature (1)..(297): NCBI GI NO: 22329449 NR Description: KH domain quaking protein, putative
  misc_feature (34)..(297): NCBI GI NO: 15236738 NR Description: KH domain protein [Arabidopsis thaliana]
  misc_feature (34)..(297): NCBI GI NO: 20268733 NR Description: unknown protein [Arabidopsis thaliana]
MDGLHGADACFSPGRAMSPQVRPPAGPPDVGSHYLAELLQEHQKLVPFTQVLPICSKLLSNEIMRVTCLLKHQHGGDFERLPPMASPNQMHHHPSPPMPNFCGNGFGPWNHGAHPERVGFPQGPVGWQGAPQSPSSYIVKKILRLEIPTDTYPNFNFIGRLLGPRGNSLKRIEASTGCRVFIRGKGSIKDPGKEELLKGRPGYEHLDDPLHILIEAELPANVIDARLSKAQEILEELLKPVDESQDYYKRQQLRELAMLNSPLREESPRLSPHPSPHPSPHQGGASPFSNGGMKRSKQ

SEQ ID NO: 14315 - protein, 282 aa, Triticum aestivum
  peptide (1)..(282): Ceres Seq. ID no. 13597240
  misc_feature (128)..(183): Pfam Name: Pfam Description:  KH domain
  misc_feature (1)..(282): NCBI GI NO: 34909270 NR Description: P0454H12.18
  misc_feature (1)..(281): NCBI GI NO: 34900448 NR Description: contains EST C27129
  misc_feature (1)..(281): NCBI GI NO: 12322716 NR Description: unknown protein; 28504-31237
  misc_feature (1)..(281): NCBI GI NO: 30680583 NR Description: KH domain protein [Arabidopsis thaliana]
  misc_feature (1)..(281): NCBI GI NO: 15224909 NR Description: KH domain protein [Arabidopsis thaliana]
  misc_feature (1)..(281): NCBI GI NO: 40645104 NR Description: hypothetical protein [Nicotiana tabacum]
  misc_feature (1)..(281): NCBI GI NO: 16930473 NR Description: At1g09660/F21M12_5 [Arabidopsis thaliana]
  misc_feature (1)..(281): NCBI GI NO: 22329449 NR Description: KH domain quaking protein, putative
  misc_feature (18)..(281): NCBI GI NO: 15236738 NR Description: KH domain protein [Arabidopsis thaliana]
  misc_feature (18)..(281): NCBI GI NO: 20268733 NR Description: unknown protein [Arabidopsis thaliana]
MSPQVRPPAGPPDVGSHYLAELLQEHQKLVPFTQVLPICSKLLSNEIMRVTCLLKHQHGGDFERLPPMASPNQMHHHPSPPMPNFCGNGFGPWNHGAHPERVGFPQGPVGWQGAPQSPSSYIVKKILRLEIPTDTYPNFNFIGRLLGPRGNSLKRIEASTGCRVFIRGKGSIKDPGKEELLKGRPGYEHLDDPLHILIEAELPANVIDARLSKAQEILEELLKPVDESQDYYKRQQLRELAMLNSPLREESPRLSPHPSPHPSPHQGGASPFSNGGMKRSKQ

SEQ ID NO: 14316 - DNA, 1488 bp, Triticum aestivum
  misc_feature (1)..(1488): Ceres Seq. ID no. 13591224
cagtcgcgagcccccgcttccattctaatccgccccctcccgagacgccaaagccccaaacccctcgccctcccaaaccctaactctaaaacctccgccctcccgccgccgccgccgcccgattcccctccccaggccccgcatcccccgtccggcttgaacgatgtcgtccgacgaggaggtcagggaggagaaggagctcgacctctcctccaacgaggtcgtcaccaagtacaagaccgccgccgagatcatcaacaaggctctgaagttggtattgttggagtgcaagccgaaagccaagattgttgacatttgtgagaagggtgacaatttcataacagagcaaactgggaatgtctacaagaacgcgaagaggaagattgaaaggggcattgctttcccgacatgtgtatctgtgaacaacacagtctgtcatttctccccactggcaactgacgattctgtactcgaagaaaatgacatggtgaagatcgatatggcttgccatattgatggttttattgctgtggtggctcatacacatgtcatcaaaggtgggccggttactggaagagcagctaatgttcttgctgctgcaaacacagcagcagaagttgcaatgaggcttgttagacctggcaagaagaataaggatgtcactgaagcaattcagaaagttgctgctgcttatgattgtaaaattgttgaaggagttcttagccatcagctgaaacaattcgtcatcgatggtaacaaagtggtacttagtgtttcaaatgctgatacaaaggtggatgatgctgaatttgaagaaaatgaagtgtatgcaattgatattgtcaccagcactggcgagggaaagccgaagctattggatgagaagcagaccactatttacaagagagctgtagacaagaactatcacttgaagatgaaggcatcaaggttcatcttcagtgagattagccagaagttcccaatcatgccattcactgctagggcgctggaggagaagcgtgcacgcttaggtttggtagaatgcatgaatcatgagctgttgcagccataccctgttctacatgagaagcaaggtgacctggttgcccacatcaagttcaccgtgttgttgatgccaaatgggtctgacaagataacttcacatccactacagcaattggagccctcaaaatccatcgagggcgatgctgagatcaaggcttggctggctttgggcacaaagtcaaagaagaagggtggtggcaagaaaaagaaaggcaagaaaggagatgcagcagaagtagcagagcccatggaggtttctaaggacgcaccaagccaggaataattctcattttttttgaattgcttccgttacgtttgtacctgctcctttgctgcatctgattgttttatattacattcagctgtggggatttgagtacctttttttgaagtgtctaatgaaaatggttgatcctggcgcac

SEQ ID NO: 14317 - protein, 394 aa, Triticum aestivum
  peptide (1)..(394): Ceres Seq. ID no. 13591225
  misc_feature (1)..(390): NCBI GI NO: 7447216 NR Description: probable DNA-binding protein GBP16 - rice
  misc_feature (1)..(393): NCBI GI NO: 9652218 NR Description: putative DNA binding protein [Atriplex hortensis]
  misc_feature (1)..(390): NCBI GI NO: 15231039 NR Description: nuclear DNA-binding protein G2p -related
  misc_feature (1)..(390): NCBI GI NO: 13430628 NR Description: putative nuclear DNA-binding protein G2p
  misc_feature (1)..(390): NCBI GI NO: 30693537 NR Description: nuclear DNA-binding protein G2p -related
  misc_feature (1)..(390): NCBI GI NO: 34193902 NR Description: Proliferation-associated protein 1 [Danio rerio]
  misc_feature (9)..(385): NCBI GI NO: 34862215 NR Description: similar to proliferation-associated protein 1
  misc_feature (9)..(385): NCBI GI NO: 26788026 NR Description: SI:dZ150I12
  misc_feature (9)..(385): NCBI GI NO: 13632817 NR Description: Proliferation-associated protein 2G4
  misc_feature (9)..(385): NCBI GI NO: 6755100 NR Description: proliferation-associated 2G4
MSSDEEVREEKELDLSSNEVVTKYKTAAEIINKALKLVLLECKPKAKIVDICEKGDNFITEQTGNVYKNAKRKIERGIAFPTCVSVNNTVCHFSPLATDDSVLEENDMVKIDMACHIDGFIAVVAHTHVIKGGPVTGRAANVLAAANTAAEVAMRLVRPGKKNKDVTEAIQKVAAAYDCKIVEGVLSHQLKQFVIDGNKVVLSVSNADTKVDDAEFEENEVYAIDIVTSTGEGKPKLLDEKQTTIYKRAVDKNYHLKMKASRFIFSEISQKFPIMPFTARALEEKRARLGLVECMNHELLQPYPVLHEKQGDLVAHIKFTVLLMPNGSDKITSHPLQQLEPSKSIEGDAEIKAWLALGTKSKKKGGGKKKKGKKGDAAEVAEPMEVSKDAPSQE

SEQ ID NO: 14318 - protein, 287 aa, Triticum aestivum
  peptide (1)..(287): Ceres Seq. ID no. 13591226
  misc_feature (1)..(283): NCBI GI NO: 7447216 NR Description: probable DNA-binding protein GBP16 - rice
  misc_feature (1)..(286): NCBI GI NO: 9652218 NR Description: putative DNA binding protein [Atriplex hortensis]
  misc_feature (1)..(283): NCBI GI NO: 15231039 NR Description: nuclear DNA-binding protein G2p -related
  misc_feature (1)..(283): NCBI GI NO: 13430628 NR Description: putative nuclear DNA-binding protein G2p
  misc_feature (1)..(283): NCBI GI NO: 30693537 NR Description: nuclear DNA-binding protein G2p -related
  misc_feature (1)..(283): NCBI GI NO: 34193902 NR Description: Proliferation-associated protein 1 [Danio rerio]
  misc_feature (1)..(278): NCBI GI NO: 34862215 NR Description: similar to proliferation-associated protein 1
  misc_feature (1)..(278): NCBI GI NO: 26788026 NR Description: SI:dZ150I12
  misc_feature (1)..(278): NCBI GI NO: 13632817 NR Description: Proliferation-associated protein 2G4
  misc_feature (1)..(278): NCBI GI NO: 6755100 NR Description: proliferation-associated 2G4
MVKIDMACHIDGFIAVVAHTHVIKGGPVTGRAANVLAAANTAAEVAMRLVRPGKKNKDVTEAIQKVAAAYDCKIVEGVLSHQLKQFVIDGNKVVLSVSNADTKVDDAEFEENEVYAIDIVTSTGEGKPKLLDEKQTTIYKRAVDKNYHLKMKASRFIFSEISQKFPIMPFTARALEEKRARLGLVECMNHELLQPYPVLHEKQGDLVAHIKFTVLLMPNGSDKITSHPLQQLEPSKSIEGDAEIKAWLALGTKSKKKGGGKKKKGKKGDAAEVAEPMEVSKDAPSQE

SEQ ID NO: 14319 - protein, 282 aa, Triticum aestivum
  peptide (1)..(282): Ceres Seq. ID no. 13591227
  misc_feature (1)..(278): NCBI GI NO: 7447216 NR Description: probable DNA-binding protein GBP16 - rice
  misc_feature (1)..(281): NCBI GI NO: 9652218 NR Description: putative DNA binding protein [Atriplex hortensis]
  misc_feature (1)..(278): NCBI GI NO: 15231039 NR Description: nuclear DNA-binding protein G2p -related
  misc_feature (1)..(278): NCBI GI NO: 13430628 NR Description: putative nuclear DNA-binding protein G2p
  misc_feature (1)..(278): NCBI GI NO: 30693537 NR Description: nuclear DNA-binding protein G2p -related
  misc_feature (1)..(278): NCBI GI NO: 34193902 NR Description: Proliferation-associated protein 1 [Danio rerio]
  misc_feature (1)..(273): NCBI GI NO: 34862215 NR Description: similar to proliferation-associated protein 1
  misc_feature (1)..(273): NCBI GI NO: 26788026 NR Description: SI:dZ150I12
  misc_feature (1)..(273): NCBI GI NO: 13632817 NR Description: Proliferation-associated protein 2G4
  misc_feature (1)..(273): NCBI GI NO: 6755100 NR Description: proliferation-associated 2G4
MACHIDGFIAVVAHTHVIKGGPVTGRAANVLAAANTAAEVAMRLVRPGKKNKDVTEAIQKVAAAYDCKIVEGVLSHQLKQFVIDGNKVVLSVSNADTKVDDAEFEENEVYAIDIVTSTGEGKPKLLDEKQTTIYKRAVDKNYHLKMKASRFIFSEISQKFPIMPFTARALEEKRARLGLVECMNHELLQPYPVLHEKQGDLVAHIKFTVLLMPNGSDKITSHPLQQLEPSKSIEGDAEIKAWLALGTKSKKKGGGKKKKGKKGDAAEVAEPMEVSKDAPSQE

SEQ ID NO: 14320 - DNA, 1209 bp, Triticum aestivum
  misc_feature (1)..(1209): Ceres Seq. ID no. 12625706
accctcgtccacactcttctcttgaaggccatcaatggcggccaagactaaggcaccagctggtactccggtcggccccgtccctttcgcggacgtcgagaccgacccaggcttggtctccccagtgccggagcagctcccggaagagcacgccgccctgccgagcgcgtccgcgttcaacggccggatgaacatccgttgctaccagggcttctggctgccggattacttcgccgccgcggccgtcgccctgcagcgccgcttcgagccctgccgcaacgacgtaatcgtcgcaagctttcccaagtccggcaccacgtggcttaacgccctggcgttcgccaccatggcacggcgggcttatccggccgccgacgccgggcatccgctgctacgcctcaacccgcaccagtgcatccctttcctggagaacctcttccggagccgcgcggaggccgccaagctcgaggcgctgccgtccccgcgcctaatgaacacgcacatgccgctcggcatgataatgccgggcgccggcgggtgcaaggtcgtctacgtgtgcagggagcccaaggacatggtcgtctcgttgtggcacttcctccagcatgtgcatccagacctggcgctggccgacgtcctcgactccgtgtgcagcggcgcggtgccgtatggacccgtctgggaccacatcctcggctactggcgcgccagcatcgcgaggccagacgccgtgctcttcttgcggtacgaggagctgctgcgcgaccccgccgggaacgtcagggatctggcgcggttcgtcgggctgccgttctccgacgaggaggaggacgccggcgtcgtccaggacatcgtcaagctctgcagcttcggtcacctcaagcccttggaagccaattcgacgggccagctggatcccctcgtcccggtgccgcgcgaggcgctgttcaggaagggcgtggccggcgactgggcgaaccacatgacgccggagatggcgcgacgcctcgacgaaatcgtcgccgacaagttccatgcgaccggcctcacttttcagtgattcgagacgactcccgtcccccatacactatcatgatttctcatgatcaagtaatgtttgtactttcgtaatcactaagcatgaataattagtggagggagtagtagactctgggcgtggctaaaaatcagtaaatttcgtttgaggtc

SEQ ID NO: 14321 - protein, 341 aa, Triticum aestivum
  peptide (1)..(341): Ceres Seq. ID no. 12625707
  misc_feature (83)..(337): Pfam Name: Pfam Description:  Sulfotransferase domain
  misc_feature (53)..(276): NCBI GI NO: 30349136 NR Description: STF-1 [Triticum monococcum]
  misc_feature (14)..(339): NCBI GI NO: 40253319 NR Description: putative flavonol 3-sulfotransferase
  misc_feature (14)..(324): NCBI GI NO: 34393650 NR Description: putative flavonol 3-sulfotransferase
  misc_feature (9)..(339): NCBI GI NO: 40253317 NR Description: putative flavonol 3-sulfotransferase
  misc_feature (14)..(338): NCBI GI NO: 35215145 NR Description: putative flavonol 3'-sulfotransferase
  misc_feature (57)..(338): NCBI GI NO: 38346451 NR Description: OSJNBa0018J19.12
  misc_feature (27)..(340): NCBI GI NO: 37531912 NR Description: putative flavonol 3-sulfotransferase
  misc_feature (57)..(339): NCBI GI NO: 34905060 NR Description: putative flavonol 4'-sulfotransferase
  misc_feature (11)..(338): NCBI GI NO: 38344441 NR Description: OSJNBa0038O10.13
  misc_feature (169)..(340): NCBI GI NO: 30683286 NR Description: sulfotransferase family [Arabidopsis thaliana]
MAAKTKAPAGTPVGPVPFADVETDPGLVSPVPEQLPEEHAALPSASAFNGRMNIRCYQGFWLPDYFAAAAVALQRRFEPCRNDVIVASFPKSGTTWLNALAFATMARRAYPAADAGHPLLRLNPHQCIPFLENLFRSRAEAAKLEALPSPRLMNTHMPLGMIMPGAGGCKVVYVCREPKDMVVSLWHFLQHVHPDLALADVLDSVCSGAVPYGPVWDHILGYWRASIARPDAVLFLRYEELLRDPAGNVRDLARFVGLPFSDEEEDAGVVQDIVKLCSFGHLKPLEANSTGQLDPLVPVPREALFRKGVAGDWANHMTPEMARRLDEIVADKFHATGLTFQ

SEQ ID NO: 14322 - protein, 290 aa, Triticum aestivum
  peptide (1)..(290): Ceres Seq. ID no. 12625708
  misc_feature (32)..(286): Pfam Name: Pfam Description:  Sulfotransferase domain
  misc_feature (2)..(225): NCBI GI NO: 30349136 NR Description: STF-1 [Triticum monococcum]
  misc_feature (1)..(288): NCBI GI NO: 40253319 NR Description: putative flavonol 3-sulfotransferase
  misc_feature (1)..(273): NCBI GI NO: 34393650 NR Description: putative flavonol 3-sulfotransferase
  misc_feature (1)..(288): NCBI GI NO: 40253317 NR Description: putative flavonol 3-sulfotransferase
  misc_feature (1)..(287): NCBI GI NO: 35215145 NR Description: putative flavonol 3'-sulfotransferase
  misc_feature (6)..(287): NCBI GI NO: 38346451 NR Description: OSJNBa0018J19.12
  misc_feature (1)..(289): NCBI GI NO: 37531912 NR Description: putative flavonol 3-sulfotransferase
  misc_feature (6)..(288): NCBI GI NO: 34905060 NR Description: putative flavonol 4'-sulfotransferase
  misc_feature (1)..(287): NCBI GI NO: 38344441 NR Description: OSJNBa0038O10.13
  misc_feature (118)..(289): NCBI GI NO: 30683286 NR Description: sulfotransferase family [Arabidopsis thaliana]
MNIRCYQGFWLPDYFAAAAVALQRRFEPCRNDVIVASFPKSGTTWLNALAFATMARRAYPAADAGHPLLRLNPHQCIPFLENLFRSRAEAAKLEALPSPRLMNTHMPLGMIMPGAGGCKVVYVCREPKDMVVSLWHFLQHVHPDLALADVLDSVCSGAVPYGPVWDHILGYWRASIARPDAVLFLRYEELLRDPAGNVRDLARFVGLPFSDEEEDAGVVQDIVKLCSFGHLKPLEANSTGQLDPLVPVPREALFRKGVAGDWANHMTPEMARRLDEIVADKFHATGLTFQ

SEQ ID NO: 14323 - protein, 237 aa, Triticum aestivum
  peptide (1)..(237): Ceres Seq. ID no. 12625709
  misc_feature (1)..(233): Pfam Name: Pfam Description:  Sulfotransferase domain
  misc_feature (1)..(172): NCBI GI NO: 30349136 NR Description: STF-1 [Triticum monococcum]
  misc_feature (1)..(235): NCBI GI NO: 40253319 NR Description: putative flavonol 3-sulfotransferase
  misc_feature (1)..(220): NCBI GI NO: 34393650 NR Description: putative flavonol 3-sulfotransferase
  misc_feature (1)..(235): NCBI GI NO: 40253317 NR Description: putative flavonol 3-sulfotransferase
  misc_feature (1)..(234): NCBI GI NO: 35215145 NR Description: putative flavonol 3'-sulfotransferase
  misc_feature (1)..(234): NCBI GI NO: 38346451 NR Description: OSJNBa0018J19.12
  misc_feature (1)..(236): NCBI GI NO: 37531912 NR Description: putative flavonol 3-sulfotransferase
  misc_feature (1)..(235): NCBI GI NO: 34905060 NR Description: putative flavonol 4'-sulfotransferase
  misc_feature (1)..(234): NCBI GI NO: 38344441 NR Description: OSJNBa0038O10.13
  misc_feature (65)..(236): NCBI GI NO: 30683286 NR Description: sulfotransferase family [Arabidopsis thaliana]
MARRAYPAADAGHPLLRLNPHQCIPFLENLFRSRAEAAKLEALPSPRLMNTHMPLGMIMPGAGGCKVVYVCREPKDMVVSLWHFLQHVHPDLALADVLDSVCSGAVPYGPVWDHILGYWRASIARPDAVLFLRYEELLRDPAGNVRDLARFVGLPFSDEEEDAGVVQDIVKLCSFGHLKPLEANSTGQLDPLVPVPREALFRKGVAGDWANHMTPEMARRLDEIVADKFHATGLTFQ

SEQ ID NO: 14324 - DNA, 953 bp, Triticum aestivum
  misc_feature (1)..(953): Ceres Seq. ID no. 13655610
catataagcatgcgacgaaaccccatcgtccattcttccctgccgccgcctcctcccttcttcagccgaagcgcccgcacgcctcgacccaagggatctcaatggcgccgacctccaagatggcgctgggcatcaagcgcgcgtcgcggtcgcacacctaccaccgccgcgggctgtgggccatcaaggccaagcacggcggagccttccccaaggccgagaagccagccgccgtcgccgagcccaagttctaccccgccgacgacgtcaagccccgcaccgccagcacccgcaagcctaagcccaccaagctcaggtcgaccatcacgcccggtacggtgctgatcctgctcgctgggaggtacatggggaagcgcgtggtgttcctcaagcagctcaagtctggcctgctcctcatctctgggcctttcaagatcaatggtgtgccagttcgccgggtgaaccaggcttatgtcattgccacatccacaaaggttgacatctctggtgttaacgtggagaagtttgatgacaagtacttcgccagggacaagaagaccagggcaaagaagactgaaggggagctgtttgagactgagaaggagaccaccaagaatctgccagaatttaaaaaagatgatcagaaggccatcgatgctgagttgatcaaagctattgaggctgtccctgaccttaagaactatcttggtgctcggttctctctcagggatggtgacaagccccatgagatgaccttctaagttgctacaagttcctgagttttggatgtgttttgcctagattgttgctgaaatttgtaccctgttagttgacttcctatgtcagttgaagtgaccgtaagatattatgagaagatcaagagaatccttatctgctttggtggttctttttttacttatgcttaatggaacagtttgtcgtgtgttatttgt

SEQ ID NO: 14325 - protein, 252 aa, Triticum aestivum
  peptide (1)..(252): Ceres Seq. ID no. 13655611
  misc_feature (145)..(252): Pfam Name: Pfam Description:  Ribosomal protein L6e
  misc_feature (34)..(252): NCBI GI NO: 38344818 NR Description: OSJNBb0022F23.11
  misc_feature (23)..(252): NCBI GI NO: 464621 NR Description: 60S RIBOSOMAL PROTEIN L6 (YL16-LIKE)
  misc_feature (43)..(252): NCBI GI NO: 15221126 NR Description: 60S ribosomal protein L6 (RPL6C)
  misc_feature (43)..(252): NCBI GI NO: 15221798 NR Description: 60S ribosomal protein L6 (RPL6A)
  misc_feature (43)..(252): NCBI GI NO: 21593910 NR Description: 60S ribosomal protein L6, putative
  misc_feature (43)..(252): NCBI GI NO: 15221127 NR Description: 60S ribosomal protein L6 (RPL6B)
  misc_feature (25)..(252): NCBI GI NO: 7208784 NR Description: 60S ribosomal protein L6 [Cicer arietinum]
  misc_feature (81)..(252): NCBI GI NO: 6012952 NR Description: 60S ribosomal protein L6 (YL 16 like)
  misc_feature (81)..(252): NCBI GI NO: 7271018 NR Description: ribosomal protein L16 [Candida albicans]
  misc_feature (76)..(252): NCBI GI NO: 6323567 NR Description: Homology to rat L6 and human L6; Rpl6ap
YKHATKPHRPFFPAAASSLLQPKRPHASTQGISMAPTSKMALGIKRASRSHTYHRRGLWAIKAKHGGAFPKAEKPAAVAEPKFYPADDVKPRTASTRKPKPTKLRSTITPGTVLILLAGRYMGKRVVFLKQLKSGLLLISGPFKINGVPVRRVNQAYVIATSTKVDISGVNVEKFDDKYFARDKKTRAKKTEGELFETEKETTKNLPEFKKDDQKAIDAELIKAIEAVPDLKNYLGARFSLRDGDKPHEMTF

SEQ ID NO: 14326 - protein, 219 aa, Triticum aestivum
  peptide (1)..(219): Ceres Seq. ID no. 13655612
  misc_feature (112)..(219): Pfam Name: Pfam Description:  Ribosomal protein L6e
  misc_feature (1)..(219): NCBI GI NO: 38344818 NR Description: OSJNBb0022F23.11
  misc_feature (1)..(219): NCBI GI NO: 464621 NR Description: 60S RIBOSOMAL PROTEIN L6 (YL16-LIKE)
  misc_feature (10)..(219): NCBI GI NO: 15221126 NR Description: 60S ribosomal protein L6 (RPL6C)
  misc_feature (10)..(219): NCBI GI NO: 15221798 NR Description: 60S ribosomal protein L6 (RPL6A)
  misc_feature (10)..(219): NCBI GI NO: 21593910 NR Description: 60S ribosomal protein L6, putative
  misc_feature (10)..(219): NCBI GI NO: 15221127 NR Description: 60S ribosomal protein L6 (RPL6B)
  misc_feature (1)..(219): NCBI GI NO: 7208784 NR Description: 60S ribosomal protein L6 [Cicer arietinum]
  misc_feature (48)..(219): NCBI GI NO: 6012952 NR Description: 60S ribosomal protein L6 (YL 16 like)
  misc_feature (48)..(219): NCBI GI NO: 7271018 NR Description: ribosomal protein L16 [Candida albicans]
  misc_feature (43)..(219): NCBI GI NO: 6323567 NR Description: Homology to rat L6 and human L6; Rpl6ap
MAPTSKMALGIKRASRSHTYHRRGLWAIKAKHGGAFPKAEKPAAVAEPKFYPADDVKPRTASTRKPKPTKLRSTITPGTVLILLAGRYMGKRVVFLKQLKSGLLLISGPFKINGVPVRRVNQAYVIATSTKVDISGVNVEKFDDKYFARDKKTRAKKTEGELFETEKETTKNLPEFKKDDQKAIDAELIKAIEAVPDLKNYLGARFSLRDGDKPHEMTF

SEQ ID NO: 14327 - protein, 213 aa, Triticum aestivum
  peptide (1)..(213): Ceres Seq. ID no. 13655613
  misc_feature (106)..(213): Pfam Name: Pfam Description:  Ribosomal protein L6e
  misc_feature (1)..(213): NCBI GI NO: 38344818 NR Description: OSJNBb0022F23.11
  misc_feature (1)..(213): NCBI GI NO: 464621 NR Description: 60S RIBOSOMAL PROTEIN L6 (YL16-LIKE)
  misc_feature (4)..(213): NCBI GI NO: 15221126 NR Description: 60S ribosomal protein L6 (RPL6C)
  misc_feature (4)..(213): NCBI GI NO: 15221798 NR Description: 60S ribosomal protein L6 (RPL6A)
  misc_feature (4)..(213): NCBI GI NO: 21593910 NR Description: 60S ribosomal protein L6, putative
  misc_feature (4)..(213): NCBI GI NO: 15221127 NR Description: 60S ribosomal protein L6 (RPL6B)
  misc_feature (1)..(213): NCBI GI NO: 7208784 NR Description: 60S ribosomal protein L6 [Cicer arietinum]
  misc_feature (42)..(213): NCBI GI NO: 6012952 NR Description: 60S ribosomal protein L6 (YL 16 like)
  misc_feature (42)..(213): NCBI GI NO: 7271018 NR Description: ribosomal protein L16 [Candida albicans]
  misc_feature (37)..(213): NCBI GI NO: 6323567 NR Description: Homology to rat L6 and human L6; Rpl6ap
MALGIKRASRSHTYHRRGLWAIKAKHGGAFPKAEKPAAVAEPKFYPADDVKPRTASTRKPKPTKLRSTITPGTVLILLAGRYMGKRVVFLKQLKSGLLLISGPFKINGVPVRRVNQAYVIATSTKVDISGVNVEKFDDKYFARDKKTRAKKTEGELFETEKETTKNLPEFKKDDQKAIDAELIKAIEAVPDLKNYLGARFSLRDGDKPHEMTF

SEQ ID NO: 14328 - DNA, 1498 bp, Triticum aestivum
  misc_feature (1)..(1498): Ceres Seq. ID no. 15169659
cggtttcttctagccccaaagtcaagcagaggaattcctaaaaaaaaaaagtcaagcagaggaggaggagcactgaggcttctagaaacttgaggcagggaggttcggcaggaggcatgtgggggcggcactactggggcgcccggcggccgagcgacggcgccgcgggtgcggaggccggcggcggcgtggtggtgatgttcgcgtggctgtcgagtcaggagcggcacgtgcgcgcgtacgtggacctgtacgcggcccttgggtgggcgtgcctcgtctgccactccgacttcatcaccctgtttatgccggagaaggctgctgtgcttgctgaccgggtgctcacggagctcgttaaggaactgaatattagaccagtacctgttgtgtttgcatccttttcgggaggaccaaaaggttgcacatacaaggttcttcagctgatccagagaaggtgcaaagggcagctgagtttggatgactatcaacttgtacgggactgcgtatgtggacaaatatatgactcgagtcctgtagattttgtgagtgatttaggcacccgctttcttcttcacccaagtgtcctgaagatgcctgaacctccacgtgtcttatcatggatgactagaggcattgcctcgggtctagacactcttttcattggcaagtttgaagcacagcgcaaagaatattgggagacactatactcatcagtgcatgttggcccaatactcatattctgttcagaggatgatgaacttgctccatgttcggccgttcaaaattttggacggcgtctgctggagctgggtggtgatgtgaatttagttaaatggcacagttctccacatgtaggacattacaagcatcacactgaggaataccgagctgcagtgactgagctgctcatgaaggcttcagcgctttacacaagcagaaaacgactcaatgactacagtgtcggcacgagtgaggacagtgacacaccttattcgtctcgcaatctacataagactgctgtaagctccagtgataggctagggagggtttcagttgatccagccaatcatttcttcttaccgagttccatggagtaccatgaaagcaggagtgaagtgctaaaacccgagttgttcaacatgccgagtgttgaaagcgcgaagaaccctgatggcgtgttggggacgatgctctatgatgcatgtgtcccaaagaacgtggaaggctgggacttcaagcttgcatcaatagatggacagcgtatgcattttactgcccgtcagcatggtacttccaatccaacaaaatgtatacgccgctcaagattgtaatgattttgactcaacatctaagtgcattccagcagactgctctatactgccagagtatacttgtttcaggagaatgttattgtgttgaccttttctggaaattttagagtatactgccagagtatactaatgcttttttaaagaaaaaaaaaaaaaaaaaaaag

SEQ ID NO: 14329 - protein, 405 aa, Triticum aestivum
  peptide (1)..(405): Ceres Seq. ID no. 15169660
  misc_feature (98)..(372): Pfam Name: DUF829 Pfam Description: Eukaryotic protein of unknown function
  misc_feature (1)..(405): NCBI GI NO: 15241450 NR Description: expressed protein [Arabidopsis thaliana]
  misc_feature (1)..(405): NCBI GI NO: 18397898 NR Description: expressed protein [Arabidopsis thaliana]
  misc_feature (1)..(382): NCBI GI NO: 25411656 NR Description: hypothetical protein At2g15690
  misc_feature (22)..(257): NCBI GI NO: 24659033 NR Description: CG3082-PD [Drosophila melanogaster]
  misc_feature (22)..(257): NCBI GI NO: 27374257 NR Description: l(2)k09913-PA [Drosophila erecta]
  misc_feature (22)..(257): NCBI GI NO: 19922796 NR Description: CG3082-PC [Drosophila melanogaster]
MWGRHYWGARRPSDGAAGAEAGGGVVVMFAWLSSQERHVRAYVDLYAALGWACLVCHSDFITLFMPEKAAVLADRVLTELVKELNIRPVPVVFASFSGGPKGCTYKVLQLIQRRCKGQLSLDDYQLVRDCVCGQIYDSSPVDFVSDLGTRFLLHPSVLKMPEPPRVLSWMTRGIASGLDTLFIGKFEAQRKEYWETLYSSVHVGPILIFCSEDDELAPCSAVQNFGRRLLELGGDVNLVKWHSSPHVGHYKHHTEEYRAAVTELLMKASALYTSRKRLNDYSVGTSEDSDTPYSSRNLHKTAVSSSDRLGRVSVDPANHFFLPSSMEYHESRSEVLKPELFNMPSVESAKNPDGVLGTMLYDACVPKNVEGWDFKLASIDGQRMHFTARQHGTSNPTKCIRRSRL

SEQ ID NO: 14330 - protein, 378 aa, Triticum aestivum
  peptide (1)..(378): Ceres Seq. ID no. 15169661
  misc_feature (71)..(345): Pfam Name: DUF829 Pfam Description: Eukaryotic protein of unknown function
  misc_feature (1)..(378): NCBI GI NO: 15241450 NR Description: expressed protein [Arabidopsis thaliana]
  misc_feature (1)..(378): NCBI GI NO: 18397898 NR Description: expressed protein [Arabidopsis thaliana]
  misc_feature (1)..(355): NCBI GI NO: 25411656 NR Description: hypothetical protein At2g15690
  misc_feature (1)..(230): NCBI GI NO: 24659033 NR Description: CG3082-PD [Drosophila melanogaster]
  misc_feature (1)..(230): NCBI GI NO: 27374257 NR Description: l(2)k09913-PA [Drosophila erecta]
  misc_feature (1)..(230): NCBI GI NO: 19922796 NR Description: CG3082-PC [Drosophila melanogaster]
MFAWLSSQERHVRAYVDLYAALGWACLVCHSDFITLFMPEKAAVLADRVLTELVKELNIRPVPVVFASFSGGPKGCTYKVLQLIQRRCKGQLSLDDYQLVRDCVCGQIYDSSPVDFVSDLGTRFLLHPSVLKMPEPPRVLSWMTRGIASGLDTLFIGKFEAQRKEYWETLYSSVHVGPILIFCSEDDELAPCSAVQNFGRRLLELGGDVNLVKWHSSPHVGHYKHHTEEYRAAVTELLMKASALYTSRKRLNDYSVGTSEDSDTPYSSRNLHKTAVSSSDRLGRVSVDPANHFFLPSSMEYHESRSEVLKPELFNMPSVESAKNPDGVLGTMLYDACVPKNVEGWDFKLASIDGQRMHFTARQHGTSNPTKCIRRSRL

SEQ ID NO: 14331 - protein, 341 aa, Triticum aestivum; identical to SEQ ID NO: 14193
  peptide (1)..(341): Ceres Seq. ID no. 15169662
  misc_feature (34)..(308): Pfam Name: DUF829 Pfam Description: Eukaryotic protein of unknown function
  misc_feature (1)..(341): NCBI GI NO: 15241450 NR Description: expressed protein [Arabidopsis thaliana]
  misc_feature (1)..(341): NCBI GI NO: 18397898 NR Description: expressed protein [Arabidopsis thaliana]
  misc_feature (1)..(318): NCBI GI NO: 25411656 NR Description: hypothetical protein At2g15690
  misc_feature (1)..(193): NCBI GI NO: 24659033 NR Description: CG3082-PD [Drosophila melanogaster]
  misc_feature (1)..(193): NCBI GI NO: 27374257 NR Description: l(2)k09913-PA [Drosophila erecta]
  misc_feature (1)..(193): NCBI GI NO: 19922796 NR Description: CG3082-PC [Drosophila melanogaster]

SEQ ID NO: 14332 - DNA, 1588 bp, Triticum aestivum
  misc_feature (1)..(1588): Ceres Seq. ID no. 15169651
accgaaacggctcactgggaaaaggggagaaaaaacagagctcaataacttcgaggaggaggagaggcgtggcgggggaaggaagggagggagggagctcgtcgtcgtcggcggcggatggcggtggagtaccgctgctgcgggggccccttcttcgagcacatcgccatcatcgtggtgctggtgctcttcgcggggctcatgtccgggctcaccctcggcctcatgtccctcagcctcgtcgacctcgaggtcctcgccaagtccggcaccgacaaggaccgcaagtacgcagctaagatattgcccgtcgtgaaaaaccagcaccttctgctatgcactcttctgatctgcaacgctgcagctatggaggcactgccaatcttccttgatagcctggtgactgcttggggtgctgttttgatctctgtgacattgatcctgctgttcggcgagatcataccacaatctatctgctcacggtatgggctggcaattggtgcctcggttgctccgttagtccgtgttcttgtttggatttgtttccctgttgcatatccaatcgccaagctgctggaccatgtgcttggtcacggtaaagcggcacttttccgcagagctgagctaaaaacacttgtgacactgcatggaaatgaggctggtaaaggtggagagttaacccatgatgaaacaactataatagctggagctcttgagctcagtgaaaagaaagctaaagatgctatgacacctctttgtgatacatttgtgattgatataaatgcaaagctcgacaggaaactaatgcaagaggtcattgagaaaggtcatagcagagtgccagtttattatgaaaaggatacaaacattattggattgatattggtgaagaatttattatccattaaccctgatgatgaaattcccataaagagtgtaactatccgcaaaattcctcgcgtttcagaagacatgcccctgtatgacatcctaaatgaattccagaagggccacagccacatggcggttgtcataaggcaaaacattccaaactacccagctaagcagcccagcatcgatggtggatctcttgaggtcgccatcgccattgatgacaagcagggtgagaaggttgcgaagagtctcactccgctgtggaggtggaagagctaccccaacacccagaactccaacacggggagcaggagggggaaatggtccaaagaccagtcggacgtcctccaagtgcacgaagagccgttgcccacgctgagcgaggatgaagaagccgtcggcatcataaccatggaggatgtcattgaagaactgctgcaggaggagatctacgacgaaaccgacgtacatgttgaggagcaataacacattgcttgctagggtttacgcacatggtaaacttgccgttttggctggagccggaagcaaagttgcgtgccatgccagtttcttttctttctttgtgccgaggggaagaagaaacaatatatgtatgtatgataacgtaacgttgtactgctacgtgtgaatagacagagaccgcaaatattagttcgtctgaagtgttgatacc

SEQ ID NO: 14333 - protein, 420 aa, Triticum aestivum
  peptide (1)..(420): Ceres Seq. ID no. 15169652
  misc_feature (14)..(191): Pfam Name: Pfam Description:  Domain of unknown function DUF21
  misc_feature (1)..(420): NCBI GI NO: 40538933 NR Description: expressed protein
  misc_feature (1)..(419): NCBI GI NO: 30679136 NR Description: CBS domain containing protein
  misc_feature (1)..(419): NCBI GI NO: 22329131 NR Description: CBS domain containing protein
  misc_feature (29)..(419): NCBI GI NO: 7487085 NR Description: hypothetical protein T16L1
  misc_feature (180)..(406): NCBI GI NO: 25411569 NR Description: hypothetical protein At2g14520
  misc_feature (1)..(151): NCBI GI NO: 25411569 NR Description: hypothetical protein At2g14520
  misc_feature (1)..(257): NCBI GI NO: 12039276 NR Description: putative ancient conserved domain protein
  misc_feature (1)..(307): NCBI GI NO: 22330087 NR Description: expressed protein [Arabidopsis thaliana]
  misc_feature (374)..(417): NCBI GI NO: 22330087 NR Description: expressed protein [Arabidopsis thaliana]
  misc_feature (7)..(322): NCBI GI NO: 15237264 NR Description: hypothetical protein [Arabidopsis thaliana]
MAVEYRCCGGPFFEHIAIIVVLVLFAGLMSGLTLGLMSLSLVDLEVLAKSGTDKDRKYAAKILPVVKNQHLLLCTLLICNAAAMEALPIFLDSLVTAWGAVLISVTLILLFGEIIPQSICSRYGLAIGASVAPLVRVLVWICFPVAYPIAKLLDHVLGHGKAALFRRAELKTLVTLHGNEAGKGGELTHDETTIIAGALELSEKKAKDAMTPLCDTFVIDINAKLDRKLMQEVIEKGHSRVPVYYEKDTNIIGLILVKNLLSINPDDEIPIKSVTIRKIPRVSEDMPLYDILNEFQKGHSHMAVVIRQNIPNYPAKQPSIDGGSLEVAIAIDDKQGEKVAKSLTPLWRWKSYPNTQNSNTGSRRGKWSKDQSDVLQVHEEPLPTLSEDEEAVGIITMEDVIEELLQEEIYDETDVHVEEQ

SEQ ID NO: 14334 - protein, 392 aa, Triticum aestivum
  peptide (1)..(392): Ceres Seq. ID no. 15169653
  misc_feature (1)..(163): Pfam Name: Pfam Description:  Domain of unknown function DUF21
  misc_feature (1)..(392): NCBI GI NO: 40538933 NR Description: expressed protein
  misc_feature (1)..(391): NCBI GI NO: 30679136 NR Description: CBS domain containing protein
  misc_feature (1)..(391): NCBI GI NO: 22329131 NR Description: CBS domain containing protein
  misc_feature (1)..(391): NCBI GI NO: 7487085 NR Description: hypothetical protein T16L1
  misc_feature (152)..(378): NCBI GI NO: 25411569 NR Description: hypothetical protein At2g14520
  misc_feature (1)..(123): NCBI GI NO: 25411569 NR Description: hypothetical protein At2g14520
  misc_feature (1)..(229): NCBI GI NO: 12039276 NR Description: putative ancient conserved domain protein
  misc_feature (1)..(279): NCBI GI NO: 22330087 NR Description: expressed protein [Arabidopsis thaliana]
  misc_feature (346)..(389): NCBI GI NO: 22330087 NR Description: expressed protein [Arabidopsis thaliana]
  misc_feature (1)..(294): NCBI GI NO: 15237264 NR Description: hypothetical protein [Arabidopsis thaliana]
MSGLTLGLMSLSLVDLEVLAKSGTDKDRKYAAKILPVVKNQHLLLCTLLICNAAAMEALPIFLDSLVTAWGAVLISVTLILLFGEIIPQSICSRYGLAIGASVAPLVRVLVWICFPVAYPIAKLLDHVLGHGKAALFRRAELKTLVTLHGNEAGKGGELTHDETTIIAGALELSEKKAKDAMTPLCDTFVIDINAKLDRKLMQEVIEKGHSRVPVYYEKDTNIIGLILVKNLLSINPDDEIPIKSVTIRKIPRVSEDMPLYDILNEFQKGHSHMAVVIRQNIPNYPAKQPSIDGGSLEVAIAIDDKQGEKVAKSLTPLWRWKSYPNTQNSNTGSRRGKWSKDQSDVLQVHEEPLPTLSEDEEAVGIITMEDVIEELLQEEIYDETDVHVEEQ

SEQ ID NO: 14335 - protein, 384 aa, Triticum aestivum
  peptide (1)..(384): Ceres Seq. ID no. 15169654
  misc_feature (1)..(155): Pfam Name: Pfam Description:  Domain of unknown function DUF21
  misc_feature (1)..(384): NCBI GI NO: 40538933 NR Description: expressed protein
  misc_feature (1)..(383): NCBI GI NO: 30679136 NR Description: CBS domain containing protein
  misc_feature (1)..(383): NCBI GI NO: 22329131 NR Description: CBS domain containing protein
  misc_feature (1)..(383): NCBI GI NO: 7487085 NR Description: hypothetical protein T16L1
  misc_feature (144)..(370): NCBI GI NO: 25411569 NR Description: hypothetical protein At2g14520
  misc_feature (1)..(115): NCBI GI NO: 25411569 NR Description: hypothetical protein At2g14520
  misc_feature (1)..(221): NCBI GI NO: 12039276 NR Description: putative ancient conserved domain protein
  misc_feature (1)..(271): NCBI GI NO: 22330087 NR Description: expressed protein [Arabidopsis thaliana]
  misc_feature (338)..(381): NCBI GI NO: 22330087 NR Description: expressed protein [Arabidopsis thaliana]
  misc_feature (1)..(286): NCBI GI NO: 15237264 NR Description: hypothetical protein [Arabidopsis thaliana]
MSLSLVDLEVLAKSGTDKDRKYAAKILPVVKNQHLLLCTLLICNAAAMEALPIFLDSLVTAWGAVLISVTLILLFGEIIPQSICSRYGLAIGASVAPLVRVLVWICFPVAYPIAKLLDHVLGHGKAALFRRAELKTLVTLHGNEAGKGGELTHDETTIIAGALELSEKKAKDAMTPLCDTFVIDINAKLDRKLMQEVIEKGHSRVPVYYEKDTNIIGLILVKNLLSINPDDEIPIKSVTIRKIPRVSEDMPLYDILNEFQKGHSHMAVVIRQNIPNYPAKQPSIDGGSLEVAIAIDDKQGEKVAKSLTPLWRWKSYPNTQNSNTGSRRGKWSKDQSDVLQVHEEPLPTLSEDEEAVGIITMEDVIEELLQEEIYDETDVHVEEQ

SEQ ID NO: 14336 - DNA, 1060 bp, Triticum aestivum
  misc_feature (1)..(1060): Ceres Seq. ID no. 12625713
atttcaggtctcctcctcaactcaagagatctgagctgagagatggctcttcttcctcctctgcttctgtcctgcatcttggtgctggctctcccagggccggcggtggtgacggtagggggcgtcacgttccacgtaactaacaagtgcccgttcccggtgtggccggcggtcgcgccaaacgccggccaccccgtgctcgccgcgggcggcttcttcctccctccgggacagtcgaagcgcgtcggggcaccggccacctggaacggccgcctctggggccgcaccggctgcaccttcgcgggcaccgacgccaacgccgccagctgcctcaccggcgactgcgacggacgcctcacctgcaacgggtccgtcggcgcccctcccgccaccctcgtcgaggtgaacctgcacgcggaccagagcaaggggagctcctacgacgtgagcgtggtggacgggtacaacctcccggtggccgtgtggaccaggccggcgaaccgcagcggcgactgcttcatcgccgggtgcgccaagaacgtgaacgcggtgtgcccgccggagctgcaggtcacgacgagcggcggcgcgggcaagaaggcgacggtggtggcgtgcaggagcgcgtgcctggccttcggcctggacgccttctgctgccgcggcgcgtacggcaccgcggagacgtgccggggcagcgtctactcgcggctcttcagggacgcctgcccggcctactacagctacgcctacgacgtggccgccgccacggcgcgctgctacgcgcaggagtacgtggtcaccttctgcccgtccagatggggagatcgtgtggcccagggttgagcagtgggcagcccaggactgtgctacgtatgtatttatatgtacttttagacaccgtatgtattttatacatgaggtgtgtaatattttgtgttgacataacacatgtactatttccatgcaaaaaaatacatgtactatttatcctgcaaaaaagtaaataatacatgtactattttcccgcaaaaaaataatacatgtactatttggcggg

SEQ ID NO: 14337 - protein, 267 aa, Triticum aestivum
  peptide (1)..(267): Ceres Seq. ID no. 12625714
  misc_feature (34)..(257): Pfam Name: Pfam Description:  Thaumatin family
  misc_feature (9)..(266): NCBI GI NO: 37534308 NR Description: hypothetical protein
  misc_feature (23)..(261): NCBI GI NO: 15242552 NR Description: thaumatin-like protein; protein id: At5g40020.1
  misc_feature (29)..(260): NCBI GI NO: 15238593 NR Description: thaumatin-like protein; protein id: At5g24620.1
  misc_feature (12)..(256): NCBI GI NO: 34905146 NR Description: putative pathogenesis-related protein
  misc_feature (14)..(258): NCBI GI NO: 6273383 NR Description: SCUTL1 [Vitis vinifera]
  misc_feature (29)..(258): NCBI GI NO: 37531042 NR Description: putative thaumatin-like protein
  misc_feature (1)..(258): NCBI GI NO: 4105697 NR Description: thaumatin-like protein [Arabidopsis thaliana]
  misc_feature (34)..(257): NCBI GI NO: 2129751 NR Description: thaumatin-like protein - Arabidopsis thaliana
  misc_feature (34)..(257): NCBI GI NO: 15221033 NR Description: pathogenesis-related group 5 protein, putative
  misc_feature (1)..(258): NCBI GI NO: 15222875 NR Description: thaumatin, putative; protein id: At1g75800
MALLPPLLLSCILVLALPGPAVVTVGGVTFHVTNKCPFPVWPAVAPNAGHPVLAAGGFFLPPGQSKRVGAPATWNGRLWGRTGCTFAGTDANAASCLTGDCDGRLTCNGSVGAPPATLVEVNLHADQSKGSSYDVSVVDGYNLPVAVWTRPANRSGDCFIAGCAKNVNAVCPPELQVTTSGGAGKKATVVACRSACLAFGLDAFCCRGAYGTAETCRGSVYSRLFRDACPAYYSYAYDVAAATARCYAQEYVVTFCPSRWGDRVAQG

SEQ ID NO: 14338 - DNA, 1350 bp, Triticum aestivum
  misc_feature (1)..(1350): Ceres Seq. ID no. 14302240
gcaacccacacgcccctcccatcccctcttgtactactaggtacaagaagaagctgagctacagcaatggcgcccagagcagctgcggccgtggccgtcgtggccttggtctgcgcagtgcagtcgtccctctcaggggcagccgtcccgggtctgtcccctggcttctacaagacgacctgcccagggctggagcaaatcgtgaacgcccaagtgacggcgaccttcaacaaagaccaaggtgtcgctcccgccctcctgcgcgtcctcttccacgactgctttacgcagggctgcgacgcgtcggtgctcatcaaaggccgcggcaccgagcagatccccggcggagccaacgggactctccgccgcgtggctctggacctcatcgatcgcatccaccgcgaggcccaagctgcctgcggtcgggtggtctcatgcgccgacgttaccgtgctcgctacccgcgacgcgctgttcaaggccggcggtccccgtttcaacgtcgacctgggccggcttgactcgttcgccccggcgccagatagggttaaggacctgccctcgcccttcgacggcgcggacaggcacatcgaggccttcaaggcccgcaaactcagcgccgatgacctggtttccctctccggcgcgcacaccttcggtgtggcccactgcggggtcatcccaccccggggcacccattccatggatccccagctcgccaagcagctacaggagaaatgcaccaaacccacggcaacaaccacgcaagacctcgacgtcctcacgccgcacgtcttcgacaacaagtactacgtgggcctgacccagaagaaggggatgttcctgtccgaccagtcgctcatcgaccacccgctcaccaagaacctcgccctcgccttctccaagaaccagacagccttcttcatcgagttcggcaagtcgatgaccaagatgaccgagatgggtgtgatcaccagcaagctgcagggcgaggtccgggccgactgcaccgtcgcagggaagcccccccgcatcgaggccgccaccgccgccgaccaggggttcacggccgacatgtaagacatgttccatgcaacgtagcgttcctcagctaaccgtgtccgtgcgtatacgcacgcgaacgcgcggtggcttatgttggtgtgtgcgtcttgtgcttgtgctgcctagctagtactactcctagttagttaataatgagcggtcggttcacttgcttcctagcataggattgatcgaggttcctagttttgggacacccttgtaagatcttcgtcatgtctttttcagatttccaacatccgtaatgtcatattttcatttcaaggt

SEQ ID NO: 14339 - protein, 337 aa, Triticum aestivum
  peptide (1)..(337): Ceres Seq. ID no. 14302241
  misc_feature (46)..(281): Pfam Name: Pfam Description:  Peroxidase
  misc_feature (1)..(337): NCBI GI NO: 7433077 NR Description: probable peroxidase (EC 1
  misc_feature (16)..(336): NCBI GI NO: 38345506 NR Description: OSJNBa0039K24.4
  misc_feature (16)..(319): NCBI GI NO: 7433070 NR Description: probable peroxidase (EC 1.11.1.7), cationic - rice
  misc_feature (9)..(336): NCBI GI NO: 7433075 NR Description: probable peroxidase (EC 1
  misc_feature (16)..(336): NCBI GI NO: 5777629 NR Description: CAA303717.1 protein [Oryza sativa]
  misc_feature (7)..(316): NCBI GI NO: 5002238 NR Description: peroxidase [Glycine max]
  misc_feature (27)..(331): NCBI GI NO: 7433081 NR Description: probable peroxidase (EC 1
  misc_feature (2)..(327): NCBI GI NO: 38345508 NR Description: OSJNBa0039K24.10
  misc_feature (1)..(316): NCBI GI NO: 1389835 NR Description: peroxidase [Linum usitatissimum]
  misc_feature (2)..(335): NCBI GI NO: 38345511 NR Description: OSJNBa0039K24.14
MAPRAAAAVAVVALVCAVQSSLSGAAVPGLSPGFYKTTCPGLEQIVNAQVTATFNKDQGVAPALLRVLFHDCFTQGCDASVLIKGRGTEQIPGGANGTLRRVALDLIDRIHREAQAACGRVVSCADVTVLATRDALFKAGGPRFNVDLGRLDSFAPAPDRVKDLPSPFDGADRHIEAFKARKLSADDLVSLSGAHTFGVAHCGVIPPRGTHSMDPQLAKQLQEKCTKPTATTTQDLDVLTPHVFDNKYYVGLTQKKGMFLSDQSLIDHPLTKNLALAFSKNQTAFFIEFGKSMTKMTEMGVITSKLQGEVRADCTVAGKPPRIEAATAADQGFTADM

SEQ ID NO: 14340 - protein, 172 aa, Triticum aestivum
  peptide (1)..(172): Ceres Seq. ID no. 14302242
NPHAPPIPSCTTRYKKKLSYSNGAQSSCGRGRRGLGLRSAVVPLRGSRPGSVPWLLQDDLPRAGANRERPSDGDLQQRPRCRSRPPARPLPRLLYAGLRRVGAHQRPRHRADPRRSQRDSPPRGSGPHRSHPPRGPSCLRSGGLMRRRYRARYPRRAVQGRRSPFQRRPGPA

SEQ ID NO: 14341 - DNA, 1239 bp, Triticum aestivum
  misc_feature (1)..(1239): Ceres Seq. ID no. 13597120
cattacctagaacatcctaatcgaaaaaaaatttacagttttcaccaagatgaaattgcacaaggcatctatatcccctcctcactctcctccgctggccgccaacgccgccgcataaccaagtcaatcttcccccacccaaccccccgcgcagcctcgccgtcggcatgggcgaggagaggacggaggcgtggtggggccggcgcgcgtgggcgctgctgtcggccgtccgcgcgcgggcgccgctggtgcagtgcatcaccaaccccgcctcccaattccggatggaggcctgcctcgagctcctcgcgctcccccccgccgtcgtcagggggaacgcgtccgagatcctcgccctcgccgcccgctcagacagctcccccaccttcaagggtgtggacagttcacatgactcaggggaggtcctgcaagccgcgaaagcattggcacggtccagcggcacagttgtcgcagtatctggagctgttgatttcatcacggatggcgagcaggtcatcagtgctagcaatggtgtggcaatgatgcagaagatcacagcgacagggtgtgctgtgactgctcttatagcggcatttgtcggggcggatccttccgatgctctggctgcagcagcatgtgcgctcgccatctttggactcgctggagagatagggatggagtcagcaaaaggacctgcctctctcaggatgcatctcattgatgctctctacggtctcgacgagcagaccgtcacatctggagtaaaaattgcgctgctgccgtaatgcatgtgtgccgtggctatcagtgctgtaggagatacagagtctggagtaatctgcaggatcattttgcctccttggtgcttggaaaaccgtgaagcagatcgtgtcagattggctgtcagatcactcatcaataatccggtgaccatcccggctgtagtaagtacgtacatagttgtgaattgtgatgtcacacagagaatgatgttcataaaataagccagtcgaaataaggtgtttgtgcttcaatggccttgagatgatcgaacggctattctgttcaaacactttgatccccctatgcctattatcacgggcggcgctaggggtattcttgggtcttcatgtgaatacccatgatttttacaaaacagtgttgattttggcaaaacagtgacaattttcaaaaaacaacaataattttggcaaaatgaatacacatgaatacccggtt

SEQ ID NO: 14342 - protein, 205 aa, Triticum aestivum
  peptide (1)..(205): Ceres Seq. ID no. 13597121
  misc_feature (1)..(193): Pfam Name: Pfam Description:  Hydroxyethylthiazole kinase family
  misc_feature (1)..(203): NCBI GI NO: 34915114 NR Description: putative hydoxyethylthiazole kinase
  misc_feature (1)..(204): NCBI GI NO: 15229565 NR Description: hydoxyethylthiazole kinase -related
  misc_feature (1)..(201): NCBI GI NO: 28899986 NR Description: putative hydroxyethylthiazole kinase
  misc_feature (16)..(197): NCBI GI NO: 16761089 NR Description: hydroxyethylthiazole kinase
  misc_feature (13)..(193): NCBI GI NO: 24113480 NR Description: hydoxyethylthiazole kinase
  misc_feature (19)..(187): NCBI GI NO: 6683572 NR Description: OrfG
  misc_feature (19)..(187): NCBI GI NO: 24216064 NR Description: hydroxyethylthiazole kinase
  misc_feature (16)..(197): NCBI GI NO: 16765476 NR Description: hydoxyethylthiazole kinase (THZ kinase)
  misc_feature (13)..(193): NCBI GI NO: 16130042 NR Description: hydoxyethylthiazole kinase [Escherichia coli K12]
  misc_feature (16)..(193): NCBI GI NO: 26248479 NR Description: Hydroxyethylthiazole kinase
MGEERTEAWWGRRAWALLSAVRARAPLVQCITNPASQFRMEACLELLALPPAVVRGNASEILALAARSDSSPTFKGVDSSHDSGEVLQAAKALARSSGTVVAVSGAVDFITDGEQVISASNGVAMMQKITATGCAVTALIAAFVGADPSDALAAAACALAIFGLAGEIGMESAKGPASLRMHLIDALYGLDEQTVTSGVKIALLP

SEQ ID NO: 14343 - protein, 180 aa, Triticum aestivum
  peptide (1)..(180): Ceres Seq. ID no. 13597122
HYLEHPNRKKIYSFHQDEIAQGIYIPSSLSSAGRQRRRITKSIFPHPTPRAASPSAWARRGRRRGGAGARGRCCRPSARGRRWCSASPTPPPNSGWRPASSSSRSPPPSSGGTRPRSSPSPPAQTAPPPSRVWTVHMTQGRSCKPRKHWHGPAAQLSQYLELLISSRMASRSSVLAMVWQ

SEQ ID NO: 14344 - protein, 166 aa, Triticum aestivum
  peptide (1)..(166): Ceres Seq. ID no. 13597123
  misc_feature (1)..(154): Pfam Name: Pfam Description:  Hydroxyethylthiazole kinase family
  misc_feature (1)..(164): NCBI GI NO: 34915114 NR Description: putative hydoxyethylthiazole kinase
  misc_feature (1)..(165): NCBI GI NO: 15229565 NR Description: hydoxyethylthiazole kinase -related
  misc_feature (1)..(162): NCBI GI NO: 28899986 NR Description: putative hydroxyethylthiazole kinase
  misc_feature (1)..(158): NCBI GI NO: 16761089 NR Description: hydroxyethylthiazole kinase
  misc_feature (1)..(154): NCBI GI NO: 24113480 NR Description: hydoxyethylthiazole kinase
  misc_feature (1)..(148): NCBI GI NO: 6683572 NR Description: OrfG
  misc_feature (1)..(148): NCBI GI NO: 24216064 NR Description: hydroxyethylthiazole kinase
  misc_feature (1)..(158): NCBI GI NO: 16765476 NR Description: hydoxyethylthiazole kinase (THZ kinase)
  misc_feature (1)..(154): NCBI GI NO: 16130042 NR Description: hydoxyethylthiazole kinase [Escherichia coli K12]
  misc_feature (1)..(154): NCBI GI NO: 26248479 NR Description: Hydroxyethylthiazole kinase
MEACLELLALPPAVVRGNASEILALAARSDSSPTFKGVDSSHDSGEVLQAAKALARSSGTVVAVSGAVDFITDGEQVISASNGVAMMQKITATGCAVTALIAAFVGADPSDALAAAACALAIFGLAGEIGMESAKGPASLRMHLIDALYGLDEQTVTSGVKIALLP

SEQ ID NO: 14345 - DNA, 1520 bp, Triticum aestivum
  misc_feature (1)..(1520): Ceres Seq. ID no. 12625474
cggtcgatcacacatttcctccgcccacctacccatcccgtccgccggccggcctcgaaccttccaagttaagcagctagctagctagctagcacggcggcgaggaatggagcgtgtctcgccgtggctgctgctgctggtacttctggtggccgcgtcagggccgggtgcacgcgccgatccgcaggtgccgtgctacttcgtgttcggggactcgctggtggacaacgggaacaacaacgacatcgcgtcgctggcgcgggccaactacccgccctacggcatcgacttccccggcggagccaccgggcgcttcagcaacggcctcaccaccgtcgacgccatctctcggcttctgggcttcgacgactacatcccagcgtacgcgggcgcaaacaatgatcaactcctctccggcgtcaacttcgcctcagctgcggccggaatcagagacgagaccggccagcaactgggccagcgcataagcttcggcgggcagctccagaactaccaggcggcggtgcagcagctggtgagcatcctgggggacgaggactccgcggcgaaccacctgagccagtgcatcttcacggtgggcatgggcagcaacgactacctcaacaactacttcatgcccgccgtctacgccaccagccggcagtacaccccggagcagtacgccgacgtgctcgtcagccagtacacgcagcagctcaggatcctgtacaacaacggggcgaggaaggtggcgctgatgggggtggggcaggtggggtgcagcccgaacgagctggcgcagcagagctccgacggggtcacctgcgtggcgcggatcaacggcgccatcgagatcttcaaccagaagctggtagagctggtggaccagttcaacacgctgccgggggcgcacttcacctacatcaacgcctacgggatcttccaggacatcatcaggtcgccgggagccaacggcctgacggtgctggacaaggggtgctgcggggtggggaggaacaacgggcaggtgacgtgcctgcccttccagacgccgtgcgccaacaggaacgagtacctcttctgggacgccttccacccaacggaggccgccaacattctcgtcgggaggcgggcctacagcgccgcccagccctccgacgtccaccccgtcgacctgcagacgcttgcgcgcctctagttatgcaacaacctgcttttccaaagagaaaaagaagttatacaggtcgcatgcatcatcagcatcagaaccatatgtgatggctatattttgttggggtgtgtggagtggtccgtgggaatgaaaggtgagtgttttgttacttcagtgcactgcatacgacaagcaagatgtatgtatgtgtgcatctgaacaacgtacgtacttggaaggaggagtatatgctatagttacattttttcggttttgttattgtgaagattcatccatcattgtgcttcgttgtgaaacagcacagttccaagaaaactatcattgtttttgc

SEQ ID NO: 14346 - protein, 362 aa, Triticum aestivum
  peptide (1)..(362): Ceres Seq. ID no. 12625475
  misc_feature (31)..(342): Pfam Name: Pfam Description:  GDSL-like Lipase/Acylhydrolase
  misc_feature (1)..(362): NCBI GI NO: 34909504 NR Description: putative GDSL-motif lipase/hydrolase-like protein
  misc_feature (9)..(360): NCBI GI NO: 34910808 NR Description: GDSL-motif lipase/hydrolase-like protein
  misc_feature (1)..(362): NCBI GI NO: 15242458 NR Description: GDSL-motif lipase/hydrolase-like protein
  misc_feature (1)..(362): NCBI GI NO: 21553940 NR Description: GDSL-motif lipase/hydrolase-like protein
  misc_feature (1)..(362): NCBI GI NO: 7485419 NR Description: hypothetical protein F13C5
  misc_feature (1)..(362): NCBI GI NO: 18415211 NR Description: Expressed protein; protein id: At4g18970
  misc_feature (1)..(362): NCBI GI NO: 21618199 NR Description: GDSL-motif lipase/hydrolase-like protein
  misc_feature (4)..(362): NCBI GI NO: 15220512 NR Description: lipase/hydrolase, putative; protein id:At1g29660
  misc_feature (4)..(362): NCBI GI NO: 21594055 NR Description: lipase/hydrolase, putative [Arabidopsis thaliana]
  misc_feature (4)..(362): NCBI GI NO: 21592417 NR Description: lipase/hydrolase, putative [Arabidopsis thaliana]
MERVSPWLLLLVLLVAASGPGARADPQVPCYFVFGDSLVDNGNNNDIASLARANYPPYGIDFPGGATGRFSNGLTTVDAISRLLGFDDYIPAYAGANNDQLLSGVNFASAAAGIRDETGQQLGQRISFGGQLQNYQAAVQQLVSILGDEDSAANHLSQCIFTVGMGSNDYLNNYFMPAVYATSRQYTPEQYADVLVSQYTQQLRILYNNGARKVALMGVGQVGCSPNELAQQSSDGVTCVARINGAIEIFNQKLVELVDQFNTLPGAHFTYINAYGIFQDIIRSPGANGLTVLDKGCCGVGRNNGQVTCLPFQTPCANRNEYLFWDAFHPTEAANILVGRRAYSAAQPSDVHPVDLQTLARL

SEQ ID NO: 14347 - protein, 198 aa, Triticum aestivum
  peptide (1)..(198): Ceres Seq. ID no. 12625476
  misc_feature (1)..(178): Pfam Name: Pfam Description:  GDSL-like Lipase/Acylhydrolase
  misc_feature (1)..(198): NCBI GI NO: 34909504 NR Description: putative GDSL-motif lipase/hydrolase-like protein
  misc_feature (1)..(196): NCBI GI NO: 34910808 NR Description: GDSL-motif lipase/hydrolase-like protein
  misc_feature (1)..(198): NCBI GI NO: 15242458 NR Description: GDSL-motif lipase/hydrolase-like protein
  misc_feature (1)..(198): NCBI GI NO: 21553940 NR Description: GDSL-motif lipase/hydrolase-like protein
  misc_feature (1)..(198): NCBI GI NO: 7485419 NR Description: hypothetical protein F13C5
  misc_feature (1)..(198): NCBI GI NO: 18415211 NR Description: Expressed protein; protein id: At4g18970
  misc_feature (1)..(198): NCBI GI NO: 21618199 NR Description: GDSL-motif lipase/hydrolase-like protein
  misc_feature (1)..(198): NCBI GI NO: 15220512 NR Description: lipase/hydrolase, putative; protein id:At1g29660
  misc_feature (1)..(198): NCBI GI NO: 21594055 NR Description: lipase/hydrolase, putative [Arabidopsis thaliana]
  misc_feature (1)..(198): NCBI GI NO: 21592417 NR Description: lipase/hydrolase, putative [Arabidopsis thaliana]
MGSNDYLNNYFMPAVYATSRQYTPEQYADVLVSQYTQQLRILYNNGARKVALMGVGQVGCSPNELAQQSSDGVTCVARINGAIEIFNQKLVELVDQFNTLPGAHFTYINAYGIFQDIIRSPGANGLTVLDKGCCGVGRNNGQVTCLPFQTPCANRNEYLFWDAFHPTEAANILVGRRAYSAAQPSDVHPVDLQTLARL

SEQ ID NO: 14348 - protein, 187 aa, Triticum aestivum
  peptide (1)..(187): Ceres Seq. ID no. 12625477
  misc_feature (1)..(167): Pfam Name: Pfam Description:  GDSL-like Lipase/Acylhydrolase
  misc_feature (1)..(187): NCBI GI NO: 34909504 NR Description: putative GDSL-motif lipase/hydrolase-like protein
  misc_feature (1)..(185): NCBI GI NO: 34910808 NR Description: GDSL-motif lipase/hydrolase-like protein
  misc_feature (1)..(187): NCBI GI NO: 15242458 NR Description: GDSL-motif lipase/hydrolase-like protein
  misc_feature (1)..(187): NCBI GI NO: 21553940 NR Description: GDSL-motif lipase/hydrolase-like protein
  misc_feature (1)..(187): NCBI GI NO: 7485419 NR Description: hypothetical protein F13C5
  misc_feature (1)..(187): NCBI GI NO: 18415211 NR Description: Expressed protein; protein id: At4g18970
  misc_feature (1)..(187): NCBI GI NO: 21618199 NR Description: GDSL-motif lipase/hydrolase-like protein
  misc_feature (1)..(187): NCBI GI NO: 15220512 NR Description: lipase/hydrolase, putative; protein id:At1g29660
  misc_feature (1)..(187): NCBI GI NO: 21594055 NR Description: lipase/hydrolase, putative [Arabidopsis thaliana]
  misc_feature (1)..(187): NCBI GI NO: 21592417 NR Description: lipase/hydrolase, putative [Arabidopsis thaliana]
MPAVYATSRQYTPEQYADVLVSQYTQQLRILYNNGARKVALMGVGQVGCSPNELAQQSSDGVTCVARINGAIEIFNQKLVELVDQFNTLPGAHFTYINAYGIFQDIIRSPGANGLTVLDKGCCGVGRNNGQVTCLPFQTPCANRNEYLFWDAFHPTEAANILVGRRAYSAAQPSDVHPVDLQTLARL

SEQ ID NO: 14349 - DNA, 1344 bp, Triticum aestivum
  misc_feature (1)..(1344): Ceres Seq. ID no. 13597124
aacccaacccaacccgacccggcgcggatctaaaatctctctctgccagccaccacgcgcctgccctacagccgccaccgacgccccgtccccgccccctcccacggtcgccgccgccgtcgccgtcgccgttcatctccgccccgtccgcggtctttccccccattggggttcgaggacctgaggtgcttctagctgggaaggatgagcaaaggcccggttccgttccctagctttgggaagaaagcaaaagatctcttgtacaaggactacaattttgaccaaaagttttcatggtcaacaactagcgaatctggtttgggtatcacagcctctggtgtgaagttcgatgaactcttcattggtgacatacgggtacaacataaaagtggtagaaatactgttgatgtcacaatcgattgcgattccaaagtgtcaaccgcggtcacttttgatgaagtagtccctggtttgaagacttctttcggcttcaaggttcctgatcaaaagtcagggaagctcgatttgcaataccttcatgatcgcttcacactgaattcaaccattggcttgacttcggcacctgtgatcgagctggcaacaactattggcacaaacgaacttgctgtcggtgccgaggttggatttgacagcacttcagcttctgttaccaagtacaactcaggggtcagctataccaaggatgatttttctgccgccttacaaatggctgacaaaggcgagacactgaaagcttcctacatccacctgttcagcccgaccagcgcagtggcggccgaggtaacgcacaggttgaaaacaaaggagaactacttcaccatcgggagctcccacgcgctcgacccgtccacgacgctcaagacgaggttcagcaacagcgggaaggccgggctcctctgccggcacgagtggaggcccaagtcgtacgtgacgctctcggccgagtacgaccccaaggtggtgagctcgccgtcaaggttcggcgtggccgtggccctcagcccctgatcacccgcctgcccgcccgcatctcctccctgtacaacagcgccagcgttaagcacgccgctccgctcgtatatgtccgagccatactcgccgatgattctttttggtctctctctctttttgggttacaacagtattggtattggcccacggaaaccttgtctaggagttgggctcatttttgcgggattcctccgattagcctgcctgccggccggcgaagtaaggggccgggaactggaaatatacagaggttttgtactattaggcatacgctttggccactccaggcgatgaaattgctgacttgctgtc

SEQ ID NO: 14350 - protein, 274 aa, Triticum aestivum
  peptide (1)..(274): Ceres Seq. ID no. 13597125
  misc_feature (5)..(267): Pfam Name: Pfam Description:  Eukaryotic porin
  misc_feature (1)..(274): NCBI GI NO: 36957233 NR Description: VDAC3.1 [Lotus corniculatus var. japonicus]
  misc_feature (1)..(274): NCBI GI NO: 36957170 NR Description: VDAC1.1 [Lotus corniculatus var. japonicus]
  misc_feature (1)..(274): NCBI GI NO: 15242146 NR Description: porin-related protein [Arabidopsis thaliana]
  misc_feature (1)..(274): NCBI GI NO: 36957183 NR Description: VDAC1.2 [Lotus corniculatus var. japonicus]
  misc_feature (1)..(274): NCBI GI NO: 7442953 NR Description: porin - common ice plant
  misc_feature (1)..(274): NCBI GI NO: 1172558 NR Description: Outer plastidial membrane protein porin
  misc_feature (4)..(274): NCBI GI NO: 7339529 NR Description: voltage-dependent anion channel [Oryza sativa]
  misc_feature (1)..(274): NCBI GI NO: 1172555 NR Description: 34 kDa outer mitochondrial membrane protein porin
  misc_feature (1)..(274): NCBI GI NO: 629728 NR Description: porin I, 36K - potato
  misc_feature (1)..(274): NCBI GI NO: 1172556 NR Description: 36 kDa outer mitochondrial membrane protein porin
MSKGPVPFPSFGKKAKDLLYKDYNFDQKFSWSTTSESGLGITASGVKFDELFIGDIRVQHKSGRNTVDVTIDCDSKVSTAVTFDEVVPGLKTSFGFKVPDQKSGKLDLQYLHDRFTLNSTIGLTSAPVIELATTIGTNELAVGAEVGFDSTSASVTKYNSGVSYTKDDFSAALQMADKGETLKASYIHLFSPTSAVAAEVTHRLKTKENYFTIGSSHALDPSTTLKTRFSNSGKAGLLCRHEWRPKSYVTLSAEYDPKVVSSPSRFGVAVALSP

SEQ ID NO: 14351 - DNA, 1369 bp, Triticum aestivum
  misc_feature (1)..(1369): Ceres Seq. ID no. 13597129
ctagaacatcctaatcgagaagtctctgactctctctctctcactacccccaaagcagcagaagcagcagcaagcaccaagcgagcagcgaagccgattccccaaaccgcctcccacatgcaattcctcgcctgaagaaaccctaccgtactccgccgccgctgtcgccgccatgtcgttgccaccggtggacccgccggagtggctgcgcacactacccgtggcgccggagtaccgccccaccctcgccgagttcgctgaccccatcgcctatatcctcaagatcgagccagaggcctctcgctacggcatctgcaagatcgtccccccgctcccctcgccgccccgcgaggccaccgttcagctcctcaaggcctcgttcgcctccaatgcgtccgcttccggcgacgctggccccaccttcccgacgcggctccagcaggtgggcctctccacaaagaaccgtcgcggcgcgaaccgtcgcgtctgggagagcggcgagcgctacaccctggaggccttccgcaccaaggcccgcgacttcgaactcccgaggcacgcgatacccccgaagcacgcgacgcccctccagctcgaggcgctcttctggggtgcttgcgctgcgaggccattcaatgtcgagtacggcaacgacatgccggggtctggcttcgtcaaacgggaggtgctagacctggacactgacagtccggtaggggcgcccagggacgtcggcgagacggagtggaacatgagggtggctccgcgcgctcggggctcgctactgcgggcgatgagccgggacgtggctggcgtcacaacgccgatgctatatgtggcgatgctctacagttggttcgcgtggcacgtggaggaccatgagctgcatagcctcaactacctccacttcggcaagcccaagacttggtacggcgtgccccgagatgccatgcttgccttcgaggatgctgtccgtgtccatgggtacgcggacgacctcaatgccatcagtgcgacagacgagccagacggttgggactggcaccaggcgtagggggctctggtacatggaccaggaggtgcagccggacttggtgtgtgctgcgaccatggaggataaggagaagcaggcgatgatccatcattgtaggatggggcatgtatcttttgataagatgagtagaatatttccggatgttatgtgtggaataggcaaaggcaagctgacatgtgatgcttgtgaatatgcaaaacacacacgggccttatatgtgagtaaggggctcaggagcatatctccttttatgcttattcattcggatgtatggactagcccagtggtgtcaatgaatgggaagaagtattttgc

SEQ ID NO: 14352 - protein, 293 aa, Triticum aestivum
  peptide (1)..(293): Ceres Seq. ID no. 15222034
  misc_feature (219)..(279): Pfam Name: Pfam Description:  jmjC domain
  misc_feature (1)..(279): NCBI GI NO: 7488434 NR Description: zinc finger protein T29H11
  misc_feature (1)..(279): NCBI GI NO: 22331694 NR Description: zinc finger protein -related
  misc_feature (4)..(279): NCBI GI NO: 20804883 NR Description: putative zinc finger protein
  misc_feature (169)..(281): NCBI GI NO: 15237652 NR Description: zinc finger protein - like [Arabidopsis thaliana]
  misc_feature (6)..(100): NCBI GI NO: 15237652 NR Description: zinc finger protein - like [Arabidopsis thaliana]
  misc_feature (79)..(171): NCBI GI NO: 15237652 NR Description: zinc finger protein - like [Arabidopsis thaliana]
  misc_feature (94)..(270): NCBI GI NO: 22329874 NR Description: expressed protein [Arabidopsis thaliana]
  misc_feature (18)..(104): NCBI GI NO: 22329874 NR Description: expressed protein [Arabidopsis thaliana]
  misc_feature (94)..(270): NCBI GI NO: 17064818 NR Description: similar to Human XE169 protein
  misc_feature (18)..(104): NCBI GI NO: 17064818 NR Description: similar to Human XE169 protein
MSLPPVDPPEWLRTLPVAPEYRPTLAEFADPIAYILKIEPEASRYGICKIVPPLPSPPREATVQLLKASFASNASASGDAGPTFPTRLQQVGLSTKNRRGANRRVWESGERYTLEAFRTKARDFELPRHAIPPKHATPLQLEALFWGACAARPFNVEYGNDMPGSGFVKREVLDLDTDSPVGAPRDVGETEWNMRVAPRARGSLLRAMSRDVAGVTTPMLYVAMLYSWFAWHVEDHELHSLNYLHFGKPKTWYGVPRDAMLAFEDAVRVHGYADDLNAISATDEPDGWDWHQA

SEQ ID NO: 14353 - protein, 178 aa, Triticum aestivum
  peptide (1)..(178): Ceres Seq. ID no. 15222035
  misc_feature (61)..(177): NCBI GI NO: 18378607 NR Description: polyprotein
  misc_feature (59)..(177): NCBI GI NO: 38567889 NR Description: OSJNBa0060N03.9
  misc_feature (11)..(177): NCBI GI NO: 34914532 NR Description: polyprotein
  misc_feature (115)..(177): NCBI GI NO: 37535486 NR Description: putative copia-like polyprotein
MWRCSTVGSRGTWRTMSCIASTTSTSASPRLGTACPEMPCLPSRMLSVSMGTRTTSMPSVRQTSQTVGTGTRRRGLWYMDQEVQPDLVCAATMEDKEKQAMIHHCRMGHVSFDKMSRIFPDVMCGIGKGKLTCDACEYAKHTRALYVSKGLRSISPFMLIHSDVWTSPVVSMNGKKYF

SEQ ID NO: 14354 - protein, 163 aa, Triticum aestivum
  peptide (1)..(163): Ceres Seq. ID no. 15222036
  misc_feature (46)..(162): NCBI GI NO: 18378607 NR Description: polyprotein
  misc_feature (44)..(162): NCBI GI NO: 38567889 NR Description: OSJNBa0060N03.9
  misc_feature (1)..(162): NCBI GI NO: 34914532 NR Description: polyprotein
  misc_feature (100)..(162): NCBI GI NO: 37535486 NR Description: putative copia-like polyprotein
MSCIASTTSTSASPRLGTACPEMPCLPSRMLSVSMGTRTTSMPSVRQTSQTVGTGTRRRGLWYMDQEVQPDLVCAATMEDKEKQAMIHHCRMGHVSFDKMSRIFPDVMCGIGKGKLTCDACEYAKHTRALYVSKGLRSISPFMLIHSDVWTSPVVSMNGKKYF

SEQ ID NO: 14355 - DNA, 680 bp, Triticum aestivum
  misc_feature (1)..(680): Ceres Seq. ID no. 12585856
aaaatcaggaaacaaagtggcagacatagacaagcagagcagctcgcggatcgatccatggagttcgacaagcgcacggggacgccttctccccttctcccccggagcgcctccaccgtcacctactgctgcgggcggtgcgggtacgacctgaagctgagctcgtcggcgcgggacacggcgggcatcgtgggggccggcgcgggcggggcgaggcggcggggctggcggagcgcggcggtggtggtgttcgacgccatcgacgacgcgcgcttcggccacctcgacgagttccgctgcctcgacctgcgcgcgcgccgcctcttcgcgcgccgcacgcgcctgctctgccgcaagtgcggcgcccacgtcggcttcggctacgacgacaacaccaccgccaccaggccgccgcggtaccacatcaagatccgcgccctccaccccgcctcctccgacgacgccttctccggcgccgccacgccgccgccgccgtcccacgcgccggcggatccgcgatcttgatctccattgcctgacatgcccgtgcgcacattccgtccctttttttgtgtttccattttctttcttcctttctctgtcgacgcaaacgggaattgccgttcgcgctcgctagtgtacaaactgatttgattgattggaaattggaatcaaatcgc

SEQ ID NO: 14356 - protein, 174 aa, Triticum aestivum
  peptide (1)..(174): Ceres Seq. ID no. 12585857
  misc_feature (43)..(134): NCBI GI NO: 34908010 NR Description: P0460C04.15
  misc_feature (40)..(152): NCBI GI NO: 15236464 NR Description: putative protein; protein id: At4g08330.1
KIRKQSGRHRQAEQLADRSMEFDKRTGTPSPLLPRSASTVTYCCGRCGYDLKLSSSARDTAGIVGAGAGGARRRGWRSAAVVVFDAIDDARFGHLDEFRCLDLRARRLFARRTRLLCRKCGAHVGFGYDDNTTATRPPRYHIKIRALHPASSDDAFSGAATPPPPSHAPADPRS

SEQ ID NO: 14357 - protein, 155 aa, Triticum aestivum
  peptide (1)..(155): Ceres Seq. ID no. 12585858
  misc_feature (24)..(115): NCBI GI NO: 34908010 NR Description: P0460C04.15
  misc_feature (21)..(133): NCBI GI NO: 15236464 NR Description: putative protein; protein id: At4g08330.1
MEFDKRTGTPSPLLPRSASTVTYCCGRCGYDLKLSSSARDTAGIVGAGAGGARRRGWRSAAVVVFDAIDDARFGHLDEFRCLDLRARRLFARRTRLLCRKCGAHVGFGYDDNTTATRPPRYHIKIRALHPASSDDAFSGAATPPPPSHAPADPRS

SEQ ID NO: 14358 - DNA, 1306 bp, Triticum aestivum
  misc_feature (1)..(1306): Ceres Seq. ID no. 13597804
atcgaaaaaagataagccagacatcgagtagtccctctcgggtcgcagtacagagtacggacagaggagcgatatggacccggccggcgcggggaaggcgacggcggcggcggcggctgtgtgcgtgacgggcgcgggaggcttcatcgcctcgtggctcgtggagcgccttctcgccggaggagactacgcggtgcatggcaccgtccgtgatcccagcgaccccaagaataaacacctgagggcgctggacggcgccggcgagcggctgcgcctgttcaaggccgacgtgctggactacgcgagcgtggcgtccaccgtggccggctgtgccggcgtcttccacgtcgccagcccctgccccgccgcccaacccacgaaccccgaggtggagctgcttgccccggcggtggccggcacgctgaacgtgctccgggcctgccgggaggccggcgtccgccgcgtcgtggtggtgtcgtcggtcggcgcggtcttcatgaaccccaacccccccgagggccccaccatggacgaacactgctggtcgaacgaggagtactgcagagccaccgagaactggtactgcctctccaagacgctggtcgagcgcgaggcctgggcttacgcagagaaggccgggctggacgtggtgaccgtgtgcccgccgctggtgttcgggcctctgctgcagcccacggtgaacaccagcagcctgttcctcatcagatacctgaaatgcgacggcgtgaacgccatggacgacagggtgaggaacatggtggacgtcagggacgtcgccgacgcccttgtgctggcgtacgagagcccggaggcggccggccggtacatctgcagtgcgcacgccaggaaggtgtccgaaatggtttccgtcgtcaggagcctgcatccgagcctgaactgcgcaaacaagttcgttcagctggtgggagatgagaaagtgttcagcaccgagaagctgcagaggctggggtggaagttcaggacgctggaggagacgctcaaggacagcgtcgagtcctacatgtctgcaggcatactcagctgagcagggcccaaggttgcgcgcggatcggagccaggtgggcattttgtatcctaacgagcactgcggatgtgccgctagtttcagttcaaggatagcacggtagctaatgcgatgatcaaacggtggtgtgaaattgtattgatcaaactagtgtcacaaatactgcaattgctatatgtaaattgactgaatttgtaatttgggtaagtcggttttatgggagaaggagctattgaaggg

SEQ ID NO: 14359 - protein, 330 aa, Triticum aestivum
  peptide (1)..(330): Ceres Seq. ID no. 15222197
  misc_feature (16)..(274): Pfam Name: Pfam Description:  3-beta hydroxysteroid dehydrogenase/ isomerase family
  misc_feature (16)..(329): NCBI GI NO: 15226134 NR Description: cinnamoyl-CoA reductase family
  misc_feature (9)..(329): NCBI GI NO: 15226135 NR Description: cinnamoyl-CoA reductase family
  misc_feature (11)..(329): NCBI GI NO: 15223068 NR Description: cinnamoyl-CoA reductase family
  misc_feature (11)..(329): NCBI GI NO: 6554472 NR Description: putative cinnamoyl-CoA reductase; 14056-15506
  misc_feature (6)..(330): NCBI GI NO: 17978649 NR Description: cinnamoyl-CoA reductase [Pinus taeda]
  misc_feature (2)..(330): NCBI GI NO: 3341511 NR Description: cinnamoyl-CoA reductase [Saccharum officinarum]
  misc_feature (3)..(329): NCBI GI NO: 9998901 NR Description: cinnamoyl-CoA reductase
  misc_feature (3)..(329): NCBI GI NO: 40233135 NR Description: cinnamoyl CoA reductase [Populus tomentosa]
  misc_feature (16)..(329): NCBI GI NO: 9964087 NR Description: cinnamoyl CoA reductase [Lolium perenne]
  misc_feature (3)..(329): NCBI GI NO: 2960364 NR Description: cinnamoyl CoA reductase
MDPAGAGKATAAAAAVCVTGAGGFIASWLVERLLAGGDYAVHGTVRDPSDPKNKHLRALDGAGERLRLFKADVLDYASVASTVAGCAGVFHVASPCPAAQPTNPEVELLAPAVAGTLNVLRACREAGVRRVVVVSSVGAVFMNPNPPEGPTMDEHCWSNEEYCRATENWYCLSKTLVEREAWAYAEKAGLDVVTVCPPLVFGPLLQPTVNTSSLFLIRYLKCDGVNAMDDRVRNMVDVRDVADALVLAYESPEAAGRYICSAHARKVSEMVSVVRSLHPSLNCANKFVQLVGDEKVFSTEKLQRLGWKFRTLEETLKDSVESYMSAGILS

SEQ ID NO: 14360 - protein, 189 aa, Triticum aestivum
  peptide (1)..(189): Ceres Seq. ID no. 15222198
  misc_feature (1)..(133): Pfam Name: Pfam Description:  3-beta hydroxysteroid dehydrogenase/ isomerase family
  misc_feature (1)..(188): NCBI GI NO: 15226134 NR Description: cinnamoyl-CoA reductase family
  misc_feature (1)..(188): NCBI GI NO: 15226135 NR Description: cinnamoyl-CoA reductase family
  misc_feature (1)..(188): NCBI GI NO: 15223068 NR Description: cinnamoyl-CoA reductase family
  misc_feature (1)..(188): NCBI GI NO: 6554472 NR Description: putative cinnamoyl-CoA reductase; 14056-15506
  misc_feature (1)..(189): NCBI GI NO: 17978649 NR Description: cinnamoyl-CoA reductase [Pinus taeda]
  misc_feature (1)..(189): NCBI GI NO: 3341511 NR Description: cinnamoyl-CoA reductase [Saccharum officinarum]
  misc_feature (1)..(188): NCBI GI NO: 9998901 NR Description: cinnamoyl-CoA reductase
  misc_feature (1)..(188): NCBI GI NO: 40233135 NR Description: cinnamoyl CoA reductase [Populus tomentosa]
  misc_feature (1)..(188): NCBI GI NO: 9964087 NR Description: cinnamoyl CoA reductase [Lolium perenne]
  misc_feature (1)..(188): NCBI GI NO: 2960364 NR Description: cinnamoyl CoA reductase
MNPNPPEGPTMDEHCWSNEEYCRATENWYCLSKTLVEREAWAYAEKAGLDVVTVCPPLVFGPLLQPTVNTSSLFLIRYLKCDGVNAMDDRVRNMVDVRDVADALVLAYESPEAAGRYICSAHARKVSEMVSVVRSLHPSLNCANKFVQLVGDEKVFSTEKLQRLGWKFRTLEETLKDSVESYMSAGILS

SEQ ID NO: 14361 - protein, 179 aa, Triticum aestivum
  peptide (1)..(179): Ceres Seq. ID no. 15222199
  misc_feature (1)..(123): Pfam Name: Pfam Description:  3-beta hydroxysteroid dehydrogenase/ isomerase family
  misc_feature (1)..(178): NCBI GI NO: 15226134 NR Description: cinnamoyl-CoA reductase family
  misc_feature (1)..(178): NCBI GI NO: 15226135 NR Description: cinnamoyl-CoA reductase family
  misc_feature (1)..(178): NCBI GI NO: 15223068 NR Description: cinnamoyl-CoA reductase family
  misc_feature (1)..(178): NCBI GI NO: 6554472 NR Description: putative cinnamoyl-CoA reductase; 14056-15506
  misc_feature (1)..(179): NCBI GI NO: 17978649 NR Description: cinnamoyl-CoA reductase [Pinus taeda]
  misc_feature (1)..(179): NCBI GI NO: 3341511 NR Description: cinnamoyl-CoA reductase [Saccharum officinarum]
  misc_feature (1)..(178): NCBI GI NO: 9998901 NR Description: cinnamoyl-CoA reductase
  misc_feature (1)..(178): NCBI GI NO: 40233135 NR Description: cinnamoyl CoA reductase [Populus tomentosa]
  misc_feature (1)..(178): NCBI GI NO: 9964087 NR Description: cinnamoyl CoA reductase [Lolium perenne]
  misc_feature (1)..(178): NCBI GI NO: 2960364 NR Description: cinnamoyl CoA reductase
MDEHCWSNEEYCRATENWYCLSKTLVEREAWAYAEKAGLDVVTVCPPLVFGPLLQPTVNTSSLFLIRYLKCDGVNAMDDRVRNMVDVRDVADALVLAYESPEAAGRYICSAHARKVSEMVSVVRSLHPSLNCANKFVQLVGDEKVFSTEKLQRLGWKFRTLEETLKDSVESYMSAGILS

SEQ ID NO: 14362 - DNA, 1529 bp, Triticum aestivum
  misc_feature (1)..(1529): Ceres Seq. ID no. 13597805
ctctcccccgatctctcgcccgcgacctgctccgataccctgcgaagtacggactccggcgagcttacggggctcgcgcggcgagctcgcggccgcgatggacgaggcgggcacctcgtcgtccgcaggctccgccccgcgcggagggcgcccggcgagatcgggagtattctataagttcacccagcaggatcttccagcttggaaaccggcaatgacaccaggatacgtgatagccattttcttgataattgggattatttttgtaccgcttggactaatttgtcttcaagcttcaaacagagttgcagaaatcgttcaccgttatgatattgattgtgtacctaatgcttacagaagcaataagcaggcctatatcaaagacagctcgatttcgaaggaatgcattcagaaagtgaaggtacaataccacatgaaagctccaatttatgtgtattatgaactcgacaacttctaccagaatcatcgtaggtatatcaaaagtagaagcgacaagcaactacgctatgggctgaaatacactgatagctcatgcagtccaatagaaaagagcgacggccttccaattgttccctgtggattgattgcctggagcttgttcaatgatacttatgattttacccgtggatccatgggaatagtggttgatcggaaaaatatttcatggagaagtgatcgggagcataagtatggcaaggatgtctatcctttcaactttcagaatggatctttgattggaggaggaaaacttgaccctgatataccactaagcaatcaggaagatcttatcgtgtggatgcgcgcagctgctcttccccagtttcgaaagctgtatggtgtcatcgaagaggatatacaagctgatgaaatcattaccatgcacataacaaacaattacaatacctacagctttggtggaaagaaaagcctggttcttacaacatcaacctggctaggtggcaagaatgactttcttggatatgtatatcttatcactggttccttgagcattttcttgtcgattctctttgctctgatccatgtgaaaatcccaaggccacatggtgatgctgcttacctatcttggagcaggaaaaacggcaataactaagcttctgtgcatagttttttctttgtgtaagctagcagtacagcaccctggccagaggtttccccgcggcgttccgtctgcgcaccctgtctcgagggaaatggcatagtagcagcttcaggtttcatacactcgacacttggacggagcatgaaatgcgtagcagcttcagatttcatacacatacttggagcatgaaacgcttgatgactgctgaggatatacggtaaggccatggttcaccgacatgttcgtgcaattcaggccagcgctctgacggcgccctcgaggaaaactagagccgtgtaaaaactgatatatgtgtatgtaaagcgccataccatggattccatgatgttgtatgaatgaatacatataatgtttcagtttcgtgccg

SEQ ID NO: 14363 - protein, 376 aa, Triticum aestivum
  peptide (1)..(376): Ceres Seq. ID no. 13597806
  misc_feature (96)..(363): Pfam Name: ligand-effect modulator 3 Pfam Description: LEM3
  misc_feature (33)..(373): NCBI GI NO: 18422638 NR Description: membrane protein common family
  misc_feature (50)..(373): NCBI GI NO: 21554054 NR Description: unknown [Arabidopsis thaliana]
  misc_feature (33)..(359): NCBI GI NO: 9757735 NR Description: gb|AAD25612
  misc_feature (33)..(374): NCBI GI NO: 18404877 NR Description: membrane protein common family
  misc_feature (37)..(374): NCBI GI NO: 18412377 NR Description: membrane protein common family
  misc_feature (36)..(374): NCBI GI NO: 18399730 NR Description: membrane protein common family
  misc_feature (60)..(374): NCBI GI NO: 25347301 NR Description: T8K14.13 [imported] - Arabidopsis thaliana
  misc_feature (72)..(374): NCBI GI NO: 15219220 NR Description: membrane protein common family
  misc_feature (77)..(374): NCBI GI NO: 25347303 NR Description: protein F3O9.16 [imported] - Arabidopsis thaliana
  misc_feature (50)..(360): NCBI GI NO: 19570056 NR Description: similar to membrane protein common family
SPPISRPRPAPIPCEVRTPASLRGSRGELAAAMDEAGTSSSAGSAPRGGRPARSGVFYKFTQQDLPAWKPAMTPGYVIAIFLIIGIIFVPLGLICLQASNRVAEIVHRYDIDCVPNAYRSNKQAYIKDSSISKECIQKVKVQYHMKAPIYVYYELDNFYQNHRRYIKSRSDKQLRYGLKYTDSSCSPIEKSDGLPIVPCGLIAWSLFNDTYDFTRGSMGIVVDRKNISWRSDREHKYGKDVYPFNFQNGSLIGGGKLDPDIPLSNQEDLIVWMRAAALPQFRKLYGVIEEDIQADEIITMHITNNYNTYSFGGKKSLVLTTSTWLGGKNDFLGYVYLITGSLSIFLSILFALIHVKIPRPHGDAAYLSWSRKNGNN

SEQ ID NO: 14364 - protein, 344 aa, Triticum aestivum
  peptide (1)..(344): Ceres Seq. ID no. 13597807
  misc_feature (64)..(331): Pfam Name: ligand-effect modulator 3 Pfam Description: LEM3
  misc_feature (1)..(341): NCBI GI NO: 18422638 NR Description: membrane protein common family
  misc_feature (18)..(341): NCBI GI NO: 21554054 NR Description: unknown [Arabidopsis thaliana]
  misc_feature (1)..(327): NCBI GI NO: 9757735 NR Description: gb|AAD25612
  misc_feature (1)..(342): NCBI GI NO: 18404877 NR Description: membrane protein common family
  misc_feature (5)..(342): NCBI GI NO: 18412377 NR Description: membrane protein common family
  misc_feature (4)..(342): NCBI GI NO: 18399730 NR Description: membrane protein common family
  misc_feature (28)..(342): NCBI GI NO: 25347301 NR Description: T8K14.13 [imported] - Arabidopsis thaliana
  misc_feature (40)..(342): NCBI GI NO: 15219220 NR Description: membrane protein common family
  misc_feature (45)..(342): NCBI GI NO: 25347303 NR Description: protein F3O9.16 [imported] - Arabidopsis thaliana
  misc_feature (18)..(328): NCBI GI NO: 19570056 NR Description: similar to membrane protein common family
MDEAGTSSSAGSAPRGGRPARSGVFYKFTQQDLPAWKPAMTPGYVIAIFLIIGIIFVPLGLICLQASNRVAEIVHRYDIDCVPNAYRSNKQAYIKDSSISKECIQKVKVQYHMKAPIYVYYELDNFYQNHRRYIKSRSDKQLRYGLKYTDSSCSPIEKSDGLPIVPCGLIAWSLFNDTYDFTRGSMGIVVDRKNISWRSDREHKYGKDVYPFNFQNGSLIGGGKLDPDIPLSNQEDLIVWMRAAALPQFRKLYGVIEEDIQADEIITMHITNNYNTYSFGGKKSLVLTTSTWLGGKNDFLGYVYLITGSLSIFLSILFALIHVKIPRPHGDAAYLSWSRKNGNN

SEQ ID NO: 14365 - protein, 305 aa, Triticum aestivum
  peptide (1)..(305): Ceres Seq. ID no. 13597808
  misc_feature (25)..(292): Pfam Name: ligand-effect modulator 3 Pfam Description: LEM3
  misc_feature (1)..(302): NCBI GI NO: 18422638 NR Description: membrane protein common family
  misc_feature (1)..(302): NCBI GI NO: 21554054 NR Description: unknown [Arabidopsis thaliana]
  misc_feature (1)..(288): NCBI GI NO: 9757735 NR Description: gb|AAD25612
  misc_feature (1)..(303): NCBI GI NO: 18404877 NR Description: membrane protein common family
  misc_feature (1)..(303): NCBI GI NO: 18412377 NR Description: membrane protein common family
  misc_feature (1)..(303): NCBI GI NO: 18399730 NR Description: membrane protein common family
  misc_feature (1)..(303): NCBI GI NO: 25347301 NR Description: T8K14.13 [imported] - Arabidopsis thaliana
  misc_feature (1)..(303): NCBI GI NO: 15219220 NR Description: membrane protein common family
  misc_feature (6)..(303): NCBI GI NO: 25347303 NR Description: protein F3O9.16 [imported] - Arabidopsis thaliana
  misc_feature (1)..(289): NCBI GI NO: 19570056 NR Description: similar to membrane protein common family
MTPGYVIAIFLIIGIIFVPLGLICLQASNRVAEIVHRYDIDCVPNAYRSNKQAYIKDSSISKECIQKVKVQYHMKAPIYVYYELDNFYQNHRRYIKSRSDKQLRYGLKYTDSSCSPIEKSDGLPIVPCGLIAWSLFNDTYDFTRGSMGIVVDRKNISWRSDREHKYGKDVYPFNFQNGSLIGGGKLDPDIPLSNQEDLIVWMRAAALPQFRKLYGVIEEDIQADEIITMHITNNYNTYSFGGKKSLVLTTSTWLGGKNDFLGYVYLITGSLSIFLSILFALIHVKIPRPHGDAAYLSWSRKNGNN

SEQ ID NO: 14366 - DNA, 1340 bp, Triticum aestivum
  misc_feature (1)..(1340): Ceres Seq. ID no. 15226608
aaacattccactgttgcacacacccttgcccccgtcctccccccgcccgatcccccgcccctccgttttcggcgcggccgcgaggagagttcgtcggcggccgcgatgaggtcggccctgagccgcctgatccgttcctcctgctccgtctcgtcctcccgtctcagctctccagttttgttgaagaacggcaaggccttctcgagcgatgccacgcccagggattccgggcgggtcgacgagcctttcaaagtcgaggaggcagaacccgtgaaggtgccgccgccaccgccttctcctgataagctgcttgtgctaggtggaagtggcttcgttggttcacatgtttgcaaggaggctttggagaggggatttgttgtctctagtctaaatagatctggaaagccatcgacaagtgaatcttgggctgacaaagttatatggaaccaaggcaatcttcttgaacctgcttcactggaggatagtatggatggtgtctctgctgttgtatcctgtgttggaggctttgggtcaaattctcaaatgttcaaactgaatgggactgcaaacatcaatgccatcagggttgcagctgagaaaggcataaaaagatttgtgtatgtgtcagctgcagactttggtttagtgaattacttattgcaaggttattatgagggcaagagagctgctgaagctgaactgctgtcgaagtttacctatggaggagtgatactgcggcctggttttattcatggaactcgtcgagtgggtagcgtgaacataccccttggacttgtgggttcacctatgcaaatggtgctccaaaatgcaaaaccattaaccagattgccacttgtcggcccgatgctaactcctccagtgagtgctacctcggtagcgaaggtcgctgtaagagcagcgacggatccggtgttccctcctggtatcgtcgatgtgtatggcatcatgcgttacagcgagcagaagtaagcgcatgcttgtacaggacgataaggcgtgtctccacccatcttttttacctggtttttcctatttgctctaaatgtgtaagcagacatcacaaggccatgaggcctcagctacggccgcagattctctgacagttctatcctggcgtggccctgtttgcctgatctacttactaggcaaggatgctcaataaagaagcagttaacctcgagtttcctgttggaaactgtttttacatgcttgttgcttgtaagtgttccttttagttactgtagagagcaggttaagatttgtaacttcgagtttatgataaggaaaactctattcctggtcgtgtaccgattgtgggc

SEQ ID NO: 14367 - protein, 329 aa, Triticum aestivum
  peptide (1)..(329): Ceres Seq. ID no. 15226609
  misc_feature (103)..(329): Pfam Name: Pfam Description:  Isoflavone reductase
  misc_feature (36)..(329): NCBI GI NO: 18416362 NR Description: expressed protein [Arabidopsis thaliana]
  misc_feature (36)..(329): NCBI GI NO: 10129651 NR Description: putative protein [Arabidopsis thaliana]
  misc_feature (101)..(325): NCBI GI NO: 18417824 NR Description: dehydrogenase-related [Arabidopsis thaliana]
  misc_feature (101)..(325): NCBI GI NO: 21592373 NR Description: unknown [Arabidopsis thaliana]
  misc_feature (45)..(312): NCBI GI NO: 38346147 NR Description: OSJNBb0118P14.7
  misc_feature (182)..(325): NCBI GI NO: 11346175 NR Description: hypothetical protein F1N13_50 - Arabidopsisthaliana
  misc_feature (101)..(312): NCBI GI NO: 18398333 NR Description: expressed protein [Arabidopsis thaliana]
  misc_feature (159)..(320): NCBI GI NO: 8744993 NR Description: hypothetical protein P1295.07 [Leishmania major]
  misc_feature (102)..(163): NCBI GI NO: 8744993 NR Description: hypothetical protein P1295.07 [Leishmania major]
  misc_feature (102)..(259): NCBI GI NO: 29375050 NR Description: conserved hypothetical protein
KHSTVAHTLAPVLPPPDPPPLRFRRGREESSSAAAMRSALSRLIRSSCSVSSSRLSSPVLLKNGKAFSSDATPRDSGRVDEPFKVEEAEPVKVPPPPPSPDKLLVLGGSGFVGSHVCKEALERGFVVSSLNRSGKPSTSESWADKVIWNQGNLLEPASLEDSMDGVSAVVSCVGGFGSNSQMFKLNGTANINAIRVAAEKGIKRFVYVSAADFGLVNYLLQGYYEGKRAAEAELLSKFTYGGVILRPGFIHGTRRVGSVNIPLGLVGSPMQMVLQNAKPLTRLPLVGPMLTPPVSATSVAKVAVRAATDPVFPPGIVDVYGIMRYSEQK

SEQ ID NO: 14368 - protein, 294 aa, Triticum aestivum
  peptide (1)..(294): Ceres Seq. ID no. 15226610
  misc_feature (68)..(294): Pfam Name: Pfam Description:  Isoflavone reductase
  misc_feature (1)..(294): NCBI GI NO: 18416362 NR Description: expressed protein [Arabidopsis thaliana]
  misc_feature (1)..(294): NCBI GI NO: 10129651 NR Description: putative protein [Arabidopsis thaliana]
  misc_feature (66)..(290): NCBI GI NO: 18417824 NR Description: dehydrogenase-related [Arabidopsis thaliana]
  misc_feature (66)..(290): NCBI GI NO: 21592373 NR Description: unknown [Arabidopsis thaliana]
  misc_feature (10)..(277): NCBI GI NO: 38346147 NR Description: OSJNBb0118P14.7
  misc_feature (147)..(290): NCBI GI NO: 11346175 NR Description: hypothetical protein F1N13_50 - Arabidopsisthaliana
  misc_feature (66)..(277): NCBI GI NO: 18398333 NR Description: expressed protein [Arabidopsis thaliana]
  misc_feature (124)..(285): NCBI GI NO: 8744993 NR Description: hypothetical protein P1295.07 [Leishmania major]
  misc_feature (67)..(128): NCBI GI NO: 8744993 NR Description: hypothetical protein P1295.07 [Leishmania major]
  misc_feature (67)..(224): NCBI GI NO: 29375050 NR Description: conserved hypothetical protein
MRSALSRLIRSSCSVSSSRLSSPVLLKNGKAFSSDATPRDSGRVDEPFKVEEAEPVKVPPPPPSPDKLLVLGGSGFVGSHVCKEALERGFVVSSLNRSGKPSTSESWADKVIWNQGNLLEPASLEDSMDGVSAVVSCVGGFGSNSQMFKLNGTANINAIRVAAEKGIKRFVYVSAADFGLVNYLLQGYYEGKRAAEAELLSKFTYGGVILRPGFIHGTRRVGSVNIPLGLVGSPMQMVLQNAKPLTRLPLVGPMLTPPVSATSVAKVAVRAATDPVFPPGIVDVYGIMRYSEQK

SEQ ID NO: 14369 - protein, 167 aa, Triticum aestivum
  peptide (1)..(167): Ceres Seq. ID no. 15226611
  misc_feature (1)..(167): Pfam Name: Pfam Description:  Isoflavone reductase
  misc_feature (1)..(167): NCBI GI NO: 18416362 NR Description: expressed protein [Arabidopsis thaliana]
  misc_feature (1)..(167): NCBI GI NO: 10129651 NR Description: putative protein [Arabidopsis thaliana]
  misc_feature (1)..(163): NCBI GI NO: 18417824 NR Description: dehydrogenase-related [Arabidopsis thaliana]
  misc_feature (1)..(163): NCBI GI NO: 21592373 NR Description: unknown [Arabidopsis thaliana]
  misc_feature (1)..(150): NCBI GI NO: 38346147 NR Description: OSJNBb0118P14.7
  misc_feature (20)..(163): NCBI GI NO: 11346175 NR Description: hypothetical protein F1N13_50 - Arabidopsisthaliana
  misc_feature (1)..(150): NCBI GI NO: 18398333 NR Description: expressed protein [Arabidopsis thaliana]
  misc_feature (1)..(158): NCBI GI NO: 8744993 NR Description: hypothetical protein P1295.07 [Leishmania major]
  misc_feature (1)..(97): NCBI GI NO: 29375050 NR Description: conserved hypothetical protein
  misc_feature (1)..(159): NCBI GI NO: 37523204 NR Description: probable oxidoreductase [Gloeobacter violaceus]
MDGVSAVVSCVGGFGSNSQMFKLNGTANINAIRVAAEKGIKRFVYVSAADFGLVNYLLQGYYEGKRAAEAELLSKFTYGGVILRPGFIHGTRRVGSVNIPLGLVGSPMQMVLQNAKPLTRLPLVGPMLTPPVSATSVAKVAVRAATDPVFPPGIVDVYGIMRYSEQK

SEQ ID NO: 14370 - DNA, 1170 bp, Triticum aestivum
  misc_feature (1)..(1170): Ceres Seq. ID no. 14303294
atttccgtacctgtctgctccgtccgcctcccaagctttgcggctccagggtttagctagggttctacccacgaccaccgccgccgcccgccccgccgccgccgcagccatggccggcgccggcgccggagaggaggacgcggcgtgggagcgcgccatcagcgcggccgtcaagagcgcgccgctctcccccttctccgcccccaaaaccctaaccctcgacggcgccatcaagtcctccaccggccgcctcccctcgccggcgctcttcgaccgcttcccctcgctcgaggagctctccgtcgcgggcgcccgcctctcctcgctcgccggcctgccccgcctcccggccctccgccgcctctccctccccgacaaccgcctcgcgggggccggctccctcgccgccgtcgccgagtcctgcggcgggaccatccgccacctcgacctcggcaacaaccgcttcgccgcggtcgaggagctcgccccgctcgcaccgctcggggtcgagtcgctggacctgtaccagtgccccgtcaccaagctcaaggggtacagggagaaggtgtttgcgctggtccccagcttgaagtacctggatggcgtcgatgccgagggcaatgaccgcctggagtccgatgaggacgaggaggaggatgaggatgaggatgaggaaggggatgaagagggggcggaggacggcgaaggggaaggggacgaagaggaagaggaaggagatgaagaagaagatggcgaggaagaggagggagatgaagaggaagaggaaggcgacgaggctgaagacgaagaggatgaggctgaggacgacgaaccggagtcaggcgcggccgagaaaagcgaggtggtcaacggaaacaagtccgcaggatctgccctgccaagcaagaggaaaagggacaatgaagatggggccaacggcgacaactgaatttgatctcgatttaaggtttgttggttcgtctttgcacgcttttcagagggttccgtgcgggaggtgtagtagaagcaagcaacctttgtactagttttgtgcaaggattttctgagaggttttcaaattttattcaagacgcgcggtggatcctcggacctgctccttcatgtgaaatttctggtactataaaccgaggcgctggctcggatcatgac

SEQ ID NO: 14371 - protein, 315 aa, Triticum aestivum
  peptide (1)..(315): Ceres Seq. ID no. 14303295
  misc_feature (205)..(287): Pfam Name: Pfam Description:  Chromadorea ALT protein
  misc_feature (37)..(315): NCBI GI NO: 31126736 NR Description: putative acidic nuclear phosphoprotein
  misc_feature (46)..(314): NCBI GI NO: 15229830 NR Description: leucine rich repeat protein-related
  misc_feature (46)..(291): NCBI GI NO: 34395133 NR Description: acidic nuclear phosphoprotein-like protein
  misc_feature (69)..(287): NCBI GI NO: 5453880 NR Description: acidic
  misc_feature (69)..(287): NCBI GI NO: 26984047 NR Description: inhibitor-1 of protein phosphatase type 2A
  misc_feature (69)..(288): NCBI GI NO: 28856130 NR Description: Unknown (protein for MGC:55516) [Danio rerio]
  misc_feature (66)..(285): NCBI GI NO: 1552326 NR Description: APRIL [Homo sapiens]
  misc_feature (66)..(285): NCBI GI NO: 5454088 NR Description: acidic
  misc_feature (69)..(287): NCBI GI NO: 40254600 NR Description: acidic
  misc_feature (89)..(315): NCBI GI NO: 40254600 NR Description: acidic
FPYLSAPSASQALRLQGLARVLPTTTAAARPAAAAAMAGAGAGEEDAAWERAISAAVKSAPLSPFSAPKTLTLDGAIKSSTGRLPSPALFDRFPSLEELSVAGARLSSLAGLPRLPALRRLSLPDNRLAGAGSLAAVAESCGGTIRHLDLGNNRFAAVEELAPLAPLGVESLDLYQCPVTKLKGYREKVFALVPSLKYLDGVDAEGNDRLESDEDEEEDEDEDEEGDEEGAEDGEGEGDEEEEEGDEEEDGEEEEGDEEEEEGDEAEDEEDEAEDDEPESGAAEKSEVVNGNKSAGSALPSKRKRDNEDGANGDN

SEQ ID NO: 14372 - protein, 279 aa, Triticum aestivum
  peptide (1)..(279): Ceres Seq. ID no. 14303296
  misc_feature (169)..(251): Pfam Name: Pfam Description:  Chromadorea ALT protein
  misc_feature (1)..(279): NCBI GI NO: 31126736 NR Description: putative acidic nuclear phosphoprotein
  misc_feature (10)..(278): NCBI GI NO: 15229830 NR Description: leucine rich repeat protein-related
  misc_feature (10)..(255): NCBI GI NO: 34395133 NR Description: acidic nuclear phosphoprotein-like protein
  misc_feature (33)..(251): NCBI GI NO: 5453880 NR Description: acidic
  misc_feature (33)..(251): NCBI GI NO: 26984047 NR Description: inhibitor-1 of protein phosphatase type 2A
  misc_feature (33)..(252): NCBI GI NO: 28856130 NR Description: Unknown (protein for MGC:55516) [Danio rerio]
  misc_feature (30)..(249): NCBI GI NO: 1552326 NR Description: APRIL [Homo sapiens]
  misc_feature (30)..(249): NCBI GI NO: 5454088 NR Description: acidic
  misc_feature (33)..(251): NCBI GI NO: 40254600 NR Description: acidic
  misc_feature (53)..(279): NCBI GI NO: 40254600 NR Description: acidic
MAGAGAGEEDAAWERAISAAVKSAPLSPFSAPKTLTLDGAIKSSTGRLPSPALFDRFPSLEELSVAGARLSSLAGLPRLPALRRLSLPDNRLAGAGSLAAVAESCGGTIRHLDLGNNRFAAVEELAPLAPLGVESLDLYQCPVTKLKGYREKVFALVPSLKYLDGVDAEGNDRLESDEDEEEDEDEDEEGDEEGAEDGEGEGDEEEEEGDEEEDGEEEEGDEEEEEGDEAEDEEDEAEDDEPESGAAEKSEVVNGNKSAGSALPSKRKRDNEDGANGDN

SEQ ID NO: 14373 - DNA, 1332 bp, Triticum aestivum
  misc_feature (1)..(1332): Ceres Seq. ID no. 15169537
gattcggaatacatgcagaagatcctgatattttctctctcctcgtgtcatctcatcactctccctctttctgaaaaccctagcgccgcagcccgagagagccatccttaggtttccgcgcaaggcgtcggggaattttcggctcgattggattggagatgacggagaaggaggtgggacggatcttcgtgggcggactgtcctgggacaccacggagcgcacgctggagcgagctttcggcgagttcggcaaggtcatcgagacgcaggttgtaacagaaagagacacaggccgctcccgtgggtttgggtttgttacattctcggaacctcgggctgtggatgttgcgatccgggaaatgcacaatggagaactagatggtcggaccatttctgtgaacaaagctcaacctaggatgaacagtgatgatggtggctatggatatgggggtagtagttactcatctggtgctagaggtggatatcgtggtgcagctgacatagtacccactgcaagtgatgattgctttaagtgtggacgccctggacactgggctcgtgaatgtctttattctgatggaggcaggcctggaaggtactctcccccttccaggtatggcaatggcgctggtgggcgtggtgaccgctttggaggatcagaccgttttggtaatcgctatgttgatgatcgttatgatggtggccgctatgctgatgatcgttatggtggtggacgcgatcgctatcctccagctgctgatcgtttttctggcgatagatatggtggtggtgatcgttatgcatcaggtggctttgccagggaaagaagctatgagagagatggagggcggccaggtggaagttattaccgtgatgaacctagaggcactggtgcttatggcaggggtggtccacgtgtggcgaatggtgacagatatgggagtggtggacctgctcgccttggcgcgagttaccgagataggcctgctccctatgatcgtcccactcagggtgctcgctcatatgatgaccgctactgatggaaggtcaccttggagcagacaggagatttgatacaagattcaattcccagttgctactacctcctttatttgtgtccactatgttgatgcttcaactctcaagtatcattctttcaagcagtttgtttggttacttcagtccatatggcagtacttaattattattattattattattattattattattattatggtcaaactgtacactctaggcaatgggcagacacttgttgcttattgttatggtattgtgtaactactctgcactctaagtttgagttgtact

SEQ ID NO: 14374 - protein, 293 aa, Triticum aestivum
  peptide (1)..(293): Ceres Seq. ID no. 15169538
  misc_feature (9)..(80): Pfam Name: a.k.a. RRM, RBD, or RNP domain Pfam Description: RNA recognition motif.
  misc_feature (1)..(293): NCBI GI NO: 33146923 NR Description: glycine-rich RNA-binding protein-like
  misc_feature (1)..(293): NCBI GI NO: 31712074 NR Description: putative RNA-binding protein
  misc_feature (1)..(289): NCBI GI NO: 15237666 NR Description: glycine-rich RNA-binding protein
  misc_feature (8)..(290): NCBI GI NO: 18406831 NR Description: glycine-rich RNA-binding protein, putative
  misc_feature (1)..(245): NCBI GI NO: 15231557 NR Description: glycine-rich RNA-binding protein
  misc_feature (1)..(205): NCBI GI NO: 40714682 NR Description: putative RNA binding protein
  misc_feature (1)..(218): NCBI GI NO: 2129944 NR Description: RNA-binding protein RZ-1 - wood tobacco
  misc_feature (1)..(189): NCBI GI NO: 12659074 NR Description: RNA-binding protein [Triticum aestivum]
  misc_feature (8)..(172): NCBI GI NO: 21388660 NR Description: glycine-rich RNA-binding protein
  misc_feature (8)..(167): NCBI GI NO: 15226605 NR Description: glycine-rich RNA-binding protein (AtGRP7)
MTEKEVGRIFVGGLSWDTTERTLERAFGEFGKVIETQVVTERDTGRSRGFGFVTFSEPRAVDVAIREMHNGELDGRTISVNKAQPRMNSDDGGYGYGGSSYSSGARGGYRGAADIVPTASDDCFKCGRPGHWARECLYSDGGRPGRYSPPSRYGNGAGGRGDRFGGSDRFGNRYVDDRYDGGRYADDRYGGGRDRYPPAADRFSGDRYGGGDRYASGGFARERSYERDGGRPGGSYYRDEPRGTGAYGRGGPRVANGDRYGSGGPARLGASYRDRPAPYDRPTQGARSYDDRY

SEQ ID NO: 14375 - protein, 226 aa, Triticum aestivum
  peptide (1)..(226): Ceres Seq. ID no. 15169539
  misc_feature (1)..(226): NCBI GI NO: 33146923 NR Description: glycine-rich RNA-binding protein-like
  misc_feature (1)..(226): NCBI GI NO: 31712074 NR Description: putative RNA-binding protein
  misc_feature (1)..(222): NCBI GI NO: 15237666 NR Description: glycine-rich RNA-binding protein
  misc_feature (1)..(223): NCBI GI NO: 18406831 NR Description: glycine-rich RNA-binding protein, putative
  misc_feature (1)..(178): NCBI GI NO: 15231557 NR Description: glycine-rich RNA-binding protein
  misc_feature (1)..(138): NCBI GI NO: 40714682 NR Description: putative RNA binding protein
  misc_feature (1)..(151): NCBI GI NO: 2129944 NR Description: RNA-binding protein RZ-1 - wood tobacco
  misc_feature (1)..(122): NCBI GI NO: 12659074 NR Description: RNA-binding protein [Triticum aestivum]
  misc_feature (1)..(105): NCBI GI NO: 21388660 NR Description: glycine-rich RNA-binding protein
  misc_feature (1)..(100): NCBI GI NO: 15226605 NR Description: glycine-rich RNA-binding protein (AtGRP7)
MHNGELDGRTISVNKAQPRMNSDDGGYGYGGSSYSSGARGGYRGAADIVPTASDDCFKCGRPGHWARECLYSDGGRPGRYSPPSRYGNGAGGRGDRFGGSDRFGNRYVDDRYDGGRYADDRYGGGRDRYPPAADRFSGDRYGGGDRYASGGFARERSYERDGGRPGGSYYRDEPRGTGAYGRGGPRVANGDRYGSGGPARLGASYRDRPAPYDRPTQGARSYDDRY

SEQ ID NO: 14376 - protein, 207 aa, Triticum aestivum
  peptide (1)..(207): Ceres Seq. ID no. 15169540
  misc_feature (1)..(207): NCBI GI NO: 33146923 NR Description: glycine-rich RNA-binding protein-like
  misc_feature (1)..(207): NCBI GI NO: 31712074 NR Description: putative RNA-binding protein
  misc_feature (1)..(203): NCBI GI NO: 15237666 NR Description: glycine-rich RNA-binding protein
  misc_feature (1)..(204): NCBI GI NO: 18406831 NR Description: glycine-rich RNA-binding protein, putative
  misc_feature (1)..(159): NCBI GI NO: 15231557 NR Description: glycine-rich RNA-binding protein
  misc_feature (1)..(119): NCBI GI NO: 40714682 NR Description: putative RNA binding protein
  misc_feature (1)..(132): NCBI GI NO: 2129944 NR Description: RNA-binding protein RZ-1 - wood tobacco
  misc_feature (1)..(103): NCBI GI NO: 12659074 NR Description: RNA-binding protein [Triticum aestivum]
  misc_feature (1)..(86): NCBI GI NO: 21388660 NR Description: glycine-rich RNA-binding protein
  misc_feature (1)..(81): NCBI GI NO: 15226605 NR Description: glycine-rich RNA-binding protein (AtGRP7)
MNSDDGGYGYGGSSYSSGARGGYRGAADIVPTASDDCFKCGRPGHWARECLYSDGGRPGRYSPPSRYGNGAGGRGDRFGGSDRFGNRYVDDRYDGGRYADDRYGGGRDRYPPAADRFSGDRYGGGDRYASGGFARERSYERDGGRPGGSYYRDEPRGTGAYGRGGPRVANGDRYGSGGPARLGASYRDRPAPYDRPTQGARSYDDRY

SEQ ID NO: 14377 - DNA, 1308 bp, Triticum aestivum
  misc_feature (1)..(1308): Ceres Seq. ID no. 14301886
cccaaatcccccgaatttgacccgtttctccgccgattcgcgtcaccccccctttctgctcgggtcggtgagtggtctcaacccccggagggatggggtacctgagcaccgtcatcggccaccccacggacggatcgccggtcagcggcggcggcctcagccagaatggtaagtttagctatggttatgcgagctccctgggtaaaagggcttccatggaagacttctatgagacaagaattgaaagtgtcgatgggcagcttattggtttattcggagtttttgatggtcatggtggtgctaaagtagctgagtatgtcaaacacaacctcttcagccatcttcttaggcatccaaagttcatgagcgacacaaaagtggctatagatgattcttataaaagtaccgacagtgagttcttggaatctgacagtactcaaaaccagtgtgggtcaacagcatcaactgctgtacttgttggtaatcgtctctttgtcgcaaatgttggagactccagggctatcatatgcagggcaggaaatgctgtacctgtttcgaaagatcacaagcctgatcagacagatgagcggcaacgtattgaagaagctggaggttttgttatgtgggcaggaacatggcgtgttggtggtgtacttgctgtttctcgcgcttttggtgacaagctcttaaagcagtatgtagttgtggatccagagatccgggaggaaatcgttgacgagtccctggagtttctcatccttgcaagcgatgggctgtgggatgtggtctctaacgaggaggctgtcgatatgacccggtcaatacaagacccagaggaagctgctaagaggctcttgcaggaggcctacaagcgggagagcagtgacaacataacctgcgtcgtcgtgcgcttctttcacgggcaagggagtagtgggcctgcttaaagcaggtgcgaagagttactctcaacttctcaagtcgacgttgtactgtgatgacacgcgtacatgccttgattgattcttaaggtttaaacgaagagaaactggaagtaggaaaagtgtactctgatatgagaacaaaagtttaggaacgaagtgtgccctaggccttagatttaacaataaatttgctggtgatgaactgatgaccgttcatcgtggtttagttgtggatggtgttgggtctgatgagtgtgttgtatcttgttgtggattgccaaaccatgtgtgagtgtgatgtaagcgattattgttgtactgaaattgagcaatgacaagtataattgagttgttggatggatct

SEQ ID NO: 14378 - protein, 284 aa, Triticum aestivum
  peptide (1)..(284): Ceres Seq. ID no. 14301887
  misc_feature (43)..(267): Pfam Name: Pfam Description:  Protein phosphatase 2C
  misc_feature (1)..(284): NCBI GI NO: 38345197 NR Description: OSJNBa0015K02.7
  misc_feature (42)..(284): NCBI GI NO: 19387276 NR Description: putative protein phosphatase 2C
  misc_feature (1)..(282): NCBI GI NO: 30689144 NR Description: protein phosphatase 2C (PP2C), putative
  misc_feature (1)..(274): NCBI GI NO: 20146110 NR Description: protein phosphatase 2C
  misc_feature (23)..(210): NCBI GI NO: 7486331 NR Description: hypothetical protein F28M20
  misc_feature (199)..(282): NCBI GI NO: 7486331 NR Description: hypothetical protein F28M20
  misc_feature (1)..(284): NCBI GI NO: 15238651 NR Description: protein phosphatase 2C (PP2C), putative
  misc_feature (1)..(281): NCBI GI NO: 18416366 NR Description: protein phosphatase 2C (PP2C) -related
  misc_feature (1)..(281): NCBI GI NO: 11358728 NR Description: protein phosphatase 2C-like protein
  misc_feature (18)..(274): NCBI GI NO: 30693757 NR Description: protein phosphatase 2C (PP2C), putative
MGYLSTVIGHPTDGSPVSGGGLSQNGKFSYGYASSLGKRASMEDFYETRIESVDGQLIGLFGVFDGHGGAKVAEYVKHNLFSHLLRHPKFMSDTKVAIDDSYKSTDSEFLESDSTQNQCGSTASTAVLVGNRLFVANVGDSRAIICRAGNAVPVSKDHKPDQTDERQRIEEAGGFVMWAGTWRVGGVLAVSRAFGDKLLKQYVVVDPEIREEIVDESLEFLILASDGLWDVVSNEEAVDMTRSIQDPEEAAKRLLQEAYKRESSDNITCVVVRFFHGQGSSGPA

SEQ ID NO: 14379 - protein, 243 aa, Triticum aestivum
  peptide (1)..(243): Ceres Seq. ID no. 14301888
  misc_feature (2)..(226): Pfam Name: Pfam Description:  Protein phosphatase 2C
  misc_feature (1)..(243): NCBI GI NO: 38345197 NR Description: OSJNBa0015K02.7
  misc_feature (1)..(243): NCBI GI NO: 19387276 NR Description: putative protein phosphatase 2C
  misc_feature (1)..(241): NCBI GI NO: 30689144 NR Description: protein phosphatase 2C (PP2C), putative
  misc_feature (1)..(233): NCBI GI NO: 20146110 NR Description: protein phosphatase 2C
  misc_feature (1)..(169): NCBI GI NO: 7486331 NR Description: hypothetical protein F28M20
  misc_feature (158)..(241): NCBI GI NO: 7486331 NR Description: hypothetical protein F28M20
  misc_feature (1)..(243): NCBI GI NO: 15238651 NR Description: protein phosphatase 2C (PP2C), putative
  misc_feature (1)..(240): NCBI GI NO: 18416366 NR Description: protein phosphatase 2C (PP2C) -related
  misc_feature (1)..(240): NCBI GI NO: 11358728 NR Description: protein phosphatase 2C-like protein
  misc_feature (1)..(233): NCBI GI NO: 30693757 NR Description: protein phosphatase 2C (PP2C), putative
MEDFYETRIESVDGQLIGLFGVFDGHGGAKVAEYVKHNLFSHLLRHPKFMSDTKVAIDDSYKSTDSEFLESDSTQNQCGSTASTAVLVGNRLFVANVGDSRAIICRAGNAVPVSKDHKPDQTDERQRIEEAGGFVMWAGTWRVGGVLAVSRAFGDKLLKQYVVVDPEIREEIVDESLEFLILASDGLWDVVSNEEAVDMTRSIQDPEEAAKRLLQEAYKRESSDNITCVVVRFFHGQGSSGPA

SEQ ID NO: 14380 - protein, 194 aa, Triticum aestivum
  peptide (1)..(194): Ceres Seq. ID no. 14301889
  misc_feature (1)..(177): Pfam Name: Pfam Description:  Protein phosphatase 2C
  misc_feature (1)..(194): NCBI GI NO: 38345197 NR Description: OSJNBa0015K02.7
  misc_feature (1)..(194): NCBI GI NO: 19387276 NR Description: putative protein phosphatase 2C
  misc_feature (1)..(192): NCBI GI NO: 30689144 NR Description: protein phosphatase 2C (PP2C), putative
  misc_feature (1)..(184): NCBI GI NO: 20146110 NR Description: protein phosphatase 2C
  misc_feature (1)..(120): NCBI GI NO: 7486331 NR Description: hypothetical protein F28M20
  misc_feature (109)..(192): NCBI GI NO: 7486331 NR Description: hypothetical protein F28M20
  misc_feature (1)..(194): NCBI GI NO: 15238651 NR Description: protein phosphatase 2C (PP2C), putative
  misc_feature (1)..(191): NCBI GI NO: 18416366 NR Description: protein phosphatase 2C (PP2C) -related
  misc_feature (1)..(191): NCBI GI NO: 11358728 NR Description: protein phosphatase 2C-like protein
  misc_feature (1)..(184): NCBI GI NO: 30693757 NR Description: protein phosphatase 2C (PP2C), putative
MSDTKVAIDDSYKSTDSEFLESDSTQNQCGSTASTAVLVGNRLFVANVGDSRAIICRAGNAVPVSKDHKPDQTDERQRIEEAGGFVMWAGTWRVGGVLAVSRAFGDKLLKQYVVVDPEIREEIVDESLEFLILASDGLWDVVSNEEAVDMTRSIQDPEEAAKRLLQEAYKRESSDNITCVVVRFFHGQGSSGPA

SEQ ID NO: 14381 - DNA, 2011 bp, Triticum aestivum
  misc_feature (1)..(2011): Ceres Seq. ID no. 14313636
atccctgtctcccccctccctcttaactgcaagcaagcaatgggggctcccaaatgggtggttgcgccattggcgctgctgctcctcctgcagctcgccggcgcgtcccatgacgtccgacggagccttgaggccgaggcggcgacgccgtccgtgccggcctccattcttagccccctgctccggacgggctaccacttccaaccccccatgaactggatcaacgatccgaatggtccgctctactacaagggatggtaccacctgttctaccagtacaaccccaagggcgcggtgtggggcaacatcatctgggcgcactcggtgtcgcgcgacctcatcaactggatggccctcgaccccgccatcaagcccagcattccgaccgaccagtacggcgtctggtccggctcggcgacgatcctgcccaacggcacggtggcgatgctctacaccggcatcgaccgcccgggcaccaactaccagatccagaacatcgccttccccaaggacccctccgacccgctgctccgcgagtgggtcaagcccggctacaaccccatcgccgtccccgaggccggcatcaacgccacgcagttccgcgacccgaccaccgcctggcacgccggcgatggcctctggcgcatgctcgtgggcgggctcaagcccggcacgctccgcggcatggccatcctgtaccggagcagggacttcaagcactgggtccgcgccaagcacccgctccactcggccctcaccggcatgtgggagtgccccgacttcttccccgtgcgcgagcccgggaagacggacggcctcgacacctccgagttcggcccgcgctacaagtacgtgctcaagaacagcctcgacctcacccgctacgactactacaccgtgggcacctacaacaaccgcacggagcggtacgtgcccgacaaccccaccggcgacgtctaccagcggctccagtacgactacggcaacttctacgcgtccaagaccttctacgacccggccaagaaccgccgcgtgctgctgggctgggccaacgagtccgacagcgtcgcgcacgacaacgccaagggatgggccggcatccacgcgatcccgaggaagatatggctggaccccagcggcaagcagctgctgcagtggcccgtggaggagctggaccagctgaggggcaaggctgtcagcgtgggtgacaagctcgtcaagcccggccagcactttgaggtcactggcctgcagtcctaccagtctgacgtggaggtgagcttcgaggtgtcgagcctggacaaggcggagccgttcgatccggcctacgccaacgacgcgcagaagctctgcgggatgaagaacgccgacgtcaagggcggggtggggcccttcggcctctgggtcctggcctctgacaacctggccgagaagaccgccgtgttcttcagagtcttcaaggatgggcatggcaagcctctcgtcctcatgtgcagtgaccccaccaagtcatctctcaccccgggtctatacaagccgacttttgccgggtttgtcgacaccgacatttcgtccgggaagatctctctgagaagcttgatcgaccgatcggtggttgagagcttcggcgccggagggaagacctgcatcctatcgagagtgtacccatccatggcgatcgggaaagacgcacacctttatgtgttcaacaacggggtgaccgatatcaaggtgtccaaactaacggcgtgggagatgaaaaaaccaatgatgaatggtgcctaagtagtatataccgtatatgttttctcatgagtttaagtttttgttgaatgccattcgacatcgatgcacaccacgcaactgattgctcgtcttaatgaagacctctttgagtagaagtggttagagaaatttgttgtacaattgataatttctgtcacgtgttgtacgaataaacatgatgatcccacgctgaagacaataaagaccttaatgaatttcttctttc

SEQ ID NO: 14382 - protein, 594 aa, Triticum aestivum
  peptide (1)..(594): Ceres Seq. ID no. 14313637
  misc_feature (66)..(546): Pfam Name: Pfam Description:  Glycosyl hydrolases family 32
  misc_feature (14)..(594): NCBI GI NO: 33694262 NR Description: cell wall invertase 1
  misc_feature (14)..(594): NCBI GI NO: 20196210 NR Description: cell wall invertase
  misc_feature (16)..(594): NCBI GI NO: 4105721 NR Description: cell wall invertase Incw1; beta-fructosidase
  misc_feature (16)..(594): NCBI GI NO: 1352469 NR Description: BETA-FRUCTOFURANOSIDASE
  misc_feature (61)..(594): NCBI GI NO: 31872120 NR Description: cell wall invertase [Saccharum hybrid cultivar]
  misc_feature (22)..(594): NCBI GI NO: 6318659 NR Description: cell wall invertase 2 [Zea mays]
  misc_feature (22)..(594): NCBI GI NO: 4105719 NR Description: cell wall invertase Incw2; beta-fructosidase
  misc_feature (22)..(594): NCBI GI NO: 7435479 NR Description: beta-fructofuranosidase (EC 3
  misc_feature (22)..(594): NCBI GI NO: 6318661 NR Description: cell wall invertase 2 [Zea mays]
  misc_feature (62)..(586): NCBI GI NO: 124713 NR Description: ACID BETA-FRUCTOFURANOSIDASE PRECURSOR
IPVSPLPLNCKQAMGAPKWVVAPLALLLLLQLAGASHDVRRSLEAEAATPSVPASILSPLLRTGYHFQPPMNWINDPNGPLYYKGWYHLFYQYNPKGAVWGNIIWAHSVSRDLINWMALDPAIKPSIPTDQYGVWSGSATILPNGTVAMLYTGIDRPGTNYQIQNIAFPKDPSDPLLREWVKPGYNPIAVPEAGINATQFRDPTTAWHAGDGLWRMLVGGLKPGTLRGMAILYRSRDFKHWVRAKHPLHSALTGMWECPDFFPVREPGKTDGLDTSEFGPRYKYVLKNSLDLTRYDYYTVGTYNNRTERYVPDNPTGDVYQRLQYDYGNFYASKTFYDPAKNRRVLLGWANESDSVAHDNAKGWAGIHAIPRKIWLDPSGKQLLQWPVEELDQLRGKAVSVGDKLVKPGQHFEVTGLQSYQSDVEVSFEVSSLDKAEPFDPAYANDAQKLCGMKNADVKGGVGPFGLWVLASDNLAEKTAVFFRVFKDGHGKPLVLMCSDPTKSSLTPGLYKPTFAGFVDTDISSGKISLRSLIDRSVVESFGAGGKTCILSRVYPSMAIGKDAHLYVFNNGVTDIKVSKLTAWEMKKPMMNGA

SEQ ID NO: 14383 - protein, 581 aa, Triticum aestivum
  peptide (1)..(581): Ceres Seq. ID no. 14313638
  misc_feature (53)..(533): Pfam Name: Pfam Description:  Glycosyl hydrolases family 32
  misc_feature (1)..(581): NCBI GI NO: 33694262 NR Description: cell wall invertase 1
  misc_feature (1)..(581): NCBI GI NO: 20196210 NR Description: cell wall invertase
  misc_feature (3)..(581): NCBI GI NO: 4105721 NR Description: cell wall invertase Incw1; beta-fructosidase
  misc_feature (3)..(581): NCBI GI NO: 1352469 NR Description: BETA-FRUCTOFURANOSIDASE
  misc_feature (48)..(581): NCBI GI NO: 31872120 NR Description: cell wall invertase [Saccharum hybrid cultivar]
  misc_feature (9)..(581): NCBI GI NO: 6318659 NR Description: cell wall invertase 2 [Zea mays]
  misc_feature (9)..(581): NCBI GI NO: 4105719 NR Description: cell wall invertase Incw2; beta-fructosidase
  misc_feature (9)..(581): NCBI GI NO: 7435479 NR Description: beta-fructofuranosidase (EC 3
  misc_feature (9)..(581): NCBI GI NO: 6318661 NR Description: cell wall invertase 2 [Zea mays]
  misc_feature (49)..(573): NCBI GI NO: 124713 NR Description: ACID BETA-FRUCTOFURANOSIDASE PRECURSOR
MGAPKWVVAPLALLLLLQLAGASHDVRRSLEAEAATPSVPASILSPLLRTGYHFQPPMNWINDPNGPLYYKGWYHLFYQYNPKGAVWGNIIWAHSVSRDLINWMALDPAIKPSIPTDQYGVWSGSATILPNGTVAMLYTGIDRPGTNYQIQNIAFPKDPSDPLLREWVKPGYNPIAVPEAGINATQFRDPTTAWHAGDGLWRMLVGGLKPGTLRGMAILYRSRDFKHWVRAKHPLHSALTGMWECPDFFPVREPGKTDGLDTSEFGPRYKYVLKNSLDLTRYDYYTVGTYNNRTERYVPDNPTGDVYQRLQYDYGNFYASKTFYDPAKNRRVLLGWANESDSVAHDNAKGWAGIHAIPRKIWLDPSGKQLLQWPVEELDQLRGKAVSVGDKLVKPGQHFEVTGLQSYQSDVEVSFEVSSLDKAEPFDPAYANDAQKLCGMKNADVKGGVGPFGLWVLASDNLAEKTAVFFRVFKDGHGKPLVLMCSDPTKSSLTPGLYKPTFAGFVDTDISSGKISLRSLIDRSVVESFGAGGKTCILSRVYPSMAIGKDAHLYVFNNGVTDIKVSKLTAWEMKKPMMNGA

SEQ ID NO: 14384 - protein, 524 aa, Triticum aestivum
  peptide (1)..(524): Ceres Seq. ID no. 14313639
  misc_feature (1)..(476): Pfam Name: Pfam Description:  Glycosyl hydrolases family 32
  misc_feature (1)..(524): NCBI GI NO: 33694262 NR Description: cell wall invertase 1
  misc_feature (1)..(524): NCBI GI NO: 20196210 NR Description: cell wall invertase
  misc_feature (1)..(524): NCBI GI NO: 4105721 NR Description: cell wall invertase Incw1; beta-fructosidase
  misc_feature (1)..(524): NCBI GI NO: 1352469 NR Description: BETA-FRUCTOFURANOSIDASE
  misc_feature (1)..(524): NCBI GI NO: 31872120 NR Description: cell wall invertase [Saccharum hybrid cultivar]
  misc_feature (1)..(524): NCBI GI NO: 6318659 NR Description: cell wall invertase 2 [Zea mays]
  misc_feature (1)..(524): NCBI GI NO: 4105719 NR Description: cell wall invertase Incw2; beta-fructosidase
  misc_feature (1)..(524): NCBI GI NO: 7435479 NR Description: beta-fructofuranosidase (EC 3
  misc_feature (1)..(524): NCBI GI NO: 6318661 NR Description: cell wall invertase 2 [Zea mays]
  misc_feature (1)..(516): NCBI GI NO: 124713 NR Description: ACID BETA-FRUCTOFURANOSIDASE PRECURSOR
MNWINDPNGPLYYKGWYHLFYQYNPKGAVWGNIIWAHSVSRDLINWMALDPAIKPSIPTDQYGVWSGSATILPNGTVAMLYTGIDRPGTNYQIQNIAFPKDPSDPLLREWVKPGYNPIAVPEAGINATQFRDPTTAWHAGDGLWRMLVGGLKPGTLRGMAILYRSRDFKHWVRAKHPLHSALTGMWECPDFFPVREPGKTDGLDTSEFGPRYKYVLKNSLDLTRYDYYTVGTYNNRTERYVPDNPTGDVYQRLQYDYGNFYASKTFYDPAKNRRVLLGWANESDSVAHDNAKGWAGIHAIPRKIWLDPSGKQLLQWPVEELDQLRGKAVSVGDKLVKPGQHFEVTGLQSYQSDVEVSFEVSSLDKAEPFDPAYANDAQKLCGMKNADVKGGVGPFGLWVLASDNLAEKTAVFFRVFKDGHGKPLVLMCSDPTKSSLTPGLYKPTFAGFVDTDISSGKISLRSLIDRSVVESFGAGGKTCILSRVYPSMAIGKDAHLYVFNNGVTDIKVSKLTAWEMKKPMMNGA

SEQ ID NO: 14385 - DNA, 1635 bp, Triticum aestivum
  misc_feature (1)..(1635): Ceres Seq. ID no. 14313463
aaacaagtgtacctctatctcgccgtcgcctccccgctccttgcttccgcccggccgtttctctagggtttaacgccatggacgtcgaggacgagctcccgaccgcccccgcgtccgcggacggcggcgaatcctcgcacgcgctggtgtccggcgaccagttcgacgtggaggcgtacgcggcgcagtactcggggcgcacgcgcgtggcgcggcttctcttcatcgcggagaagtgcgggtcggagcagatgcggctggatgcgctccggctggcctacgactgggccctcaagggagaggacacggccctccaccgcgacgtctccgccaagatcgccggccgcctcggcccccgctacgcagccgaccaggcctggtccgacgccgtcgagcgccgcgccctgctgcgcaaggataagcttgacagcgagctcaatgtctacaggaccaatctgatcaaagagagtattcggatgggctacaatgaccttggtgatttccactatgctcaaggccacctttcagacgccttcaagagctatatcaggacccgcgattactgcacgacctccaagcatgttgttcagatgtgcttgaatgtcatacttgttagcattgagctggggcaatttatgcacgtgtcaaattatgtcatcaaggcggagcagaccccagacgatatggatcctattactgccgccaagttgcgagctgctgctggattagcctacatggaaacaaacaagtacaaacttgctgcccggaagtttatagagacaggatcagagctaaggagcaactattctgaagttatagctccacaagatgttgctgtctatggtgcactatgcgcgcttgcttcttttgatcgctcagagctgaagagcaaagttattgacaactacaattttcgcaattttttggagttagtgcctgaagtaagggagctggtaaatgatttttatgcaagccgctatgggtcatgtctgggatatcttgagaagctgaagtcaaacctgctgctggatatgcatttgcatgcgcatatagaaactctgtacaaggacattcgacacaaagccatcatacagtacacattcccattcatatctgttgatctcaacttgatggctgttgccttccagacctccgtgtccctgctagagaaagagctggcagcgcttatcactgataacaaaatacaggctcgtatcgactcgcacaacaagattctatacgcaagccacgccgaccaaaggaacggaactttccagcgtgctctgcagactggcattgagtttgagagggatgtcaagtccatgcttctgagggcgaacctcctcaagcacgagtacagccagaaggcagcagaaaggaaggtgtgaaaacaagttctccttggtttggacctgaggtgcattgagagattttagtgatgatttgtgccatagtcaagtgtttcatgtcatgatcttccatattcaagctaagatactagatttaagtatgttttagagcacacaaagataatataacttctgccatgcacgtcttttgcggagactatgtggttaattttgtactacgtactggcattcattttggagttttcgtatagactcatttgaagct

SEQ ID NO: 14386 - protein, 461 aa, Triticum aestivum
  peptide (1)..(461): Ceres Seq. ID no. 14313464
  misc_feature (312)..(416): Pfam Name: Pfam Description:  PCI domain
  misc_feature (26)..(461): NCBI GI NO: 7208213 NR Description: constitutive photomorphogenic 11
  misc_feature (26)..(461): NCBI GI NO: 10443485 NR Description: rCOP11 protein [Oryza sativa]
  misc_feature (27)..(459): NCBI GI NO: 18411857 NR Description: COP9 complex subunit, FUS6 [Arabidopsis thaliana]
  misc_feature (27)..(459): NCBI GI NO: 432446 NR Description: FUS6
  misc_feature (33)..(459): NCBI GI NO: 26450149 NR Description: putative FUSCA protein FUS6 [Arabidopsis thaliana]
  misc_feature (27)..(459): NCBI GI NO: 11282867 NR Description: FUSCA PROTEIN FUS6 - Arabidopsis thaliana
  misc_feature (120)..(460): NCBI GI NO: 24666528 NR Description: COP9 complex homolog subunit 1 CG3889-PA
  misc_feature (17)..(92): NCBI GI NO: 24666528 NR Description: COP9 complex homolog subunit 1 CG3889-PA
  misc_feature (120)..(460): NCBI GI NO: 4732103 NR Description: COP9 signalosome subunit 1 CSN1
  misc_feature (17)..(92): NCBI GI NO: 4732103 NR Description: COP9 signalosome subunit 1 CSN1
TSVPLSRRRLPAPCFRPAVSLGFNAMDVEDELPTAPASADGGESSHALVSGDQFDVEAYAAQYSGRTRVARLLFIAEKCGSEQMRLDALRLAYDWALKGEDTALHRDVSAKIAGRLGPRYAADQAWSDAVERRALLRKDKLDSELNVYRTNLIKESIRMGYNDLGDFHYAQGHLSDAFKSYIRTRDYCTTSKHVVQMCLNVILVSIELGQFMHVSNYVIKAEQTPDDMDPITAAKLRAAAGLAYMETNKYKLAARKFIETGSELRSNYSEVIAPQDVAVYGALCALASFDRSELKSKVIDNYNFRNFLELVPEVRELVNDFYASRYGSCLGYLEKLKSNLLLDMHLHAHIETLYKDIRHKAIIQYTFPFISVDLNLMAVAFQTSVSLLEKELAALITDNKIQARIDSHNKILYASHADQRNGTFQRALQTGIEFERDVKSMLLRANLLKHEYSQKAAERKV

SEQ ID NO: 14387 - protein, 436 aa, Triticum aestivum
  peptide (1)..(436): Ceres Seq. ID no. 14313465
  misc_feature (287)..(391): Pfam Name: Pfam Description:  PCI domain
  misc_feature (1)..(436): NCBI GI NO: 7208213 NR Description: constitutive photomorphogenic 11
  misc_feature (1)..(436): NCBI GI NO: 10443485 NR Description: rCOP11 protein [Oryza sativa]
  misc_feature (2)..(434): NCBI GI NO: 18411857 NR Description: COP9 complex subunit, FUS6 [Arabidopsis thaliana]
  misc_feature (2)..(434): NCBI GI NO: 432446 NR Description: FUS6
  misc_feature (8)..(434): NCBI GI NO: 26450149 NR Description: putative FUSCA protein FUS6 [Arabidopsis thaliana]
  misc_feature (2)..(434): NCBI GI NO: 11282867 NR Description: FUSCA PROTEIN FUS6 - Arabidopsis thaliana
  misc_feature (95)..(435): NCBI GI NO: 24666528 NR Description: COP9 complex homolog subunit 1 CG3889-PA
  misc_feature (1)..(67): NCBI GI NO: 24666528 NR Description: COP9 complex homolog subunit 1 CG3889-PA
  misc_feature (95)..(435): NCBI GI NO: 4732103 NR Description: COP9 signalosome subunit 1 CSN1
  misc_feature (1)..(67): NCBI GI NO: 4732103 NR Description: COP9 signalosome subunit 1 CSN1
MDVEDELPTAPASADGGESSHALVSGDQFDVEAYAAQYSGRTRVARLLFIAEKCGSEQMRLDALRLAYDWALKGEDTALHRDVSAKIAGRLGPRYAADQAWSDAVERRALLRKDKLDSELNVYRTNLIKESIRMGYNDLGDFHYAQGHLSDAFKSYIRTRDYCTTSKHVVQMCLNVILVSIELGQFMHVSNYVIKAEQTPDDMDPITAAKLRAAAGLAYMETNKYKLAARKFIETGSELRSNYSEVIAPQDVAVYGALCALASFDRSELKSKVIDNYNFRNFLELVPEVRELVNDFYASRYGSCLGYLEKLKSNLLLDMHLHAHIETLYKDIRHKAIIQYTFPFISVDLNLMAVAFQTSVSLLEKELAALITDNKIQARIDSHNKILYASHADQRNGTFQRALQTGIEFERDVKSMLLRANLLKHEYSQKAAERKV

SEQ ID NO: 14388 - protein, 378 aa, Triticum aestivum
  peptide (1)..(378): Ceres Seq. ID no. 14313466
  misc_feature (229)..(333): Pfam Name: Pfam Description:  PCI domain
  misc_feature (1)..(378): NCBI GI NO: 7208213 NR Description: constitutive photomorphogenic 11
  misc_feature (1)..(378): NCBI GI NO: 10443485 NR Description: rCOP11 protein [Oryza sativa]
  misc_feature (1)..(376): NCBI GI NO: 18411857 NR Description: COP9 complex subunit, FUS6 [Arabidopsis thaliana]
  misc_feature (1)..(376): NCBI GI NO: 432446 NR Description: FUS6
  misc_feature (1)..(376): NCBI GI NO: 26450149 NR Description: putative FUSCA protein FUS6 [Arabidopsis thaliana]
  misc_feature (1)..(376): NCBI GI NO: 11282867 NR Description: FUSCA PROTEIN FUS6 - Arabidopsis thaliana
  misc_feature (37)..(377): NCBI GI NO: 24666528 NR Description: COP9 complex homolog subunit 1 CG3889-PA
  misc_feature (37)..(377): NCBI GI NO: 4732103 NR Description: COP9 signalosome subunit 1 CSN1
  misc_feature (40)..(377): NCBI GI NO: 21703742 NR Description: G protein pathway suppressor 1 [Mus musculus]
  misc_feature (40)..(377): NCBI GI NO: 16758860 NR Description: G protein pathway suppressor 1 [Rattus norvegicus]
MRLDALRLAYDWALKGEDTALHRDVSAKIAGRLGPRYAADQAWSDAVERRALLRKDKLDSELNVYRTNLIKESIRMGYNDLGDFHYAQGHLSDAFKSYIRTRDYCTTSKHVVQMCLNVILVSIELGQFMHVSNYVIKAEQTPDDMDPITAAKLRAAAGLAYMETNKYKLAARKFIETGSELRSNYSEVIAPQDVAVYGALCALASFDRSELKSKVIDNYNFRNFLELVPEVRELVNDFYASRYGSCLGYLEKLKSNLLLDMHLHAHIETLYKDIRHKAIIQYTFPFISVDLNLMAVAFQTSVSLLEKELAALITDNKIQARIDSHNKILYASHADQRNGTFQRALQTGIEFERDVKSMLLRANLLKHEYSQKAAERKV

SEQ ID NO: 14389 - DNA, 994 bp, Triticum aestivum
  misc_feature (1)..(994): Ceres Seq. ID no. 13655622
ccgacgagcggctgggctcggttagccaaaggagcaagccctagctcgcccaaatccccgctcccctccccctcgccgaacaaatgtccgaccgccgccgcgacagggagaggccccgcgagcgcggcggctacgaccagccgcgggagcgcgaccacgacgccgaccgccaccgcgaccgggaccgcgacgtcgaccgccaccgggaccgggaccgcggccaggacaaggagcgggaccgggaccgggactaccgccgcgcccgcaagcgctcgcgctcccgctccccctcggccgacagggaccgcgcccgccgccgccgctcccactcccactcccacccccaccggtcacgctcccccgacgccggccgccacaagcgccgccgcgaggggtcgcccgtcgccgactcgaaggaggacaggaagccggatccccccaaggccgccgaggaggcggccgccccggtgggcgacggggacgtggacgcggaggagctggagatgatgaagatgatggggatccccgtcgggttcgactccaccaagggcaagtacgtccccggcgccgacgtcagcggcgtgcgcgccgtcaccaagcgccagccgcggcagtacatgaaccgcaggggcgggttcaaccgtcccctgccgcccgaggtcaaccgctgaggaggatcatgtatcactgcagtatacctcgttgctggaatgcaaacttgcggttgattactagacttctttgctggccatagcaaggattgagcttctactgtctaccaagcatgtataaccttgatggctagttactttgccaaactttgcagactgagacatgtagttctcgttttcatcatttgctctgtcgacattccagggaaagatattggtggcgtgtttttggaaatgtggtttagaaaattacatgatgtttctgcacataatttgtatgtttttcaggcatgcaccacatggaatggaacttgtgatgatgc

SEQ ID NO: 14390 - protein, 195 aa, Triticum aestivum
  peptide (1)..(195): Ceres Seq. ID no. 13655623
  misc_feature (4)..(85): Pfam Name: Pfam Description:  SART-1 family
  misc_feature (1)..(195): NCBI GI NO: 21592725 NR Description: unknown [Arabidopsis thaliana]
  misc_feature (1)..(195): NCBI GI NO: 18423973 NR Description: expressed protein [Arabidopsis thaliana]
  misc_feature (12)..(189): NCBI GI NO: 34856367 NR Description: similar to putative nucleic acid binding proteinRY-1
  misc_feature (4)..(191): NCBI GI NO: 23478750 NR Description: cyclophilin-RNA interacting protein
  misc_feature (33)..(189): NCBI GI NO: 7513213 NR Description: nucleic acid binding protein - human (fragment)
  misc_feature (31)..(189): NCBI GI NO: 24307919 NR Description: putative nucleic acid binding protein RY-1
  misc_feature (29)..(189): NCBI GI NO: 27228990 NR Description: putative nucleic acid binding protein RY-1
  misc_feature (1)..(134): NCBI GI NO: 34873791 NR Description: similar to ATP-dependent helicase DDX8
  misc_feature (8)..(191): NCBI GI NO: 40738944 NR Description: hypothetical protein AN6605.2
  misc_feature (4)..(189): NCBI GI NO: 27413622 NR Description: putative RNA-binding protein
MSDRRRDRERPRERGGYDQPRERDHDADRHRDRDRDVDRHRDRDRGQDKERDRDRDYRRARKRSRSRSPSADRDRARRRRSHSHSHPHRSRSPDAGRHKRRREGSPVADSKEDRKPDPPKAAEEAAAPVGDGDVDAEELEMMKMMGIPVGFDSTKGKYVPGADVSGVRAVTKRQPRQYMNRRGGFNRPLPPEVNR

SEQ ID NO: 14391 - protein, 168 aa, Triticum aestivum
  peptide (1)..(168): Ceres Seq. ID no. 13655624
  misc_feature (2)..(168): Pfam Name: Pfam Description:  Equine herpesvirus glycoprotein gp2
  misc_feature (1)..(168): NCBI GI NO: 28574039 NR Description: Salivary gland secretion 1 CG3047-PA
  misc_feature (1)..(168): NCBI GI NO: 28574039 NR Description: Salivary gland secretion 1 CG3047-PA
  misc_feature (1)..(168): NCBI GI NO: 28574039 NR Description: Salivary gland secretion 1 CG3047-PA
  misc_feature (1)..(168): NCBI GI NO: 28574039 NR Description: Salivary gland secretion 1 CG3047-PA
  misc_feature (1)..(168): NCBI GI NO: 28574039 NR Description: Salivary gland secretion 1 CG3047-PA
  misc_feature (1)..(168): NCBI GI NO: 28574039 NR Description: Salivary gland secretion 1 CG3047-PA
  misc_feature (1)..(168): NCBI GI NO: 28574039 NR Description: Salivary gland secretion 1 CG3047-PA
  misc_feature (1)..(168): NCBI GI NO: 28574039 NR Description: Salivary gland secretion 1 CG3047-PA
  misc_feature (1)..(168): NCBI GI NO: 28574039 NR Description: Salivary gland secretion 1 CG3047-PA
  misc_feature (12)..(168): NCBI GI NO: 28574039 NR Description: Salivary gland secretion 1 CG3047-PA
PTSGWARLAKGASPSSPKSPLPSPSPNKCPTAAATGRGPASAAATTSRGSATTTPTATATGTATSTATGTGTAARTRSGTGTGTTAAPASARAPAPPRPTGTAPAAAAPTPTPTPTGHAPPTPAATSAAARGRPSPTRRRTGSRIPPRPPRRRPPRWATGTWTRRSWR

SEQ ID NO: 14392 - DNA, 1219 bp, Triticum aestivum
  misc_feature (1)..(1219): Ceres Seq. ID no. 13584238
atcgaaaatccatccattagcatccatctccggctagcaacacaaacgaccttctctttctcctctttcttcagggtagtcggccggagtccgggacgaagccggcggcgaagactccaaagaggatcatcatcagttcatcgcacaaatcgaccagccatgtgtaacaacagcggcggccgcggcggggcgatggcggctcggaaggggccgtggacggagaacgaggacgcccaactggtatggttcgtgcgcttgctcggcgaacgccgttgggatttcttagctcaggtctcaggtttgcgcggtggcgggtgatcgatccaacctgacctctacggccagtcaccattaatcttcttcttctccctcccctcctccggcgtgttctcggctgtgctccatgcaggtctccggcgcaccggcaagagctgccgcctccgctgggtcaactacctccacccgggcctcaagcgcggacgcatcaccgccgacgaggagcggctcatcctcagcctccacgccgagtggggctcccggtggtccaggatcgctaggaagctccccggccgcaccgacaacgagatcaagaactactggaggacgcacatgaggaagaaggcccaggaggagaagatgctggccaagaagaaggcctcatcctcgccctcctcctcctcctcctcgaccacgtcgctgacctgctcggcctcccccacggccacgtcgtcctcggcggccaccaccgaggcgccccaggagagcactactactagcatggacgacgaggccgagcaggaggccaccacgtcggcgagcgaggagaagaaggcggaggtggtgcagtactgctccgccgtggacatggaccagctctggaacgacatcgccgcgtcggagagctacccggagatgatgatgagctggggcgcagccggccacgtggccatgcccgcccccgctgtggagccctcgtcgccggtgtgggagttctgcgaggattactccctgtggaggatcgacgaccaagagtactacaacaagatcgatcaacacgctctgaattgagaggctttcgttacgtttctcttgttgttcttgttcttcctagctagctagcttaattgcatgtattactatatactaattcatgcatgtaattatatgtaaaacttgagttgtgagattatattggtgacagctttttgcgcacatgtgt

SEQ ID NO: 14393 - protein, 152 aa, Triticum aestivum
  peptide (1)..(152): Ceres Seq. ID no. 13584239
  misc_feature (1)..(106): NCBI GI NO: 15231343 NR Description: Myb family transcription factor
  misc_feature (1)..(59): NCBI GI NO: 11358547 NR Description: myb-related transcription factor MYB59
  misc_feature (1)..(59): NCBI GI NO: 15238519 NR Description: myb family transcription factor
  misc_feature (1)..(48): NCBI GI NO: 34906070 NR Description: putative Myb factor protein
  misc_feature (1)..(93): NCBI GI NO: 11967859 NR Description: Myb factor protein
  misc_feature (1)..(59): NCBI GI NO: 30697277 NR Description: myb family transcription factor
  misc_feature (1)..(72): NCBI GI NO: 15230731 NR Description: myb family transcription factor (MYB108)
  misc_feature (1)..(106): NCBI GI NO: 18415984 NR Description: myb family transcription factor
  misc_feature (1)..(131): NCBI GI NO: 7438337 NR Description: myb-related protein myb1
  misc_feature (1)..(108): NCBI GI NO: 2832404 NR Description: R2R3-MYB transcription factor
MRKKAQEEKMLAKKKASSSPSSSSSSTTSLTCSASPTATSSSAATTEAPQESTTTSMDDEAEQEATTSASEEKKAEVVQYCSAVDMDQLWNDIAASESYPEMMMSWGAAGHVAMPAPAVEPSSPVWEFCEDYSLWRIDDQEYYNKIDQHALN

SEQ ID NO: 14394 - protein, 143 aa, Triticum aestivum
  peptide (1)..(143): Ceres Seq. ID no. 13584240
  misc_feature (1)..(97): NCBI GI NO: 15231343 NR Description: Myb family transcription factor
  misc_feature (1)..(50): NCBI GI NO: 11358547 NR Description: myb-related transcription factor MYB59
  misc_feature (1)..(50): NCBI GI NO: 15238519 NR Description: myb family transcription factor
  misc_feature (1)..(39): NCBI GI NO: 34906070 NR Description: putative Myb factor protein
  misc_feature (1)..(84): NCBI GI NO: 11967859 NR Description: Myb factor protein
  misc_feature (1)..(50): NCBI GI NO: 30697277 NR Description: myb family transcription factor
  misc_feature (1)..(63): NCBI GI NO: 15230731 NR Description: myb family transcription factor (MYB108)
  misc_feature (1)..(97): NCBI GI NO: 18415984 NR Description: myb family transcription factor
  misc_feature (1)..(122): NCBI GI NO: 7438337 NR Description: myb-related protein myb1
  misc_feature (1)..(99): NCBI GI NO: 2832404 NR Description: R2R3-MYB transcription factor
MLAKKKASSSPSSSSSSTTSLTCSASPTATSSSAATTEAPQESTTTSMDDEAEQEATTSASEEKKAEVVQYCSAVDMDQLWNDIAASESYPEMMMSWGAAGHVAMPAPAVEPSSPVWEFCEDYSLWRIDDQEYYNKIDQHALN

SEQ ID NO: 14395 - protein, 105 aa, Triticum aestivum
  peptide (1)..(105): Ceres Seq. ID no. 13584241
  misc_feature (68)..(105): NCBI GI NO: 15231343 NR Description: Myb family transcription factor
  misc_feature (68)..(105): NCBI GI NO: 11358547 NR Description: myb-related transcription factor MYB59
  misc_feature (68)..(105): NCBI GI NO: 15238519 NR Description: myb family transcription factor
  misc_feature (68)..(105): NCBI GI NO: 34906070 NR Description: putative Myb factor protein
  misc_feature (68)..(105): NCBI GI NO: 11967859 NR Description: Myb factor protein
  misc_feature (65)..(105): NCBI GI NO: 34895506 NR Description: putative myb-related transcription factor
  misc_feature (65)..(105): NCBI GI NO: 15230731 NR Description: myb family transcription factor (MYB108)
  misc_feature (65)..(105): NCBI GI NO: 18415984 NR Description: myb family transcription factor
  misc_feature (68)..(105): NCBI GI NO: 34894466 NR Description: putative dehydration-induced myb-related proteinCpm7
  misc_feature (55)..(105): NCBI GI NO: 18395645 NR Description: myb family transcription factor(MYB116)
IENPSISIHLRLATQTTFSFSSFFRVVGRSPGRSRRRRLQRGSSSVHRTNRPAMCNNSGGRGGAMAARKGPWTENEDAQLVWFVRLLGERRWDFLAQVSGLRGGG

SEQ ID NO: 14396 - DNA, 1314 bp, Triticum aestivum
  misc_feature (1)..(1314): Ceres Seq. ID no. 13656079
caagaagaaggaacgaatttgtcagccgacctagaggaagaggaagagaagagcgcaacgcaagcagaggcaagaatggcgatggcgaggaggagggccctcgcgctcgtgtcccagatcctacagaggcgggttctccccgcgccgcgcttcctctcgtcggcggccggcggcgctctagaccgcctcaattcgccgcccttcgcgcgccaggccgcgcacaggaaccccgctcctccttccccatgggatcggctcggagggcagaagaggaccatgttcatccagacgcagtcgacccccaacccgcagtcgctcatgttccatcctggaaagccggttatggaagttgggagctctgatttccctcatgctcggaccgccatgacatctcctttggcgaaggcgctgtttgcgatagaaggcgttacgagagtattctttggatctgattttgtaactgtgacaaaatctgacgagacttcatgggattatcttaagcctgaggtatttgctgcgataatggatttctactcatctggacagccacttttcctggactcaaataccgcagctgctatggacacagcaattcatgaggatgattcagaaatagttgctatgataaaagaactattggagacccgcattcgtccggctgttcaagatgatggtggtgacattgaataccgaggatttgagccagaaacagggatagtgaagctaaaaatgcaaggtgcctgcagtggctgcccgagttcatcagtcacgttgaaatctggcatagagaacatgctcatgcactatgtgcccgaggtgaaaggagtggagcaagagtttgatggtgatgaggaagctgaactggctggccagatggaatgagtttttacatttaaatcgcaaccatgtgacatgctgttcagggaaaccatgctacgcatgaaacgtcccggagaatttaaaccactcttaaaaccataggttaccactatattttgtgagataaaccaggagtagcctggagtttttgtgatgattagatggttgtaattttgatcagatgtgtgcaagaagcagactatcgtacatgctagagaggcagcagtagcctaaaccaacatcgactgcagtagggctgaataaagtgatagttggattgatctttccttttgtccaacactttatatgctgagcttgctaatagcaaaggtcatcactttggcatgacaggtgtaatttcatggtggttatttctgctatgtatatgtactttgtaagttttgcatttgcctctgcaagaatggttatggctgc

SEQ ID NO: 14397 - protein, 293 aa, Triticum aestivum
  peptide (1)..(293): Ceres Seq. ID no. 15220564
  misc_feature (209)..(279): Pfam Name: Pfam Description:  NifU-like domain
  misc_feature (28)..(293): NCBI GI NO: 34897632 NR Description: hypothetical protein [Oryza sativa]
  misc_feature (38)..(292): NCBI GI NO: 18402817 NR Description: expressed protein [Arabidopsis thaliana]
  misc_feature (38)..(293): NCBI GI NO: 25405462 NR Description: unknown protein, 90320-88994
  misc_feature (90)..(293): NCBI GI NO: 15223842 NR Description: expressed protein [Arabidopsis thaliana]
  misc_feature (68)..(287): NCBI GI NO: 12834577 NR Description: unnamed protein product [Mus musculus]
  misc_feature (93)..(287): NCBI GI NO: 26324295 NR Description: unnamed protein product [Mus musculus]
  misc_feature (68)..(287): NCBI GI NO: 34500321 NR Description: NifU-like protein HIRIP5 [Mus musculus]
  misc_feature (93)..(287): NCBI GI NO: 9910264 NR Description: histone cell cycle regulation defective interacting protein 5
  misc_feature (91)..(285): NCBI GI NO: 37681825 NR Description: HIRA interacting protein 5 [Danio rerio]
  misc_feature (91)..(287): NCBI GI NO: 34856373 NR Description: similar to HIRA-interacting protein 5 (mHIRIP5)
QEEGTNLSADLEEEEEKSATQAEARMAMARRRALALVSQILQRRVLPAPRFLSSAAGGALDRLNSPPFARQAAHRNPAPPSPWDRLGGQKRTMFIQTQSTPNPQSLMFHPGKPVMEVGSSDFPHARTAMTSPLAKALFAIEGVTRVFFGSDFVTVTKSDETSWDYLKPEVFAAIMDFYSSGQPLFLDSNTAAAMDTAIHEDDSEIVAMIKELLETRIRPAVQDDGGDIEYRGFEPETGIVKLKMQGACSGCPSSSVTLKSGIENMLMHYVPEVKGVEQEFDGDEEAELAGQME

SEQ ID NO: 14398 - protein, 268 aa, Triticum aestivum
  peptide (1)..(268): Ceres Seq. ID no. 15220565
  misc_feature (184)..(254): Pfam Name: Pfam Description:  NifU-like domain
  misc_feature (3)..(268): NCBI GI NO: 34897632 NR Description: hypothetical protein [Oryza sativa]
  misc_feature (13)..(267): NCBI GI NO: 18402817 NR Description: expressed protein [Arabidopsis thaliana]
  misc_feature (13)..(268): NCBI GI NO: 25405462 NR Description: unknown protein, 90320-88994
  misc_feature (65)..(268): NCBI GI NO: 15223842 NR Description: expressed protein [Arabidopsis thaliana]
  misc_feature (43)..(262): NCBI GI NO: 12834577 NR Description: unnamed protein product [Mus musculus]
  misc_feature (68)..(262): NCBI GI NO: 26324295 NR Description: unnamed protein product [Mus musculus]
  misc_feature (43)..(262): NCBI GI NO: 34500321 NR Description: NifU-like protein HIRIP5 [Mus musculus]
  misc_feature (68)..(262): NCBI GI NO: 9910264 NR Description: histone cell cycle regulation defective interacting protein 5
  misc_feature (66)..(260): NCBI GI NO: 37681825 NR Description: HIRA interacting protein 5 [Danio rerio]
  misc_feature (66)..(262): NCBI GI NO: 34856373 NR Description: similar to HIRA-interacting protein 5 (mHIRIP5)
MAMARRRALALVSQILQRRVLPAPRFLSSAAGGALDRLNSPPFARQAAHRNPAPPSPWDRLGGQKRTMFIQTQSTPNPQSLMFHPGKPVMEVGSSDFPHARTAMTSPLAKALFAIEGVTRVFFGSDFVTVTKSDETSWDYLKPEVFAAIMDFYSSGQPLFLDSNTAAAMDTAIHEDDSEIVAMIKELLETRIRPAVQDDGGDIEYRGFEPETGIVKLKMQGACSGCPSSSVTLKSGIENMLMHYVPEVKGVEQEFDGDEEAELAGQME

SEQ ID NO: 14399 - protein, 266 aa, Triticum aestivum
  peptide (1)..(266): Ceres Seq. ID no. 15220566
  misc_feature (182)..(252): Pfam Name: Pfam Description:  NifU-like domain
  misc_feature (1)..(266): NCBI GI NO: 34897632 NR Description: hypothetical protein [Oryza sativa]
  misc_feature (11)..(265): NCBI GI NO: 18402817 NR Description: expressed protein [Arabidopsis thaliana]
  misc_feature (11)..(266): NCBI GI NO: 25405462 NR Description: unknown protein, 90320-88994
  misc_feature (63)..(266): NCBI GI NO: 15223842 NR Description: expressed protein [Arabidopsis thaliana]
  misc_feature (41)..(260): NCBI GI NO: 12834577 NR Description: unnamed protein product [Mus musculus]
  misc_feature (66)..(260): NCBI GI NO: 26324295 NR Description: unnamed protein product [Mus musculus]
  misc_feature (41)..(260): NCBI GI NO: 34500321 NR Description: NifU-like protein HIRIP5 [Mus musculus]
  misc_feature (66)..(260): NCBI GI NO: 9910264 NR Description: histone cell cycle regulation defective interacting protein 5
  misc_feature (64)..(258): NCBI GI NO: 37681825 NR Description: HIRA interacting protein 5 [Danio rerio]
  misc_feature (64)..(260): NCBI GI NO: 34856373 NR Description: similar to HIRA-interacting protein 5 (mHIRIP5)
MARRRALALVSQILQRRVLPAPRFLSSAAGGALDRLNSPPFARQAAHRNPAPPSPWDRLGGQKRTMFIQTQSTPNPQSLMFHPGKPVMEVGSSDFPHARTAMTSPLAKALFAIEGVTRVFFGSDFVTVTKSDETSWDYLKPEVFAAIMDFYSSGQPLFLDSNTAAAMDTAIHEDDSEIVAMIKELLETRIRPAVQDDGGDIEYRGFEPETGIVKLKMQGACSGCPSSSVTLKSGIENMLMHYVPEVKGVEQEFDGDEEAELAGQME

SEQ ID NO: 14400 - DNA, 1408 bp, Triticum aestivum
  misc_feature (1)..(1408): Ceres Seq. ID no. 13598248
gccattccccagccaccaccgaacccgaaagcccatccacccacccggaccgggcgacgaccggggcggaggcggcggcggcggatcgagggacggacggacggatgggcggcggcgggcagtaggacggcggcgggacgcggcgggacgcggcggcaccaccatgtctgcggtagtctgcggcaagaggtcctcctccatcttcgcggacgacctgctgctccaacaggcctcctcttcccctccctcctcccaccacagcagccccgcggccaagaggtcccgctacgcgcaccaccaccaccgccgggacggccgggacgcgctcctcaaccacctccgggccgccttccccgccatggacccccagctgcttgagagagcccttgaagcgtctggagatgatttggatgatgcaataaagagtctgaaggagctgcacctgatggagtcaaatcaggctaacctgtcggccactggttccgcattkgaaaacgggccgactgcagttcagccgtctgttgaaggcattgttaccagcggcggtgtggacacagctactgaacaccaacctcctgcagatggccaacagccaggtaatagtggccctgaatgggttgatctttttgtgagggagatgtcaaatgcttctgacatggatgacgcgcgggcccgtgcgtcaagagctcttgaagccttgacgaagtccatcctggagggtgcaggagctgaagcagcgcagagcttgcatcaggaaaacatgatgctcaaggagcagatgacggccgtcctgtcgcagaacgcggtcctgaagcgcgcggtggcgatccagcacgagcggcagaaggagttcgacgagcggagccacgaggtgcagggcctgaagcagctcgtcctgcagtaccaggagcagctgaggactctcgagatcaacaactacgcgctgcagatgcatctgaagcaggcccagcagagcagctccatgcccgggcgctacaacccggacgtcttctaatttggcctcagggcgatgatgatgagccctggcccttggggattgagagttgagactagtggtgccctgccgtatgatgatgatgaagatgactagaaaatgttgttgtctgggatagttgggtggatgttggtttgctgaccaccccgttggccgtgggatggggcgcaaggctcccatgatagatcatgtgttggttcaaacgtgtcgcgtttaaacgatttttcgtatttgatatatacacaaaacaatcccgattctttgcatgattgtcattcagtcaaaaaaaaaaaaaaaaaaaaaaaaaaaaaaaaaaaaaaaaaaaaaaaaaaaaaaaagaaaaaaaaaaaaaaaaaagcttatcrataccgtcracctcragggggggcccgg

SEQ ID NO: 14401 - protein, 337 aa, Triticum aestivum
  peptide (1)..(337): Ceres Seq. ID no. 15222276
  misc_feature (77)..(337): NCBI GI NO: 18421340 NR Description: expressed protein [Arabidopsis thaliana]
  misc_feature (77)..(337): NCBI GI NO: 13877755 NR Description: unknown protein [Arabidopsis thaliana]
  misc_feature (55)..(337): NCBI GI NO: 34015166 NR Description: hypothetical protein OSJNBa0017M13.20
  misc_feature (149)..(337): NCBI GI NO: 18412607 NR Description: expressed protein [Arabidopsis thaliana]
  misc_feature (277)..(337): NCBI GI NO: 35215036 NR Description: hypothetical protein
  misc_feature (186)..(244): NCBI GI NO: 35215036 NR Description: hypothetical protein
  misc_feature (202)..(337): NCBI GI NO: 15241851 NR Description: hypothetical protein [Arabidopsis thaliana]
  misc_feature (55)..(175): NCBI GI NO: 35215037 NR Description: hypothetical protein
  misc_feature (163)..(163): Xaa is any aa, unknown or other
PFPSHHRTRKPIHPPGPGDDRGGGGGGGSRDGRTDGRRRAVGRRRDAAGRGGTTMSAVVCGKRSSSIFADDLLLQQASSSPPSSHHSSPAAKRSRYAHHHHRRDGRDALLNHLRAAFPAMDPQLLERALEASGDDLDDAIKSLKELHLMESNQANLSATGSAXENGPTAVQPSVEGIVTSGGVDTATEHQPPADGQQPGNSGPEWVDLFVREMSNASDMDDARARASRALEALTKSILEGAGAEAAQSLHQENMMLKEQMTAVLSQNAVLKRAVAIQHERQKEFDERSHEVQGLKQLVLQYQEQLRTLEINNYALQMHLKQAQQSSSMPGRYNPDVF

SEQ ID NO: 14402 - protein, 283 aa, Triticum aestivum
  peptide (1)..(283): Ceres Seq. ID no. 15222277
  misc_feature (23)..(283): NCBI GI NO: 18421340 NR Description: expressed protein [Arabidopsis thaliana]
  misc_feature (23)..(283): NCBI GI NO: 13877755 NR Description: unknown protein [Arabidopsis thaliana]
  misc_feature (1)..(283): NCBI GI NO: 34015166 NR Description: hypothetical protein OSJNBa0017M13.20
  misc_feature (95)..(283): NCBI GI NO: 18412607 NR Description: expressed protein [Arabidopsis thaliana]
  misc_feature (223)..(283): NCBI GI NO: 35215036 NR Description: hypothetical protein
  misc_feature (132)..(190): NCBI GI NO: 35215036 NR Description: hypothetical protein
  misc_feature (148)..(283): NCBI GI NO: 15241851 NR Description: hypothetical protein [Arabidopsis thaliana]
  misc_feature (1)..(121): NCBI GI NO: 35215037 NR Description: hypothetical protein
  misc_feature (109)..(109): Xaa is any aa, unknown or other
MSAVVCGKRSSSIFADDLLLQQASSSPPSSHHSSPAAKRSRYAHHHHRRDGRDALLNHLRAAFPAMDPQLLERALEASGDDLDDAIKSLKELHLMESNQANLSATGSAXENGPTAVQPSVEGIVTSGGVDTATEHQPPADGQQPGNSGPEWVDLFVREMSNASDMDDARARASRALEALTKSILEGAGAEAAQSLHQENMMLKEQMTAVLSQNAVLKRAVAIQHERQKEFDERSHEVQGLKQLVLQYQEQLRTLEINNYALQMHLKQAQQSSSMPGRYNPDVF

SEQ ID NO: 14403 - protein, 218 aa, Triticum aestivum
  peptide (1)..(218): Ceres Seq. ID no. 15222278
  misc_feature (1)..(218): NCBI GI NO: 18421340 NR Description: expressed protein [Arabidopsis thaliana]
  misc_feature (1)..(218): NCBI GI NO: 13877755 NR Description: unknown protein [Arabidopsis thaliana]
  misc_feature (1)..(218): NCBI GI NO: 34015166 NR Description: hypothetical protein OSJNBa0017M13.20
  misc_feature (30)..(218): NCBI GI NO: 18412607 NR Description: expressed protein [Arabidopsis thaliana]
  misc_feature (158)..(218): NCBI GI NO: 35215036 NR Description: hypothetical protein
  misc_feature (67)..(125): NCBI GI NO: 35215036 NR Description: hypothetical protein
  misc_feature (83)..(218): NCBI GI NO: 15241851 NR Description: hypothetical protein [Arabidopsis thaliana]
  misc_feature (1)..(56): NCBI GI NO: 35215037 NR Description: hypothetical protein
  misc_feature (44)..(44): Xaa is any aa, unknown or other
MDPQLLERALEASGDDLDDAIKSLKELHLMESNQANLSATGSAXENGPTAVQPSVEGIVTSGGVDTATEHQPPADGQQPGNSGPEWVDLFVREMSNASDMDDARARASRALEALTKSILEGAGAEAAQSLHQENMMLKEQMTAVLSQNAVLKRAVAIQHERQKEFDERSHEVQGLKQLVLQYQEQLRTLEINNYALQMHLKQAQQSSSMPGRYNPDVF

SEQ ID NO: 14404 - DNA, 1628 bp, Triticum aestivum
  misc_feature (1)..(1628): Ceres Seq. ID no. 14313518
cactaggaacaaaaagaaaaaagaaaaagaggaaggaaggaaaaaatctcccggggcgcaagcaaacgtgacgccacgcctcactccggccttcgtcgtcctcctcttcctccccccactttccccacaatagtttggcgatcgctcgctgccgccgccgcgaccgcgactgaagcctctgctccgctccgctccgctcgccgctggaagatggagcctgaccagagtggcaccgggcagacttctccccgtgggaacgactgggaggtcgtgcagctcaccgcgtcgaactacgcgtctgcgcctggcccggctagaactgaaccttctgacgaggagtctgaaggccaagtgtatggcgcagaagggggtgattcggcagccgcggcactgctgatgtctggccacttctcggttccgcagaatgaggctgagaatctcctcatgggagctgatactagcatagagcagcaggaggcgcgcggcagccagtacgcagtctctgacaagggtgatgatggtgatagggaggaagacccgcaggagaaactgaaggatgatgttcttgacaggatcccgtccttcgacaaagggaaaagcctttcctctgttgatatggaacctgatgatggcagcgagttgcacaggggtagtctggttggaaaagacccagttacgttctcatcctctgtttacaatgcaactgacgctgagaaagaagctaccgagagtgccaaggagaagactgaagaaagtccaactctccaaaatattgaccctgtcactgattcgtccaatattgttgcttccggtgacgagagcaagcctgacggttctggagccccacgcaatgcatggtggcagaagcaacttatatcgctctacaggagcgctaaagagagcaacaagctctggcctatcgttgtggctgctgctgctctgatggggatggcgtatttccggcggcgctggcagaagggcaagctgcagcttcagcaggtcaaattgcaacctgccagcagcaaggaggtaatcgtgggacgccttccttttgatcatactagccaaattttccatgcaactgaacagactagtttggcctgaaattcagagaatcaaccaggccaccgtaccgcttaaccgaatcaaggacattcttgtcgccggcaaccacccgagtccggctcctcacggaaatgctcgattgggctgatgatgataaccatcccgcctgacggatgatgtatcctgaaactagtgtatgcaatggagaaatagccgatgccgcagaacgtatgggcgtttatgcgtgctggctgtgtaattaaaccccaaaactcctcctgggcatgtaaatatacacgagttttgtgtggttgctttccctcctttggaagaactctctccttggccaggttcagtgtgctgctgcttcagtttgtcggccactgtaacttcttccgttgctcccgtggatattttttatctgtcttgttgcgggttgcagtttgtcaggttgtcggccgatatatacacgatgaacttatgatattattgggtgccgaatttttggtttgtgttaaaggaaattttagcctatatatagttgagattacatttgggtccac

SEQ ID NO: 14405 - protein, 297 aa, Triticum aestivum
  peptide (1)..(297): Ceres Seq. ID no. 14313519
  misc_feature (13)..(101): NCBI GI NO: 7486469 NR Description: hypothetical protein At2g45980
  misc_feature (212)..(279): NCBI GI NO: 7486469 NR Description: hypothetical protein At2g45980
  misc_feature (13)..(101): NCBI GI NO: 18406940 NR Description: expressed protein [Arabidopsis thaliana]
  misc_feature (13)..(101): NCBI GI NO: 21553358 NR Description: unknown [Arabidopsis thaliana]
  misc_feature (212)..(296): NCBI GI NO: 18406940 NR Description: expressed protein [Arabidopsis thaliana]
  misc_feature (212)..(296): NCBI GI NO: 21553358 NR Description: unknown [Arabidopsis thaliana]
  misc_feature (4)..(271): NCBI GI NO: 38346457 NR Description: OSJNBa0019G23.5
  misc_feature (2)..(153): NCBI GI NO: 10241633 NR Description: hypothetical protein
  misc_feature (9)..(99): NCBI GI NO: 1808686 NR Description: hypothetical protein [Sporobolus stapfianus]
  misc_feature (203)..(271): NCBI GI NO: 1808686 NR Description: hypothetical protein [Sporobolus stapfianus]
MEPDQSGTGQTSPRGNDWEVVQLTASNYASAPGPARTEPSDEESEGQVYGAEGGDSAAAALLMSGHFSVPQNEAENLLMGADTSIEQQEARGSQYAVSDKGDDGDREEDPQEKLKDDVLDRIPSFDKGKSLSSVDMEPDDGSELHRGSLVGKDPVTFSSSVYNATDAEKEATESAKEKTEESPTLQNIDPVTDSSNIVASGDESKPDGSGAPRNAWWQKQLISLYRSAKESNKLWPIVVAAAALMGMAYFRRRWQKGKLQLQQVKLQPASSKEVIVGRLPFDHTSQIFHATEQTSLA

SEQ ID NO: 14406 - protein, 235 aa, Triticum aestivum
  peptide (1)..(235): Ceres Seq. ID no. 14313520
  misc_feature (1)..(39): NCBI GI NO: 7486469 NR Description: hypothetical protein At2g45980
  misc_feature (150)..(217): NCBI GI NO: 7486469 NR Description: hypothetical protein At2g45980
  misc_feature (1)..(39): NCBI GI NO: 18406940 NR Description: expressed protein [Arabidopsis thaliana]
  misc_feature (1)..(39): NCBI GI NO: 21553358 NR Description: unknown [Arabidopsis thaliana]
  misc_feature (150)..(234): NCBI GI NO: 18406940 NR Description: expressed protein [Arabidopsis thaliana]
  misc_feature (150)..(234): NCBI GI NO: 21553358 NR Description: unknown [Arabidopsis thaliana]
  misc_feature (1)..(209): NCBI GI NO: 38346457 NR Description: OSJNBa0019G23.5
  misc_feature (1)..(91): NCBI GI NO: 10241633 NR Description: hypothetical protein
  misc_feature (1)..(37): NCBI GI NO: 1808686 NR Description: hypothetical protein [Sporobolus stapfianus]
  misc_feature (141)..(209): NCBI GI NO: 1808686 NR Description: hypothetical protein [Sporobolus stapfianus]
MSGHFSVPQNEAENLLMGADTSIEQQEARGSQYAVSDKGDDGDREEDPQEKLKDDVLDRIPSFDKGKSLSSVDMEPDDGSELHRGSLVGKDPVTFSSSVYNATDAEKEATESAKEKTEESPTLQNIDPVTDSSNIVASGDESKPDGSGAPRNAWWQKQLISLYRSAKESNKLWPIVVAAAALMGMAYFRRRWQKGKLQLQQVKLQPASSKEVIVGRLPFDHTSQIFHATEQTSLA

SEQ ID NO: 14407 - protein, 219 aa, Triticum aestivum
  peptide (1)..(219): Ceres Seq. ID no. 14313521
  misc_feature (1)..(23): NCBI GI NO: 7486469 NR Description: hypothetical protein At2g45980
  misc_feature (134)..(201): NCBI GI NO: 7486469 NR Description: hypothetical protein At2g45980
  misc_feature (1)..(23): NCBI GI NO: 18406940 NR Description: expressed protein [Arabidopsis thaliana]
  misc_feature (1)..(23): NCBI GI NO: 21553358 NR Description: unknown [Arabidopsis thaliana]
  misc_feature (134)..(218): NCBI GI NO: 18406940 NR Description: expressed protein [Arabidopsis thaliana]
  misc_feature (134)..(218): NCBI GI NO: 21553358 NR Description: unknown [Arabidopsis thaliana]
  misc_feature (1)..(193): NCBI GI NO: 38346457 NR Description: OSJNBa0019G23.5
  misc_feature (1)..(75): NCBI GI NO: 10241633 NR Description: hypothetical protein
  misc_feature (1)..(21): NCBI GI NO: 1808686 NR Description: hypothetical protein [Sporobolus stapfianus]
  misc_feature (125)..(193): NCBI GI NO: 1808686 NR Description: hypothetical protein [Sporobolus stapfianus]
MGADTSIEQQEARGSQYAVSDKGDDGDREEDPQEKLKDDVLDRIPSFDKGKSLSSVDMEPDDGSELHRGSLVGKDPVTFSSSVYNATDAEKEATESAKEKTEESPTLQNIDPVTDSSNIVASGDESKPDGSGAPRNAWWQKQLISLYRSAKESNKLWPIVVAAAALMGMAYFRRRWQKGKLQLQQVKLQPASSKEVIVGRLPFDHTSQIFHATEQTSLA

SEQ ID NO: 14408 - DNA, 767 bp, Triticum aestivum
  misc_feature (1)..(767): Ceres Seq. ID no. 13655675
aagagaatggagaacagggtaatattacaggaatggtttgaccgcgttgactcggagaaaagtggaagcataacagcggtacagctgaagactgctcttgctgtgggcaacctggaatttccgctctcagttgttcagcaaatgatcaggatgtacgatttcgacaggaatggtactatgagctttcaagaatttgttgcactcaacaacttccttcttaaggttcaacatgcattttctgatctagagaggggtcgtggttttcttgtacctgatgatgtatttgaggctttgggaaaaattggtttcatgctggattctcctgctttttactctgtctgcgagagctttgatcaaagtaaaaatgggaggtttcggctggatgacttaatatcaatctgtatattcttacaatcagcacggaacctatttaattcatttgatacagctaaacaaggcagagttactctcgatctgaatcaatttgtctattgtactgccaattgcagaatatgattcaactatatgacggtttgagaagatgattcacaaatactgcactttgtaataccataaagtcatcttagagtaagttaagttgtgatggtgttgtataagatgaaaacatctcgggtttggatactatttgtcatctgtctgcaaaatactgtggttttttttttctttccagatgatgtaattttgtttataaaacgtaagttgttataaaacatcttgagttatgataacttgtgaagttgattccg

SEQ ID NO: 14409 - protein, 171 aa, Triticum aestivum
  peptide (1)..(171): Ceres Seq. ID no. 13655676
  misc_feature (1)..(163): NCBI GI NO: 8745028 NR Description: probable possible programmed cell death protein
  misc_feature (9)..(163): NCBI GI NO: 39595321 NR Description: Hypothetical protein CBG03955
  misc_feature (13)..(168): NCBI GI NO: 31418801 NR Description: Unknown (protein for MGC:63952) [Danio rerio]
  misc_feature (9)..(163): NCBI GI NO: 3024652 NR Description: Sorcin
  misc_feature (3)..(163): NCBI GI NO: 28277280 NR Description: Similar to programmed cell death 6
  misc_feature (13)..(163): NCBI GI NO: 8745027 NR Description: probable possible programmed cell death protein
  misc_feature (9)..(144): NCBI GI NO: 17508397 NR Description: EF hand calcium binding protein
  misc_feature (12)..(168): NCBI GI NO: 6912582 NR Description: PEF protein with a long N-terminal hydrophobicdomain
  misc_feature (10)..(169): NCBI GI NO: 19921976 NR Description: CG17765-PA [Drosophila melanogaster]
  misc_feature (13)..(163): NCBI GI NO: 7019485 NR Description: programmed cell death 6; apoptosis-linked gene 2
KRMENRVILQEWFDRVDSEKSGSITAVQLKTALAVGNLEFPLSVVQQMIRMYDFDRNGTMSFQEFVALNNFLLKVQHAFSDLERGRGFLVPDDVFEALGKIGFMLDSPAFYSVCESFDQSKNGRFRLDDLISICIFLQSARNLFNSFDTAKQGRVTLDLNQFVYCTANCRI

SEQ ID NO: 14410 - protein, 169 aa, Triticum aestivum
  peptide (1)..(169): Ceres Seq. ID no. 13655677
  misc_feature (1)..(161): NCBI GI NO: 8745028 NR Description: probable possible programmed cell death protein
  misc_feature (7)..(161): NCBI GI NO: 39595321 NR Description: Hypothetical protein CBG03955
  misc_feature (11)..(166): NCBI GI NO: 31418801 NR Description: Unknown (protein for MGC:63952) [Danio rerio]
  misc_feature (7)..(161): NCBI GI NO: 3024652 NR Description: Sorcin
  misc_feature (1)..(161): NCBI GI NO: 28277280 NR Description: Similar to programmed cell death 6
  misc_feature (11)..(161): NCBI GI NO: 8745027 NR Description: probable possible programmed cell death protein
  misc_feature (7)..(142): NCBI GI NO: 17508397 NR Description: EF hand calcium binding protein
  misc_feature (10)..(166): NCBI GI NO: 6912582 NR Description: PEF protein with a long N-terminal hydrophobicdomain
  misc_feature (8)..(167): NCBI GI NO: 19921976 NR Description: CG17765-PA [Drosophila melanogaster]
  misc_feature (11)..(161): NCBI GI NO: 7019485 NR Description: programmed cell death 6; apoptosis-linked gene 2
MENRVILQEWFDRVDSEKSGSITAVQLKTALAVGNLEFPLSVVQQMIRMYDFDRNGTMSFQEFVALNNFLLKVQHAFSDLERGRGFLVPDDVFEALGKIGFMLDSPAFYSVCESFDQSKNGRFRLDDLISICIFLQSARNLFNSFDTAKQGRVTLDLNQFVYCTANCRI

SEQ ID NO: 14411 - protein, 124 aa, Triticum aestivum
  peptide (1)..(124): Ceres Seq. ID no. 13655678
  misc_feature (1)..(116): NCBI GI NO: 8745028 NR Description: probable possible programmed cell death protein
  misc_feature (1)..(116): NCBI GI NO: 39595321 NR Description: Hypothetical protein CBG03955
  misc_feature (1)..(121): NCBI GI NO: 31418801 NR Description: Unknown (protein for MGC:63952) [Danio rerio]
  misc_feature (1)..(116): NCBI GI NO: 3024652 NR Description: Sorcin
  misc_feature (1)..(116): NCBI GI NO: 28277280 NR Description: Similar to programmed cell death 6
  misc_feature (1)..(116): NCBI GI NO: 8745027 NR Description: probable possible programmed cell death protein
  misc_feature (1)..(97): NCBI GI NO: 17508397 NR Description: EF hand calcium binding protein
  misc_feature (1)..(121): NCBI GI NO: 6912582 NR Description: PEF protein with a long N-terminal hydrophobicdomain
  misc_feature (1)..(122): NCBI GI NO: 19921976 NR Description: CG17765-PA [Drosophila melanogaster]
  misc_feature (1)..(116): NCBI GI NO: 7019485 NR Description: programmed cell death 6; apoptosis-linked gene 2
MIRMYDFDRNGTMSFQEFVALNNFLLKVQHAFSDLERGRGFLVPDDVFEALGKIGFMLDSPAFYSVCESFDQSKNGRFRLDDLISICIFLQSARNLFNSFDTAKQGRVTLDLNQFVYCTANCRI

SEQ ID NO: 14412 - DNA, 1633 bp, Triticum aestivum
  misc_feature (1)..(1633): Ceres Seq. ID no. 13542155
tacctagaacatcctaatcgaaaacccgacttcactccccctcccccctcccccatcctctcctcgtagtctccgccggacgccgacgcccgccccctacctgcggcgaaaccccaggcgcggcggcggcggcgggacctgctcagatccgatgggggcgacggagccgcagtgggtgctgatggccacggggcggtcgccgaccaacatcgcggtgatcaagtactgggggaagcgggacgagacgctcatcctccccgtcaacgacagcatcagcgtcaccctcgaccccgaccacctctccgccaccaccaccgtcgctgccagcccctcattcccatccgaccgcatgtggctcaacggcaaggagatcgcgttgtcgggcgggagattccagagctgcctgagggagatacggaagcgggctcgtgatgtcgaggacgagaaaaaggggatcaagatcaagaaagaggactgggaaaagttgcatgtccacatagcatcctacaacaacttcccaaccgctgccggtttggcctcttcggccgctggccttgcttgtcttgttttcaccctgggaaagctaatgaacgtgaatgaagattacggagaactttcttcaatagcaaggcaggggtctggaagtgcatgccgcagtatatatggtggatttgtgaaatggtgtatgggaaaaaatgatgacggaagtgacagcatggcagtacagcttgctgacgagtcacattgggatgatcttgttataatcatagcagtggtcagttcaaagcagaaggaaaccagtagcaccagtgggatgcgagacactgtcgaaacaagccccctcttgcagtacagggcccagactgtagtgccaagtcggatattgaaaatggaagatgctatcaagaatcgtgattttgaatccttcgccaggttaacttgtgccgatagcaaccagtttcatgctgtatgtttggacacgagtcctcccatcttctacatgaacgacacatcacacaggataattagccttgtggaaaagtggaaccactcggaaggaacaccacaggttgcctacacatttgatgctgggcctaacgctgtcctaatagcacggaaccgcaaaactgccacccttctccttcagaggctcttatacactttccccccacagaagaatgacttggacagctatatgctcggcgataaatcgatcctaagcgacgctggtttgcaatccatagccgatgtcgaggcccttccagcgcctccagagatgaaagctccaaaccaaaaattcaaaggcgatgttagctacttcatctgtagcaggcctggggccggcccaaaagttctcaccgatgagagccacgccttgattgattcagccacggggcttgcgaaaggagtgtaattttgaacgacgataggtttccataacagtctttggttgagattaatgtagaattgtcacgttgttgtacactcagtactttcgtcattttgatcttgtactgtaccttcgatcttgtactatttccatcattttgtccctgactgttgtagcctcttaaagaacatgtatatttcttcaataaaagttcgtggaaygaattatcattttatcgatccc

SEQ ID NO: 14413 - protein, 420 aa, Triticum aestivum
  peptide (1)..(420): Ceres Seq. ID no. 15220498
  misc_feature (8)..(418): NCBI GI NO: 16417950 NR Description: mevalonate disphosphate decarboxylase
  misc_feature (3)..(418): NCBI GI NO: 18410026 NR Description: mevalonate diphosphate decarboxylase, putative
  misc_feature (3)..(418): NCBI GI NO: 21593243 NR Description: diphosphomevalonate decarboxylase-like protein
  misc_feature (5)..(418): NCBI GI NO: 15224931 NR Description: mevalonate diphosphate decarboxylase
  misc_feature (3)..(418): NCBI GI NO: 11281655 NR Description: diphosphomevalonate decarboxylase (EC 4
  misc_feature (11)..(418): NCBI GI NO: 21593039 NR Description: mevalonate diphosphate decarboxylase
  misc_feature (13)..(416): NCBI GI NO: 39645379 NR Description: Unknown (protein for IMAGE:5307745)
  misc_feature (1)..(416): NCBI GI NO: 20149736 NR Description: mevalonate
  misc_feature (1)..(416): NCBI GI NO: 26354448 NR Description: unnamed protein product [Mus musculus]
  misc_feature (1)..(410): NCBI GI NO: 13592005 NR Description: mevalonate pyrophosphate decarboxylase
MGATEPQWVLMATGRSPTNIAVIKYWGKRDETLILPVNDSISVTLDPDHLSATTTVAASPSFPSDRMWLNGKEIALSGGRFQSCLREIRKRARDVEDEKKGIKIKKEDWEKLHVHIASYNNFPTAAGLASSAAGLACLVFTLGKLMNVNEDYGELSSIARQGSGSACRSIYGGFVKWCMGKNDDGSDSMAVQLADESHWDDLVIIIAVVSSKQKETSSTSGMRDTVETSPLLQYRAQTVVPSRILKMEDAIKNRDFESFARLTCADSNQFHAVCLDTSPPIFYMNDTSHRIISLVEKWNHSEGTPQVAYTFDAGPNAVLIARNRKTATLLLQRLLYTFPPQKNDLDSYMLGDKSILSDAGLQSIADVEALPAPPEMKAPNQKFKGDVSYFICSRPGAGPKVLTDESHALIDSATGLAKGV

SEQ ID NO: 14414 - protein, 410 aa, Triticum aestivum
  peptide (1)..(410): Ceres Seq. ID no. 15220499
  misc_feature (1)..(408): NCBI GI NO: 16417950 NR Description: mevalonate disphosphate decarboxylase
  misc_feature (1)..(408): NCBI GI NO: 18410026 NR Description: mevalonate diphosphate decarboxylase, putative
  misc_feature (1)..(408): NCBI GI NO: 21593243 NR Description: diphosphomevalonate decarboxylase-like protein
  misc_feature (1)..(408): NCBI GI NO: 15224931 NR Description: mevalonate diphosphate decarboxylase
  misc_feature (1)..(408): NCBI GI NO: 11281655 NR Description: diphosphomevalonate decarboxylase (EC 4
  misc_feature (1)..(408): NCBI GI NO: 21593039 NR Description: mevalonate diphosphate decarboxylase
  misc_feature (3)..(406): NCBI GI NO: 39645379 NR Description: Unknown (protein for IMAGE:5307745)
  misc_feature (1)..(406): NCBI GI NO: 20149736 NR Description: mevalonate
  misc_feature (1)..(406): NCBI GI NO: 26354448 NR Description: unnamed protein product [Mus musculus]
  misc_feature (1)..(400): NCBI GI NO: 13592005 NR Description: mevalonate pyrophosphate decarboxylase
MATGRSPTNIAVIKYWGKRDETLILPVNDSISVTLDPDHLSATTTVAASPSFPSDRMWLNGKEIALSGGRFQSCLREIRKRARDVEDEKKGIKIKKEDWEKLHVHIASYNNFPTAAGLASSAAGLACLVFTLGKLMNVNEDYGELSSIARQGSGSACRSIYGGFVKWCMGKNDDGSDSMAVQLADESHWDDLVIIIAVVSSKQKETSSTSGMRDTVETSPLLQYRAQTVVPSRILKMEDAIKNRDFESFARLTCADSNQFHAVCLDTSPPIFYMNDTSHRIISLVEKWNHSEGTPQVAYTFDAGPNAVLIARNRKTATLLLQRLLYTFPPQKNDLDSYMLGDKSILSDAGLQSIADVEALPAPPEMKAPNQKFKGDVSYFICSRPGAGPKVLTDESHALIDSATGLAKGV

SEQ ID NO: 14415 - protein, 354 aa, Triticum aestivum
  peptide (1)..(354): Ceres Seq. ID no. 15220500
  misc_feature (1)..(352): NCBI GI NO: 16417950 NR Description: mevalonate disphosphate decarboxylase
  misc_feature (1)..(352): NCBI GI NO: 18410026 NR Description: mevalonate diphosphate decarboxylase, putative
  misc_feature (1)..(352): NCBI GI NO: 21593243 NR Description: diphosphomevalonate decarboxylase-like protein
  misc_feature (1)..(352): NCBI GI NO: 15224931 NR Description: mevalonate diphosphate decarboxylase
  misc_feature (1)..(352): NCBI GI NO: 11281655 NR Description: diphosphomevalonate decarboxylase (EC 4
  misc_feature (1)..(352): NCBI GI NO: 21593039 NR Description: mevalonate diphosphate decarboxylase
  misc_feature (1)..(350): NCBI GI NO: 39645379 NR Description: Unknown (protein for IMAGE:5307745)
  misc_feature (1)..(350): NCBI GI NO: 20149736 NR Description: mevalonate
  misc_feature (1)..(350): NCBI GI NO: 26354448 NR Description: unnamed protein product [Mus musculus]
  misc_feature (1)..(344): NCBI GI NO: 13592005 NR Description: mevalonate pyrophosphate decarboxylase
MWLNGKEIALSGGRFQSCLREIRKRARDVEDEKKGIKIKKEDWEKLHVHIASYNNFPTAAGLASSAAGLACLVFTLGKLMNVNEDYGELSSIARQGSGSACRSIYGGFVKWCMGKNDDGSDSMAVQLADESHWDDLVIIIAVVSSKQKETSSTSGMRDTVETSPLLQYRAQTVVPSRILKMEDAIKNRDFESFARLTCADSNQFHAVCLDTSPPIFYMNDTSHRIISLVEKWNHSEGTPQVAYTFDAGPNAVLIARNRKTATLLLQRLLYTFPPQKNDLDSYMLGDKSILSDAGLQSIADVEALPAPPEMKAPNQKFKGDVSYFICSRPGAGPKVLTDESHALIDSATGLAKGV

SEQ ID NO: 14416 - DNA, 657 bp, Triticum aestivum
  misc_feature (1)..(657): Ceres Seq. ID no. 15173170
actgcactctactctactccatcttcttgctctgcactacgccaccacctggtcagtcaagagaaggaaagatgcctagcgcggggctggaggcggggtcgaacaaggtggacgtggccatcgacctcgggaacccgctgctcaaccgcaccgtcgacggcttcctcaagatcggcgccgtcggcgcctgcagggtggtcgccgaggacgccttcgactgcatccacaggggggatatctcgaagcgccagcttgaagagtcgctgaagaaaatgtgcaaggagggtgcatattggggtgctgttgctggggtgtatgtaggcatggagtatggagtggaaagggcccgtggtgaccgtgactggaaaaatgcgttgatagcaggcattgcaaccggtgccctggtctctgctgctaccaacaacaaagggaacaagatcgcccaggacgccatcacaggaggcgccatcgcgaccgccgtcgagttcatcaactacctcacctagccgtgaggccatccatattcgcggcgatgtttttattggacaagactgaataagaacttcttcactgaagccatccaccctttgtgttaataattggagccgtttcctccaatgttcttccattttattttatttttgttgcctgcgttcg

SEQ ID NO: 14417 - protein, 167 aa, Triticum aestivum
  peptide (1)..(167): Ceres Seq. ID no. 15173171
  misc_feature (39)..(167): Pfam Name: Pfam Description:  Tim17/Tim22/Tim23 family
  misc_feature (24)..(167): NCBI GI NO: 3758827 NR Description: amino acid selective channel protein
  misc_feature (24)..(167): NCBI GI NO: 7488792 NR Description: core protein - garden pea
  misc_feature (24)..(164): NCBI GI NO: 21536521 NR Description: putative membrane channel protein
  misc_feature (24)..(164): NCBI GI NO: 15226998 NR Description: membrane channel protein -related
  misc_feature (76)..(164): NCBI GI NO: 16555405 NR Description: stress-inducible membrane pore protein
  misc_feature (40)..(71): NCBI GI NO: 16555405 NR Description: stress-inducible membrane pore protein
  misc_feature (76)..(164): NCBI GI NO: 18414605 NR Description: pore protein homolog [Arabidopsis thaliana]
  misc_feature (76)..(164): NCBI GI NO: 30683558 NR Description: pore protein homolog [Arabidopsis thaliana]
  misc_feature (122)..(167): NCBI GI NO: 34906056 NR Description: P0698H10.23
  misc_feature (41)..(71): NCBI GI NO: 18414605 NR Description: pore protein homolog [Arabidopsis thaliana]
CTLLYSIFLLCTTPPPGQSREGKMPSAGLEAGSNKVDVAIDLGNPLLNRTVDGFLKIGAVGACRVVAEDAFDCIHRGDISKRQLEESLKKMCKEGAYWGAVAGVYVGMEYGVERARGDRDWKNALIAGIATGALVSAATNNKGNKIAQDAITGGAIATAVEFINYLT

SEQ ID NO: 14418 - protein, 144 aa, Triticum aestivum
  peptide (1)..(144): Ceres Seq. ID no. 15173172
  misc_feature (16)..(144): Pfam Name: Pfam Description:  Tim17/Tim22/Tim23 family
  misc_feature (1)..(144): NCBI GI NO: 3758827 NR Description: amino acid selective channel protein
  misc_feature (1)..(144): NCBI GI NO: 7488792 NR Description: core protein - garden pea
  misc_feature (1)..(141): NCBI GI NO: 21536521 NR Description: putative membrane channel protein
  misc_feature (1)..(141): NCBI GI NO: 15226998 NR Description: membrane channel protein -related
  misc_feature (53)..(141): NCBI GI NO: 16555405 NR Description: stress-inducible membrane pore protein
  misc_feature (17)..(48): NCBI GI NO: 16555405 NR Description: stress-inducible membrane pore protein
  misc_feature (53)..(141): NCBI GI NO: 18414605 NR Description: pore protein homolog [Arabidopsis thaliana]
  misc_feature (53)..(141): NCBI GI NO: 30683558 NR Description: pore protein homolog [Arabidopsis thaliana]
  misc_feature (99)..(144): NCBI GI NO: 34906056 NR Description: P0698H10.23
  misc_feature (18)..(48): NCBI GI NO: 18414605 NR Description: pore protein homolog [Arabidopsis thaliana]
MPSAGLEAGSNKVDVAIDLGNPLLNRTVDGFLKIGAVGACRVVAEDAFDCIHRGDISKRQLEESLKKMCKEGAYWGAVAGVYVGMEYGVERARGDRDWKNALIAGIATGALVSAATNNKGNKIAQDAITGGAIATAVEFINYLT

SEQ ID NO: 14419 - protein, 88 aa, Triticum aestivum
  peptide (1)..(88): Ceres Seq. ID no. 15173173
TALYSTPSSCSALRHHLVSQEKERCLARGWRRGRTRWTWPSTSGTRCSTAPSTASSRSAPSAPAGWSPRTPSTASTGGISRSASLKSR

SEQ ID NO: 14420 - DNA, 2213 bp, Triticum aestivum
  misc_feature (1)..(2213): Ceres Seq. ID no. 13597334
tcatcatcaccatggctcggatccaaggagaggtacgtgagtgagtgatatgctcccactcccacatcttcttctagtccacaccttcctcccccatcccctgcctggccctgctccccatttacgcgcccggtgcgtacattcatgcatgacgcacacggccatgaagaggaggaggcggcggcatggccagcctcatcatcttcacctccttgtctccctcctcctcctcctactcctcgaccgcgcttgtgcagctctaccgtcgtcgcccaagatggcaaggatccagcagcatctcgaccgcgccaacaagccagcactgcgcaccatacagagcatggacggggacaccatcgactgcgtgccccggcacaagcagcacgcgctggaccacccgctcctcaggaaccacaggatccagagcgcgccgccgagcatgcccgcctccgccaccgccaccttcagtgctagcgcggcggcgtcgggcaactccaccagcagggccagagcggcgtggcagacgtggcaccacgcgggccactgcccgaaaggcacggtgcccgtgcggcggaccaccgccgaggacgtgctgcgcggcgggcagtcgctcttccgcttcggccgcaagcggcaccgccgcgaccgtgcggcccgcgccgccaacgcccccgacgtcgtcaccggcaacggccacgagcacgcgatcgcgtacacggcggtggggcagcaggaggtgtacggcgccaaggcgaccatcaacgtctgggatccggccatccacgagaacaacggcttcagcctctcgcagctctggctgctctccggctccttcaacggctccgacctcaacagcatcgaggccgggtggcaggtcactcccactcttccatcccatttccatcccatattcttagtgatgatccatctcacttggcttgttcattaaccgttgtaccagtaacttattgcatctgcattgcacggtaaaaaatcattgagatctgcagcgcgggcacatggcgccataaatgcgtgcacatctcgactcgatagatcgattccgtttgtgtacgacggctaccatagtttaacctcttctcttcatttgaggtcaacccatccatatggagaagtactccaacttgatatagtactaccatagaagaatccatgcatgtgagaaatatatatggaatccccgcagaaaaaggaggaatatatataatgggactgtacacttggctgtagtaggagacaaaattgctccaaaaagtgctaatgagttgtggtaatggacacgctcagctcagcgctaactttggatctactccagcaacatgcatgataagcactgcatgcatgcacatgtgctgcttaatcgatctgcatgcatgaaagcttacagtttacgtttctttctagtcaggtcagccctgagctgtacggtgacagcaggcctaggctcttcacatattggacaagcgacgcgtacgaggcgacgggctgctacaacgcgctgtgcccggacttcgtgcagaccagctcccgcgtggccatcggcgccgccatctccccggtctcctccctcgctggcgagcagtacgacatgacgctcctcatctggaaggaccccaagctcggcaactggtggcttagctacggcgacgccggagcctcgcagctcgtcggctactggcccgccgagctcttcacgcacctctccggccacgccagcatggtcgagtggggcggcgaggtcgttaacaccagcccggggggcgcgcacaccgccacgcagatgggctccggcaggttcgccgccgaggggttcggccgcgccagctacttccgcaacctcgagacggtggacgccgggaacagcctcgcccccgtgtcgctcgacgccttgcagacgctggccgaggacgccggctgctacgacatcaggaaggcctacgacgagcgggacggatggggcacgcacttctactacgggggaccgggacacaacccggcctgcccctagcatagccttggggaccaaacacgtcttgctggtgtacattttgtcttgtttttcggggacttgatcgctctcacctctcagccgatcgtgatcagcaacgtcttgactaaatctagtgttagagcatctacggccggactcgaaaaatccgacctttcaaacgcccgtgcacacggggtgtctg

SEQ ID NO: 14421 - protein, 299 aa, Triticum aestivum
  peptide (1)..(299): Ceres Seq. ID no. 13597335
  misc_feature (230)..(280): Pfam Name: Pfam Description:  Arabidopsis proteins of unknown function
  misc_feature (73)..(280): NCBI GI NO: 15238835 NR Description: expressed protein [Arabidopsis thaliana]
  misc_feature (56)..(280): NCBI GI NO: 18400044 NR Description: expressed protein [Arabidopsis thaliana]
  misc_feature (56)..(280): NCBI GI NO: 21593294 NR Description: putative carboxyl-terminal peptidase
  misc_feature (67)..(280): NCBI GI NO: 34393299 NR Description: putative DD1A protein
  misc_feature (55)..(280): NCBI GI NO: 15222707 NR Description: expressed protein [Arabidopsis thaliana]
  misc_feature (63)..(280): NCBI GI NO: 15241244 NR Description: expressed protein [Arabidopsis thaliana]
  misc_feature (55)..(280): NCBI GI NO: 27311623 NR Description: unknown protein [Arabidopsis thaliana]
  misc_feature (76)..(280): NCBI GI NO: 34393554 NR Description: putative carboxyl-terminal proteinase
  misc_feature (79)..(280): NCBI GI NO: 18406483 NR Description: expressed protein [Arabidopsis thaliana]
  misc_feature (166)..(288): NCBI GI NO: 6573746 NR Description: F20B24.18 [Arabidopsis thaliana]
MLPLPHLLLVHTFLPHPLPGPAPHLRARCVHSCMTHTAMKRRRRRHGQPHHLHLLVSLLLLLLLDRACAALPSSPKMARIQQHLDRANKPALRTIQSMDGDTIDCVPRHKQHALDHPLLRNHRIQSAPPSMPASATATFSASAAASGNSTSRARAAWQTWHHAGHCPKGTVPVRRTTAEDVLRGGQSLFRFGRKRHRRDRAARAANAPDVVTGNGHEHAIAYTAVGQQEVYGAKATINVWDPAIHENNGFSLSQLWLLSGSFNGSDLNSIEAGWQVTPTLPSHFHPIFLVMIHLTWLVH

SEQ ID NO: 14422 - protein, 266 aa, Triticum aestivum
  peptide (1)..(266): Ceres Seq. ID no. 13597336
  misc_feature (197)..(247): Pfam Name: Pfam Description:  Arabidopsis proteins of unknown function
  misc_feature (40)..(247): NCBI GI NO: 15238835 NR Description: expressed protein [Arabidopsis thaliana]
  misc_feature (23)..(247): NCBI GI NO: 18400044 NR Description: expressed protein [Arabidopsis thaliana]
  misc_feature (23)..(247): NCBI GI NO: 21593294 NR Description: putative carboxyl-terminal peptidase
  misc_feature (34)..(247): NCBI GI NO: 34393299 NR Description: putative DD1A protein
  misc_feature (22)..(247): NCBI GI NO: 15222707 NR Description: expressed protein [Arabidopsis thaliana]
  misc_feature (30)..(247): NCBI GI NO: 15241244 NR Description: expressed protein [Arabidopsis thaliana]
  misc_feature (22)..(247): NCBI GI NO: 27311623 NR Description: unknown protein [Arabidopsis thaliana]
  misc_feature (43)..(247): NCBI GI NO: 34393554 NR Description: putative carboxyl-terminal proteinase
  misc_feature (46)..(247): NCBI GI NO: 18406483 NR Description: expressed protein [Arabidopsis thaliana]
  misc_feature (133)..(255): NCBI GI NO: 6573746 NR Description: F20B24.18 [Arabidopsis thaliana]
MTHTAMKRRRRRHGQPHHLHLLVSLLLLLLLDRACAALPSSPKMARIQQHLDRANKPALRTIQSMDGDTIDCVPRHKQHALDHPLLRNHRIQSAPPSMPASATATFSASAAASGNSTSRARAAWQTWHHAGHCPKGTVPVRRTTAEDVLRGGQSLFRFGRKRHRRDRAARAANAPDVVTGNGHEHAIAYTAVGQQEVYGAKATINVWDPAIHENNGFSLSQLWLLSGSFNGSDLNSIEAGWQVTPTLPSHFHPIFLVMIHLTWLVH

SEQ ID NO: 14423 - protein, 261 aa, Triticum aestivum
  peptide (1)..(261): Ceres Seq. ID no. 13597337
  misc_feature (192)..(242): Pfam Name: Pfam Description:  Arabidopsis proteins of unknown function
  misc_feature (35)..(242): NCBI GI NO: 15238835 NR Description: expressed protein [Arabidopsis thaliana]
  misc_feature (18)..(242): NCBI GI NO: 18400044 NR Description: expressed protein [Arabidopsis thaliana]
  misc_feature (18)..(242): NCBI GI NO: 21593294 NR Description: putative carboxyl-terminal peptidase
  misc_feature (29)..(242): NCBI GI NO: 34393299 NR Description: putative DD1A protein
  misc_feature (17)..(242): NCBI GI NO: 15222707 NR Description: expressed protein [Arabidopsis thaliana]
  misc_feature (25)..(242): NCBI GI NO: 15241244 NR Description: expressed protein [Arabidopsis thaliana]
  misc_feature (17)..(242): NCBI GI NO: 27311623 NR Description: unknown protein [Arabidopsis thaliana]
  misc_feature (38)..(242): NCBI GI NO: 34393554 NR Description: putative carboxyl-terminal proteinase
  misc_feature (41)..(242): NCBI GI NO: 18406483 NR Description: expressed protein [Arabidopsis thaliana]
  misc_feature (128)..(250): NCBI GI NO: 6573746 NR Description: F20B24.18 [Arabidopsis thaliana]
MKRRRRRHGQPHHLHLLVSLLLLLLLDRACAALPSSPKMARIQQHLDRANKPALRTIQSMDGDTIDCVPRHKQHALDHPLLRNHRIQSAPPSMPASATATFSASAAASGNSTSRARAAWQTWHHAGHCPKGTVPVRRTTAEDVLRGGQSLFRFGRKRHRRDRAARAANAPDVVTGNGHEHAIAYTAVGQQEVYGAKATINVWDPAIHENNGFSLSQLWLLSGSFNGSDLNSIEAGWQVTPTLPSHFHPIFLVMIHLTWLVH

SEQ ID NO: 14424 - DNA, 1242 bp, Triticum aestivum
  misc_feature (1)..(1242): Ceres Seq. ID no. 15179772
cccaactcccaaccaaaccgagagcgcaaccgggacagcgagccaagatctgcagagccacaggcgacctcacaccggcgaccatggccgtggacctcatgggctgctacacccctcgccgcgccgacgaccagctcgccatccaggaggccgccaccgccggcctccgcagcctggagctcctcgtctcctccctctccggcgcggcgccgtccaaggcgccgcagcagcacccgcagcagccgttcggcgagatcgccgaccaggccgtctccaagttccgcaaggtgatctccatcctcgaccgcaccggccacgcccgcttccgccgcggccccgtccagtcgcctaccccgcctcctccggctccggtcgctcctccgccgcccccaccgcgccctctggccgtcgtcgagccggccaggcccgctcccttgaccgtcgtggcgccggtgtcggtggccgccccggtccctctcccgcagccgcagagcctgacgctggacttcaccaagccgaacctgaccatgtcaggcgcgacgtccgtgacgtccacgtccttcttctcgtcggtgaccgccggcgagggcagcgtgtccaagggccgcagcctggtctccgccggcaagccgccgctgtccgggcacaagagaaagccgtgcgccggcgcgcactcggaggccaacaccaccggcagccgatgccactgctccaagagaaggaagaaccgcgtgaagacgacggtgagggtgcccgcggtgagcgcgaagatcgccgacatcccgccggacgagtactcgtggaggaagtacggccagaagcccatcaagggatccccttacccacggggctactacaagtgcagcacagtgcgagggtgcccggcgcggaagcacgtggagcgcgccctggacgacccggcgatgctggtggtgacgtacgagggcgagcaccgccactcgccggggccgatgccgatgcagatggcgccgtcgccggtgccgattccgatgccgatgggcgcgcccgtagccgtagctagtgtgtccgccggcaacgggcacgtctgacttagttaaattttttctttctttccccatttggttgggggtgcttcgttcgttcgctcgcaatctgtctgatgtccgtgtaaagaagaagaaagattgtagagagacggagagggaaacttaatgccagagatttttactacctccaaaaaaaaaaaaaaaaaaaaaaaag

SEQ ID NO: 14425 - protein, 355 aa, Triticum aestivum
  peptide (1)..(355): Ceres Seq. ID no. 15179773
  misc_feature (261)..(320): Pfam Name: Pfam Description:  WRKY DNA -binding domain
  misc_feature (28)..(355): NCBI GI NO: 38346908 NR Description: OSJNBb0015N08.8
  misc_feature (28)..(326): NCBI GI NO: 38175580 NR Description: putative DNA-binding protein NtWRKY3
  misc_feature (30)..(344): NCBI GI NO: 38568048 NR Description: OSJNBa0065J03.18
  misc_feature (28)..(334): NCBI GI NO: 4894963 NR Description: DNA-binding protein WRKY3 [Avena sativa]
  misc_feature (28)..(339): NCBI GI NO: 25348152 NR Description: probable WRKY-type DNA binding protein
  misc_feature (28)..(331): NCBI GI NO: 18400580 NR Description: WRKY family transcription factor
  misc_feature (28)..(320): NCBI GI NO: 15227812 NR Description: WRKY family transcription factor
  misc_feature (163)..(320): NCBI GI NO: 40539044 NR Description: putative somatic embryogenesis related protein
  misc_feature (164)..(323): NCBI GI NO: 18402397 NR Description: WRKY family transcription factor
  misc_feature (177)..(320): NCBI GI NO: 11993901 NR Description: somatic embryogenesis related protein
QLPTKPRAQPGQRAKICRATGDLTPATMAVDLMGCYTPRRADDQLAIQEAATAGLRSLELLVSSLSGAAPSKAPQQHPQQPFGEIADQAVSKFRKVISILDRTGHARFRRGPVQSPTPPPPAPVAPPPPPPRPLAVVEPARPAPLTVVAPVSVAAPVPLPQPQSLTLDFTKPNLTMSGATSVTSTSFFSSVTAGEGSVSKGRSLVSAGKPPLSGHKRKPCAGAHSEANTTGSRCHCSKRRKNRVKTTVRVPAVSAKIADIPPDEYSWRKYGQKPIKGSPYPRGYYKCSTVRGCPARKHVERALDDPAMLVVTYEGEHRHSPGPMPMQMAPSPVPIPMPMGAPVAVASVSAGNGHV

SEQ ID NO: 14426 - protein, 346 aa, Triticum aestivum
  peptide (1)..(346): Ceres Seq. ID no. 15179774
PTPNQTESATGTASQDLQSHRRPHTGDHGRGPHGLLHPSPRRRPARHPGGRHRRPPQPGAPRLLPLRRGAVQGAAAAPAAAVRRDRRPGRLQVPQGDLHPRPHRPRPLPPRPRPVAYPASSGSGRSSAAPTAPSGRRRAGQARSLDRRGAGVGGRPGPSPAAAEPDAGLHQAEPDHVRRDVRDVHVLLLVGDRRRGQRVQGPQPGLRRQAAAVRAQEKAVRRRALGGQHHRQPMPLLQEKEEPREDDGEGARGEREDRRHPAGRVLVEEVRPEAHQGIPLPTGLLQVQHSARVPGAEARGARPGRPGDAGGDVRGRAPPLAGADADADGAVAGADSDADGRARSRS

SEQ ID NO: 14427 - protein, 328 aa, Triticum aestivum
  peptide (1)..(328): Ceres Seq. ID no. 15179775
  misc_feature (234)..(293): Pfam Name: Pfam Description:  WRKY DNA -binding domain
  misc_feature (1)..(328): NCBI GI NO: 38346908 NR Description: OSJNBb0015N08.8
  misc_feature (1)..(299): NCBI GI NO: 38175580 NR Description: putative DNA-binding protein NtWRKY3
  misc_feature (3)..(317): NCBI GI NO: 38568048 NR Description: OSJNBa0065J03.18
  misc_feature (1)..(307): NCBI GI NO: 4894963 NR Description: DNA-binding protein WRKY3 [Avena sativa]
  misc_feature (1)..(312): NCBI GI NO: 25348152 NR Description: probable WRKY-type DNA binding protein
  misc_feature (1)..(304): NCBI GI NO: 18400580 NR Description: WRKY family transcription factor
  misc_feature (1)..(293): NCBI GI NO: 15227812 NR Description: WRKY family transcription factor
  misc_feature (136)..(293): NCBI GI NO: 40539044 NR Description: putative somatic embryogenesis related protein
  misc_feature (137)..(296): NCBI GI NO: 18402397 NR Description: WRKY family transcription factor
  misc_feature (150)..(293): NCBI GI NO: 11993901 NR Description: somatic embryogenesis related protein
MAVDLMGCYTPRRADDQLAIQEAATAGLRSLELLVSSLSGAAPSKAPQQHPQQPFGEIADQAVSKFRKVISILDRTGHARFRRGPVQSPTPPPPAPVAPPPPPPRPLAVVEPARPAPLTVVAPVSVAAPVPLPQPQSLTLDFTKPNLTMSGATSVTSTSFFSSVTAGEGSVSKGRSLVSAGKPPLSGHKRKPCAGAHSEANTTGSRCHCSKRRKNRVKTTVRVPAVSAKIADIPPDEYSWRKYGQKPIKGSPYPRGYYKCSTVRGCPARKHVERALDDPAMLVVTYEGEHRHSPGPMPMQMAPSPVPIPMPMGAPVAVASVSAGNGHV

SEQ ID NO: 14428 - DNA, 1142 bp, Triticum aestivum
  misc_feature (1)..(1142): Ceres Seq. ID no. 12626108
aactccatttcccaaccaaccaaccaacagccgccaaaggccgatccatggcgtcggcgtcgccgtcgcggctgctgccgccctttccccctccagctgccccaacatcccgccacacaactctccgcgccgtccctcgcagctgcagcctcgccatcccgagcctccggtgccgcgcctccgctccagcggccgttgacgctggcgcgccgctgctgctagaggaccgcgccggcgcggtgtccatccgagagtttgtcacgctcgatgagctccacgccgccgtgcgcctccgcgttcgcaccttctacgagtacgcccgcgacactgtcggcgccgaggatcacaggaaaggtctggcagagagggaatatgaagcattacaaaatcggatttctgggaatatgattaattttcggagagtctcttgtataaatgggacagtgccactgttgccatcgttgatgtcagcagaggagctttgttcaacatgcaagtttgttgaagatggggaagagagaatagtagttggtagtttagacctgaatcagtgcctctggctaccagatgaactgactggaaagaggccaggggtaactgaatcaagccatacacgggcatatctgagcaatgtatgtgttgccaaggagctccaaagatgcggactgggctatgcattggttgacaagtctaagaagcttgctcgtcaatggggcataacggatttgtatgtccatgttgccatcaacaacgaggcggcacaaaagctgtacatcaagagtggatttgtgtacgaaagcgaggagcctgcccagcaggctaggcatcttgggcgcccccgaaggcttcttctttggcttgatatgaagaacgaaaccttgtgatcttacctgtaaatgcttctttttatagttatacagcattatctatatataattttgattttactgcccaattcaagtagtagtatttttttccttgtggaaagaaatacaattctcaaaatttaaattaaggattctccccataattttatttgttctgcacatagtactcattattcaatgtatatccagcattcccccggtggcaaacaatggtacatgataatacagtgctatcaaatctttgcattcctgctc

SEQ ID NO: 14429 - protein, 293 aa, Triticum aestivum
  peptide (1)..(293): Ceres Seq. ID no. 12626109
  misc_feature (169)..(262): Pfam Name: GNAT Pfam Description: Acetyltransferase
  misc_feature (19)..(293): NCBI GI NO: 28812153 NR Description: B1015H11.33
  misc_feature (50)..(286): NCBI GI NO: 21536955 NR Description: unknown [Arabidopsis thaliana]
  misc_feature (50)..(286): NCBI GI NO: 18417112 NR Description: putative protein; protein id: At4g28030
  misc_feature (124)..(284): NCBI GI NO: 23041456 NR Description: hypothetical protein
  misc_feature (74)..(262): NCBI GI NO: 30678254 NR Description: GCN5-related N-acetyltransferase (GNAT) family
  misc_feature (204)..(285): NCBI GI NO: 16329719 NR Description: unknown protein [Synechocystis sp. PCC 6803]
  misc_feature (207)..(284): NCBI GI NO: 23126552 NR Description: hypothetical protein [Nostoc punctiforme]
LHFPTNQPTAAKGRSMASASPSRLLPPFPPPAAPTSRHTTLRAVPRSCSLAIPSLRCRASAPAAVDAGAPLLLEDRAGAVSIREFVTLDELHAAVRLRVRTFYEYARDTVGAEDHRKGLAEREYEALQNRISGNMINFRRVSCINGTVPLLPSLMSAEELCSTCKFVEDGEERIVVGSLDLNQCLWLPDELTGKRPGVTESSHTRAYLSNVCVAKELQRCGLGYALVDKSKKLARQWGITDLYVHVAINNEAAQKLYIKSGFVYESEEPAQQARHLGRPRRLLLWLDMKNETL

SEQ ID NO: 14430 - protein, 278 aa, Triticum aestivum
  peptide (1)..(278): Ceres Seq. ID no. 12626110
  misc_feature (154)..(247): Pfam Name: GNAT Pfam Description: Acetyltransferase
  misc_feature (4)..(278): NCBI GI NO: 28812153 NR Description: B1015H11.33
  misc_feature (35)..(271): NCBI GI NO: 21536955 NR Description: unknown [Arabidopsis thaliana]
  misc_feature (35)..(271): NCBI GI NO: 18417112 NR Description: putative protein; protein id: At4g28030
  misc_feature (109)..(269): NCBI GI NO: 23041456 NR Description: hypothetical protein
  misc_feature (59)..(247): NCBI GI NO: 30678254 NR Description: GCN5-related N-acetyltransferase (GNAT) family
  misc_feature (189)..(270): NCBI GI NO: 16329719 NR Description: unknown protein [Synechocystis sp. PCC 6803]
  misc_feature (192)..(269): NCBI GI NO: 23126552 NR Description: hypothetical protein [Nostoc punctiforme]
MASASPSRLLPPFPPPAAPTSRHTTLRAVPRSCSLAIPSLRCRASAPAAVDAGAPLLLEDRAGAVSIREFVTLDELHAAVRLRVRTFYEYARDTVGAEDHRKGLAEREYEALQNRISGNMINFRRVSCINGTVPLLPSLMSAEELCSTCKFVEDGEERIVVGSLDLNQCLWLPDELTGKRPGVTESSHTRAYLSNVCVAKELQRCGLGYALVDKSKKLARQWGITDLYVHVAINNEAAQKLYIKSGFVYESEEPAQQARHLGRPRRLLLWLDMKNETL

SEQ ID NO: 14431 - protein, 159 aa, Triticum aestivum
  peptide (1)..(159): Ceres Seq. ID no. 12626111
  misc_feature (35)..(128): Pfam Name: GNAT Pfam Description: Acetyltransferase
  misc_feature (1)..(159): NCBI GI NO: 28812153 NR Description: B1015H11.33
  misc_feature (1)..(152): NCBI GI NO: 21536955 NR Description: unknown [Arabidopsis thaliana]
  misc_feature (1)..(152): NCBI GI NO: 18417112 NR Description: putative protein; protein id: At4g28030
  misc_feature (1)..(150): NCBI GI NO: 23041456 NR Description: hypothetical protein
  misc_feature (1)..(128): NCBI GI NO: 30678254 NR Description: GCN5-related N-acetyltransferase (GNAT) family
  misc_feature (70)..(151): NCBI GI NO: 16329719 NR Description: unknown protein [Synechocystis sp. PCC 6803]
  misc_feature (73)..(150): NCBI GI NO: 23126552 NR Description: hypothetical protein [Nostoc punctiforme]
MINFRRVSCINGTVPLLPSLMSAEELCSTCKFVEDGEERIVVGSLDLNQCLWLPDELTGKRPGVTESSHTRAYLSNVCVAKELQRCGLGYALVDKSKKLARQWGITDLYVHVAINNEAAQKLYIKSGFVYESEEPAQQARHLGRPRRLLLWLDMKNETL

SEQ ID NO: 14432 - DNA, 1202 bp, Triticum aestivum
  misc_feature (1)..(1202): Ceres Seq. ID no. 12618341
atctcaaccttgccttagttttcgacgccgccgccgtagagcccgttccccctcacgcggccagcgaccatgtcgagtggcctgaacatgtccctagacgacctcatcaagcaatccaagtccaggcccaaagccaaccccgccttctcttccgggcccacccgccgggcggcgccgtccgcccggaccatgccctacccgccgtctgctcccaaggccgccaccgccgactctctgtacggtgtctactccgagcacgttgccgccatggcaacctccccgccaccgccggtggctgggccacaggcactcgagacgggcacgaagctgcacatctccaacctcgactccagcgtcaccgtcgaggacgtccaggaactcttttcagagattggtgagctcaaacgttattctgttaactacgataaggatgggaagtctcagggaagtgcggaagttgtctttgcaagaaaagtagatgctttggatgctattgagagatataacggtgttctgcttgatgggaagccaatgaagatagagctcattggaaataagaccgagccacacccaacagaacctttgatgtacaacggcacttcttctaactacaatgcaactccaaacagtttgcttcagagaggtgacccgagagggccatttcatggtaatggtcgttctggaggcagtggtcagggcggtgctggcaaaagaggaatgtttcaaggcaacgttcgtcctggaaacactgtgcaggacggtggtgggcggggtcagggcagagccagagggcatgatcgcagccgagttccggcctctgctgcggatcttgatgctgaactggagcagtatcatgcagcagcagtgaagcaaaaatgaggctctgatgtagtccgtatattttatactccctccgtccatatataggtgacgtggttttagtccaaatttaaactaaaaccacgtcacttgtttatgaacggagggagtatatacatagattgttgcattattagttttctgcttttagtcgtcaggtaccatgttgagaaaagttggaaggcattaattcgacatttacatctgctgtgcttttcatatccctactccgtgctggatatgccgtattacctaattttgaaacaggggtgttctcttggggtttatttggatagtaagattacaaagaactagttcttgtc

SEQ ID NO: 14433 - protein, 269 aa, Triticum aestivum
  peptide (1)..(269): Ceres Seq. ID no. 12618342
  misc_feature (1)..(269): NCBI GI NO: 33146678 NR Description: putative RNA and export factor binding protein
  misc_feature (1)..(189): NCBI GI NO: 34900544 NR Description: P0565A07.3
  misc_feature (166)..(269): NCBI GI NO: 34900544 NR Description: P0565A07.3
  misc_feature (27)..(267): NCBI GI NO: 30679669 NR Description: RNA and export factor binding protein, putative
  misc_feature (27)..(267): NCBI GI NO: 11358209 NR Description: hypothetical protein T22P11
  misc_feature (1)..(266): NCBI GI NO: 30693141 NR Description: RNA and export factor binding protein, putative
  misc_feature (1)..(225): NCBI GI NO: 30697313 NR Description: RNA and export factor binding protein, putative
  misc_feature (1)..(266): NCBI GI NO: 25404603 NR Description: hypothetical protein T6J19.1
  misc_feature (1)..(225): NCBI GI NO: 30697310 NR Description: RNA and export factor binding protein, putative
  misc_feature (1)..(215): NCBI GI NO: 21555029 NR Description: transcriptional coactivator-like protein
MSSGLNMSLDDLIKQSKSRPKANPAFSSGPTRRAAPSARTMPYPPSAPKAATADSLYGVYSEHVAAMATSPPPPVAGPQALETGTKLHISNLDSSVTVEDVQELFSEIGELKRYSVNYDKDGKSQGSAEVVFARKVDALDAIERYNGVLLDGKPMKIELIGNKTEPHPTEPLMYNGTSSNYNATPNSLLQRGDPRGPFHGNGRSGGSGQGGAGKRGMFQGNVRPGNTVQDGGGRGQGRARGHDRSRVPASAADLDAELEQYHAAAVKQK

SEQ ID NO: 14434 - protein, 263 aa, Triticum aestivum
  peptide (1)..(263): Ceres Seq. ID no. 12618343
  misc_feature (1)..(263): NCBI GI NO: 33146678 NR Description: putative RNA and export factor binding protein
  misc_feature (1)..(183): NCBI GI NO: 34900544 NR Description: P0565A07.3
  misc_feature (160)..(263): NCBI GI NO: 34900544 NR Description: P0565A07.3
  misc_feature (21)..(261): NCBI GI NO: 30679669 NR Description: RNA and export factor binding protein, putative
  misc_feature (21)..(261): NCBI GI NO: 11358209 NR Description: hypothetical protein T22P11
  misc_feature (1)..(260): NCBI GI NO: 30693141 NR Description: RNA and export factor binding protein, putative
  misc_feature (1)..(219): NCBI GI NO: 30697313 NR Description: RNA and export factor binding protein, putative
  misc_feature (1)..(260): NCBI GI NO: 25404603 NR Description: hypothetical protein T6J19.1
  misc_feature (1)..(219): NCBI GI NO: 30697310 NR Description: RNA and export factor binding protein, putative
  misc_feature (1)..(209): NCBI GI NO: 21555029 NR Description: transcriptional coactivator-like protein
MSLDDLIKQSKSRPKANPAFSSGPTRRAAPSARTMPYPPSAPKAATADSLYGVYSEHVAAMATSPPPPVAGPQALETGTKLHISNLDSSVTVEDVQELFSEIGELKRYSVNYDKDGKSQGSAEVVFARKVDALDAIERYNGVLLDGKPMKIELIGNKTEPHPTEPLMYNGTSSNYNATPNSLLQRGDPRGPFHGNGRSGGSGQGGAGKRGMFQGNVRPGNTVQDGGGRGQGRARGHDRSRVPASAADLDAELEQYHAAAVKQK

SEQ ID NO: 14435 - protein, 229 aa, Triticum aestivum
  peptide (1)..(229): Ceres Seq. ID no. 12618344
  misc_feature (1)..(229): NCBI GI NO: 33146678 NR Description: putative RNA and export factor binding protein
  misc_feature (1)..(149): NCBI GI NO: 34900544 NR Description: P0565A07.3
  misc_feature (126)..(229): NCBI GI NO: 34900544 NR Description: P0565A07.3
  misc_feature (1)..(227): NCBI GI NO: 30679669 NR Description: RNA and export factor binding protein, putative
  misc_feature (1)..(227): NCBI GI NO: 11358209 NR Description: hypothetical protein T22P11
  misc_feature (1)..(226): NCBI GI NO: 30693141 NR Description: RNA and export factor binding protein, putative
  misc_feature (1)..(185): NCBI GI NO: 30697313 NR Description: RNA and export factor binding protein, putative
  misc_feature (1)..(226): NCBI GI NO: 25404603 NR Description: hypothetical protein T6J19.1
  misc_feature (1)..(185): NCBI GI NO: 30697310 NR Description: RNA and export factor binding protein, putative
  misc_feature (1)..(175): NCBI GI NO: 21555029 NR Description: transcriptional coactivator-like protein
MPYPPSAPKAATADSLYGVYSEHVAAMATSPPPPVAGPQALETGTKLHISNLDSSVTVEDVQELFSEIGELKRYSVNYDKDGKSQGSAEVVFARKVDALDAIERYNGVLLDGKPMKIELIGNKTEPHPTEPLMYNGTSSNYNATPNSLLQRGDPRGPFHGNGRSGGSGQGGAGKRGMFQGNVRPGNTVQDGGGRGQGRARGHDRSRVPASAADLDAELEQYHAAAVKQK

SEQ ID NO: 14436 - DNA, 953 bp, Triticum aestivum
  misc_feature (1)..(953): Ceres Seq. ID no. 13597839
ccccaatcctctctcgtccccatccccaatccccgatctcccgaccccgacccccgacgaaaccctagccagcaaaccgcggcggcggcggcaatgggcaacccggagaagctgatggcgcagatcttcgacctcaagttcacgtccaagtcgctgcagcggcaggcgcgcaagtgcgagaaggaggagaaggagcagaagctcaaggtgaagaaggccatcgagaagggcaacgtggacggcgcgcggatctacgccgagaacgccatccgcaagcgcaccgagcacatgaactacctccgcctcgcctcccgcctcgacgccgtcgtcgcgcgcctcgacacgcaggccaagatgcaggccatcggcaagtccatgggcagcatcgtcaagtcgcttgactcctccctcgccacgggcaacctccagaagatgtccgagaccatggacagcttcgagcgccagttcgtcaacatggaggtccaggccgagttcatggagggcgccatggccggctccacctccctctccacgcccgagaccgaggtcaactccctcatgcagcaggtcgccgacgactacggcctcgaggtctccgtcggcctcccccaggccgccgcccacgccatcccggccgccaaggacaaggagaaggtcgacgaggacgacctcacccgccgcctcgcagagctcaaggcccgcggctaaactgaacggccttcgcttcacttcaggtacggctcatgcaatgttcactcgcctcgccgtatgtcagttgtcaagggctgctcatatctgacagccccgtaaatattgttaacgcccatgtgggtgctctctttgtctgggatctctatgtggaactgatttaaacgctgctgtgtgatatgacgtgttattccgaatcggagtgtgatattgatattatgagtcagtaataatacatgtgcttg

SEQ ID NO: 14437 - protein, 235 aa, Triticum aestivum
  peptide (1)..(235): Ceres Seq. ID no. 13597840
  misc_feature (41)..(210): Pfam Name: Pfam Description:  SNF7
  misc_feature (32)..(235): NCBI GI NO: 30270581 NR Description: superal1 [Zea mays]
  misc_feature (32)..(235): NCBI GI NO: 29367557 NR Description: development protein-like protein
  misc_feature (32)..(235): NCBI GI NO: 28916459 NR Description: putative developmental protein
  misc_feature (32)..(235): NCBI GI NO: 18410249 NR Description: developmental protein DG1118 -related
  misc_feature (32)..(235): NCBI GI NO: 21537090 NR Description: developmental protein, putative
  misc_feature (32)..(235): NCBI GI NO: 15220819 NR Description: developmental protein -related
  misc_feature (32)..(234): NCBI GI NO: 25518422 NR Description: hypothetical protein F11A6
  misc_feature (41)..(234): NCBI GI NO: 3789911 NR Description: developmental protein DG1118
  misc_feature (22)..(232): NCBI GI NO: 39644911 NR Description: CHMP1.5 protein [Homo sapiens]
  misc_feature (32)..(232): NCBI GI NO: 27229022 NR Description: RIKEN cDNA 2610002M06 [Mus musculus]
PQSSLVPIPNPRSPDPDPRRNPSQQTAAAAAMGNPEKLMAQIFDLKFTSKSLQRQARKCEKEEKEQKLKVKKAIEKGNVDGARIYAENAIRKRTEHMNYLRLASRLDAVVARLDTQAKMQAIGKSMGSIVKSLDSSLATGNLQKMSETMDSFERQFVNMEVQAEFMEGAMAGSTSLSTPETEVNSLMQQVADDYGLEVSVGLPQAAAHAIPAAKDKEKVDEDDLTRRLAELKARG

SEQ ID NO: 14438 - protein, 204 aa, Triticum aestivum
  peptide (1)..(204): Ceres Seq. ID no. 13597841
  misc_feature (10)..(179): Pfam Name: Pfam Description:  SNF7
  misc_feature (1)..(204): NCBI GI NO: 30270581 NR Description: superal1 [Zea mays]
  misc_feature (1)..(204): NCBI GI NO: 29367557 NR Description: development protein-like protein
  misc_feature (1)..(204): NCBI GI NO: 28916459 NR Description: putative developmental protein
  misc_feature (1)..(204): NCBI GI NO: 18410249 NR Description: developmental protein DG1118 -related
  misc_feature (1)..(204): NCBI GI NO: 21537090 NR Description: developmental protein, putative
  misc_feature (1)..(204): NCBI GI NO: 15220819 NR Description: developmental protein -related
  misc_feature (1)..(203): NCBI GI NO: 25518422 NR Description: hypothetical protein F11A6
  misc_feature (10)..(203): NCBI GI NO: 3789911 NR Description: developmental protein DG1118
  misc_feature (1)..(201): NCBI GI NO: 39644911 NR Description: CHMP1.5 protein [Homo sapiens]
  misc_feature (1)..(201): NCBI GI NO: 27229022 NR Description: RIKEN cDNA 2610002M06 [Mus musculus]
MGNPEKLMAQIFDLKFTSKSLQRQARKCEKEEKEQKLKVKKAIEKGNVDGARIYAENAIRKRTEHMNYLRLASRLDAVVARLDTQAKMQAIGKSMGSIVKSLDSSLATGNLQKMSETMDSFERQFVNMEVQAEFMEGAMAGSTSLSTPETEVNSLMQQVADDYGLEVSVGLPQAAAHAIPAAKDKEKVDEDDLTRRLAELKARG

SEQ ID NO: 14439 - protein, 197 aa, Triticum aestivum
  peptide (1)..(197): Ceres Seq. ID no. 13597842
  misc_feature (3)..(172): Pfam Name: Pfam Description:  SNF7
  misc_feature (1)..(197): NCBI GI NO: 30270581 NR Description: superal1 [Zea mays]
  misc_feature (1)..(197): NCBI GI NO: 29367557 NR Description: development protein-like protein
  misc_feature (1)..(197): NCBI GI NO: 28916459 NR Description: putative developmental protein
  misc_feature (1)..(197): NCBI GI NO: 18410249 NR Description: developmental protein DG1118 -related
  misc_feature (1)..(197): NCBI GI NO: 21537090 NR Description: developmental protein, putative
  misc_feature (1)..(197): NCBI GI NO: 15220819 NR Description: developmental protein -related
  misc_feature (1)..(196): NCBI GI NO: 25518422 NR Description: hypothetical protein F11A6
  misc_feature (3)..(196): NCBI GI NO: 3789911 NR Description: developmental protein DG1118
  misc_feature (1)..(194): NCBI GI NO: 39644911 NR Description: CHMP1.5 protein [Homo sapiens]
  misc_feature (1)..(194): NCBI GI NO: 27229022 NR Description: RIKEN cDNA 2610002M06 [Mus musculus]
MAQIFDLKFTSKSLQRQARKCEKEEKEQKLKVKKAIEKGNVDGARIYAENAIRKRTEHMNYLRLASRLDAVVARLDTQAKMQAIGKSMGSIVKSLDSSLATGNLQKMSETMDSFERQFVNMEVQAEFMEGAMAGSTSLSTPETEVNSLMQQVADDYGLEVSVGLPQAAAHAIPAAKDKEKVDEDDLTRRLAELKARG

SEQ ID NO: 14440 - DNA, 1675 bp, Triticum aestivum
  misc_feature (1)..(1675): Ceres Seq. ID no. 13598642
gaaaaatcgaccaaagagcaacccgacggccgtggtgatggaggcgatggggaagcagcagagggaggaggtgctcctccgcgccgcctccgacggcaacctccgactcctcaagaagatggcgcgctggatggggtcagggggccaaggcgaggccgccgtacttgcggcggtggaggacggcgaagggggtcgcccgctgcacctggcggccggggcgggccgggtcgaggtctgcaggtacctcgtcgaggacctccgcctcgatgtcaatcaactcaactgtcaaggtcacacgccactgtacctttctgcctattttgggagagctgctgctgcaacatatcttcttgatcatggtgccgatccactagctagcaaactacggtcacctctttatggcgctgcaatgcaagggcattgtgaaatgttagaaatgctgctttcaagaggactcgatgtggatttaaattctgtacaagggacggcattgcatgcagctgcttgttataaacaacatggcatgatgaagattttgttggagcaccatgccgatcctaacaaggtttgctatcttaataataccccgttgagtttggccatgcggcagcgggacatgtctacagagttgttggaatgtgccaagctactcataaaggctggtgctgatgtgaattttattgaccttgatggtgatagttacgtgacagtggcagcgaagttcggctatcctggcatcatgaagtgcttattagatgctggtgctaaccccgatattccagatgaatatggtagaacaccagttgaatttgctgcctctaacggcagtagggatatggttgaaatgttattccctttaacttctcctatttcaacgctgccggactggagtattgatggaatcatttctcatgtgaaacactatggtttgaagccgagggataaacaaaagtgtgcgaagagaagaactgaactgaaacagaaagctttaaaggcttttaaggaagaggaatattttatagcagcactgctgtatagttgtgcaataacacttgacccgagtccagatgaatatgcaaccctattggcaaataggagtctctgctgtttgcgcaccaagaacggaagagctgctctccctgatgctaccatgtgcagaagggtgcgacctttttggccaaaagcctgctatcgagaagggtcagcttttatgttattgaaggactatgagaaagcatgcaaggcttttgcggatggcttgaagcttgaccctacaaatggtgatcttgcaaatgctttaagggaagcccaagaagctgcgaaggatgctcgtcgccctgaaaattgactgatgtgtcaaaccttacatgcagaatctgaggctctgttttgttgctaagcaccttttgtccatcctgaaaacttctgccaagaatatcccgtggtcgtttaagacttccgttgcacccatcgtttgtaaatataactggggatgaactcgctgaccatagtatcttcattccagtgcatgtgttgacaaactttatcgtcacagaacgtacggcatagtccggtcaccgagaagcgctggaggcggagcagtatgtaattggctcattaattcttccttccccttaccttcgcgggaagtggtaaatgatgaaatttggacttg

SEQ ID NO: 14441 - protein, 448 aa, Triticum aestivum
  peptide (1)..(448): Ceres Seq. ID no. 15222389
  misc_feature (394)..(426): Pfam Name: Pfam Description:  TPR Domain
  misc_feature (25)..(434): NCBI GI NO: 27542768 NR Description: ankyrin-like protein-like protein
  misc_feature (28)..(436): NCBI GI NO: 27542766 NR Description: ankyrin-like protein-like protein
  misc_feature (16)..(441): NCBI GI NO: 34896852 NR Description: putative ankyrin [Oryza sativa]
  misc_feature (11)..(313): NCBI GI NO: 13435243 NR Description: putative gag-pol polyprotein [Oryza sativa]
  misc_feature (316)..(433): NCBI GI NO: 13435243 NR Description: putative gag-pol polyprotein [Oryza sativa]
  misc_feature (15)..(441): NCBI GI NO: 15229331 NR Description: ankyrin-related protein [Arabidopsis thaliana]
  misc_feature (60)..(448): NCBI GI NO: 13435247 NR Description: putative ankyrin [Oryza sativa]
  misc_feature (14)..(327): NCBI GI NO: 24745936 NR Description: ankyrin-like protein [Solanum tuberosum]
  misc_feature (211)..(438): NCBI GI NO: 34910278 NR Description: OSJNBa0089K24.26
  misc_feature (14)..(306): NCBI GI NO: 34329680 NR Description: unknown [Nicotiana benthamiana]
KNRPKSNPTAVVMEAMGKQQREEVLLRAASDGNLRLLKKMARWMGSGGQGEAAVLAAVEDGEGGRPLHLAAGAGRVEVCRYLVEDLRLDVNQLNCQGHTPLYLSAYFGRAAAATYLLDHGADPLASKLRSPLYGAAMQGHCEMLEMLLSRGLDVDLNSVQGTALHAAACYKQHGMMKILLEHHADPNKVCYLNNTPLSLAMRQRDMSTELLECAKLLIKAGADVNFIDLDGDSYVTVAAKFGYPGIMKCLLDAGANPDIPDEYGRTPVEFAASNGSRDMVEMLFPLTSPISTLPDWSIDGIISHVKHYGLKPRDKQKCAKRRTELKQKALKAFKEEEYFIAALLYSCAITLDPSPDEYATLLANRSLCCLRTKNGRAALPDATMCRRVRPFWPKACYREGSAFMLLKDYEKACKAFADGLKLDPTNGDLANALREAQEAAKDARRPEN

SEQ ID NO: 14442 - protein, 436 aa, Triticum aestivum
  peptide (1)..(436): Ceres Seq. ID no. 15222390
  misc_feature (382)..(414): Pfam Name: Pfam Description:  TPR Domain
  misc_feature (13)..(422): NCBI GI NO: 27542768 NR Description: ankyrin-like protein-like protein
  misc_feature (16)..(424): NCBI GI NO: 27542766 NR Description: ankyrin-like protein-like protein
  misc_feature (4)..(429): NCBI GI NO: 34896852 NR Description: putative ankyrin [Oryza sativa]
  misc_feature (1)..(301): NCBI GI NO: 13435243 NR Description: putative gag-pol polyprotein [Oryza sativa]
  misc_feature (304)..(421): NCBI GI NO: 13435243 NR Description: putative gag-pol polyprotein [Oryza sativa]
  misc_feature (3)..(429): NCBI GI NO: 15229331 NR Description: ankyrin-related protein [Arabidopsis thaliana]
  misc_feature (48)..(436): NCBI GI NO: 13435247 NR Description: putative ankyrin [Oryza sativa]
  misc_feature (2)..(315): NCBI GI NO: 24745936 NR Description: ankyrin-like protein [Solanum tuberosum]
  misc_feature (199)..(426): NCBI GI NO: 34910278 NR Description: OSJNBa0089K24.26
  misc_feature (2)..(294): NCBI GI NO: 34329680 NR Description: unknown [Nicotiana benthamiana]
MEAMGKQQREEVLLRAASDGNLRLLKKMARWMGSGGQGEAAVLAAVEDGEGGRPLHLAAGAGRVEVCRYLVEDLRLDVNQLNCQGHTPLYLSAYFGRAAAATYLLDHGADPLASKLRSPLYGAAMQGHCEMLEMLLSRGLDVDLNSVQGTALHAAACYKQHGMMKILLEHHADPNKVCYLNNTPLSLAMRQRDMSTELLECAKLLIKAGADVNFIDLDGDSYVTVAAKFGYPGIMKCLLDAGANPDIPDEYGRTPVEFAASNGSRDMVEMLFPLTSPISTLPDWSIDGIISHVKHYGLKPRDKQKCAKRRTELKQKALKAFKEEEYFIAALLYSCAITLDPSPDEYATLLANRSLCCLRTKNGRAALPDATMCRRVRPFWPKACYREGSAFMLLKDYEKACKAFADGLKLDPTNGDLANALREAQEAAKDARRPEN

SEQ ID NO: 14443 - protein, 433 aa, Triticum aestivum
  peptide (1)..(433): Ceres Seq. ID no. 15222391
  misc_feature (379)..(411): Pfam Name: Pfam Description:  TPR Domain
  misc_feature (10)..(419): NCBI GI NO: 27542768 NR Description: ankyrin-like protein-like protein
  misc_feature (13)..(421): NCBI GI NO: 27542766 NR Description: ankyrin-like protein-like protein
  misc_feature (1)..(426): NCBI GI NO: 34896852 NR Description: putative ankyrin [Oryza sativa]
  misc_feature (1)..(298): NCBI GI NO: 13435243 NR Description: putative gag-pol polyprotein [Oryza sativa]
  misc_feature (301)..(418): NCBI GI NO: 13435243 NR Description: putative gag-pol polyprotein [Oryza sativa]
  misc_feature (1)..(426): NCBI GI NO: 15229331 NR Description: ankyrin-related protein [Arabidopsis thaliana]
  misc_feature (45)..(433): NCBI GI NO: 13435247 NR Description: putative ankyrin [Oryza sativa]
  misc_feature (1)..(312): NCBI GI NO: 24745936 NR Description: ankyrin-like protein [Solanum tuberosum]
  misc_feature (196)..(423): NCBI GI NO: 34910278 NR Description: OSJNBa0089K24.26
  misc_feature (1)..(291): NCBI GI NO: 34329680 NR Description: unknown [Nicotiana benthamiana]
MGKQQREEVLLRAASDGNLRLLKKMARWMGSGGQGEAAVLAAVEDGEGGRPLHLAAGAGRVEVCRYLVEDLRLDVNQLNCQGHTPLYLSAYFGRAAAATYLLDHGADPLASKLRSPLYGAAMQGHCEMLEMLLSRGLDVDLNSVQGTALHAAACYKQHGMMKILLEHHADPNKVCYLNNTPLSLAMRQRDMSTELLECAKLLIKAGADVNFIDLDGDSYVTVAAKFGYPGIMKCLLDAGANPDIPDEYGRTPVEFAASNGSRDMVEMLFPLTSPISTLPDWSIDGIISHVKHYGLKPRDKQKCAKRRTELKQKALKAFKEEEYFIAALLYSCAITLDPSPDEYATLLANRSLCCLRTKNGRAALPDATMCRRVRPFWPKACYREGSAFMLLKDYEKACKAFADGLKLDPTNGDLANALREAQEAAKDARRPEN

SEQ ID NO: 14444 - DNA, 1412 bp, Triticum aestivum
  misc_feature (1)..(1412): Ceres Seq. ID no. 14302224
acgtaaggaagaagcaagaagcaggtagcagctagcataccacactcgatcgatcatacacatacaccatgccggccgcgcagcacatcgaacgagaccaagacctcgccatgagcagcgacgagttacttcaagctcagctggagctctaccaccacggcctcgccttcgtcaagtcactggcgctcaaggccgccacggacctgcgcatccccgacgccatccaccgccgcggcggcgccgccaccttgtccgagctggcctccgacaccgggatccaccccacgaagcgctccaacctccggcgggtcatgcgggtgctcaccaccaccggggtattctccattgtccaaggcaaaggcagcaacgaccacgccggtgatggcgctgcgtattacaagctcacgcgggtctcccggctccttgtcgagagatcaccgcacaacctgtccccgatggtgggcaccatcgtcaacacgttatgctggacctctctcctcaaaatgcccgagtggtttacccaaggccaagagggagagtcggcacagtcgcactcgctcgtccagctggccaacggctgcacgttctgggacaccaccaaggtcgatggcggcttgttcaacgacggcatggccgcggacagccgcatcgccatgaaggtcctgttgaaggagcacggcggagcgttcggggaagtgaaaagctcgctggtggacatcggcggcaaccatggcgccaccgcgtcggccgtggcgagagcgttcccgcacctcaagtgcagcgttctggacctcccacacgtcgtcgccgcggctcccgccagcgacattttgaccttcgtcgctggaaatatgttcgagtatgtcccacctgcggatgctgttctactcaagtggattttgcatgactggaaacacgaagattgcgtcaagataatgcgccggtgcaaggaagcgatcccagcgaaagaagccggaggaaaggtgataatcatcgacatggtggtgggatatccggtgactcagcccaaccattccaaagaggcgcaggttttgttagatatctacatgatgggctccgatggaatggagcgagaggaaaacgagtggagcttgattttctccgaagccgggttcagcgactacaagatcactccaaccaatgggattcgatcaattatcgaagtatacccttaaatgtacttacttccacttcggagatactatctccttccgtccgtacgtgtttattagtcttgcacgtgtaattgacttggtaaattagcagccaagatacacgtgcaagacttataaaccggaaaggaaggagtcgtcatttgatttgtaataaatctcaccaggaactctctgtattattgcatttaagttttactttttgtttatagattttac

SEQ ID NO: 14445 - protein, 375 aa, Triticum aestivum
  peptide (1)..(375): Ceres Seq. ID no. 14302225
  misc_feature (101)..(351): Pfam Name: Pfam Description:  O-methyltransferase
  misc_feature (4)..(375): NCBI GI NO: 37530600 NR Description: putative o-methyltransferase ZRP4
  misc_feature (4)..(375): NCBI GI NO: 37530606 NR Description: putative o-methyltransferase ZRP4
  misc_feature (16)..(375): NCBI GI NO: 1353193 NR Description: O-METHYLTRANSFERASE ZRP4 (OMT)
  misc_feature (15)..(375): NCBI GI NO: 4098238 NR Description: o-methyltransferase [Triticum aestivum]
  misc_feature (15)..(375): NCBI GI NO: 22093735 NR Description: putative o-methyltransferase
  misc_feature (9)..(375): NCBI GI NO: 34909608 NR Description: putative o-methyltransferase
  misc_feature (5)..(375): NCBI GI NO: 20514367 NR Description: orcinol O-methyltransferase [Rosa hybrid cultivar]
  misc_feature (5)..(375): NCBI GI NO: 20514369 NR Description: orcinol O-methyltransferase [Rosa hybrid cultivar]
  misc_feature (19)..(375): NCBI GI NO: 38175602 NR Description: putative catechol O-methyltransferase
  misc_feature (16)..(375): NCBI GI NO: 2282586 NR Description: methyltransferase [Prunus armeniaca]
MPAAQHIERDQDLAMSSDELLQAQLELYHHGLAFVKSLALKAATDLRIPDAIHRRGGAATLSELASDTGIHPTKRSNLRRVMRVLTTTGVFSIVQGKGSNDHAGDGAAYYKLTRVSRLLVERSPHNLSPMVGTIVNTLCWTSLLKMPEWFTQGQEGESAQSHSLVQLANGCTFWDTTKVDGGLFNDGMAADSRIAMKVLLKEHGGAFGEVKSSLVDIGGNHGATASAVARAFPHLKCSVLDLPHVVAAAPASDILTFVAGNMFEYVPPADAVLLKWILHDWKHEDCVKIMRRCKEAIPAKEAGGKVIIIDMVVGYPVTQPNHSKEAQVLLDIYMMGSDGMEREENEWSLIFSEAGFSDYKITPTNGIRSIIEVYP

SEQ ID NO: 14446 - protein, 361 aa, Triticum aestivum
  peptide (1)..(361): Ceres Seq. ID no. 14302226
  misc_feature (87)..(337): Pfam Name: Pfam Description:  O-methyltransferase
  misc_feature (1)..(361): NCBI GI NO: 37530600 NR Description: putative o-methyltransferase ZRP4
  misc_feature (1)..(361): NCBI GI NO: 37530606 NR Description: putative o-methyltransferase ZRP4
  misc_feature (2)..(361): NCBI GI NO: 1353193 NR Description: O-METHYLTRANSFERASE ZRP4 (OMT)
  misc_feature (1)..(361): NCBI GI NO: 4098238 NR Description: o-methyltransferase [Triticum aestivum]
  misc_feature (1)..(361): NCBI GI NO: 22093735 NR Description: putative o-methyltransferase
  misc_feature (1)..(361): NCBI GI NO: 34909608 NR Description: putative o-methyltransferase
  misc_feature (1)..(361): NCBI GI NO: 20514367 NR Description: orcinol O-methyltransferase [Rosa hybrid cultivar]
  misc_feature (1)..(361): NCBI GI NO: 20514369 NR Description: orcinol O-methyltransferase [Rosa hybrid cultivar]
  misc_feature (5)..(361): NCBI GI NO: 38175602 NR Description: putative catechol O-methyltransferase
  misc_feature (2)..(361): NCBI GI NO: 2282586 NR Description: methyltransferase [Prunus armeniaca]
MSSDELLQAQLELYHHGLAFVKSLALKAATDLRIPDAIHRRGGAATLSELASDTGIHPTKRSNLRRVMRVLTTTGVFSIVQGKGSNDHAGDGAAYYKLTRVSRLLVERSPHNLSPMVGTIVNTLCWTSLLKMPEWFTQGQEGESAQSHSLVQLANGCTFWDTTKVDGGLFNDGMAADSRIAMKVLLKEHGGAFGEVKSSLVDIGGNHGATASAVARAFPHLKCSVLDLPHVVAAAPASDILTFVAGNMFEYVPPADAVLLKWILHDWKHEDCVKIMRRCKEAIPAKEAGGKVIIIDMVVGYPVTQPNHSKEAQVLLDIYMMGSDGMEREENEWSLIFSEAGFSDYKITPTNGIRSIIEVYP

SEQ ID NO: 14447 - protein, 294 aa, Triticum aestivum
  peptide (1)..(294): Ceres Seq. ID no. 14302227
  misc_feature (20)..(270): Pfam Name: Pfam Description:  O-methyltransferase
  misc_feature (1)..(294): NCBI GI NO: 37530600 NR Description: putative o-methyltransferase ZRP4
  misc_feature (1)..(294): NCBI GI NO: 37530606 NR Description: putative o-methyltransferase ZRP4
  misc_feature (1)..(294): NCBI GI NO: 1353193 NR Description: O-METHYLTRANSFERASE ZRP4 (OMT)
  misc_feature (1)..(294): NCBI GI NO: 4098238 NR Description: o-methyltransferase [Triticum aestivum]
  misc_feature (1)..(294): NCBI GI NO: 22093735 NR Description: putative o-methyltransferase
  misc_feature (1)..(294): NCBI GI NO: 34909608 NR Description: putative o-methyltransferase
  misc_feature (1)..(294): NCBI GI NO: 20514367 NR Description: orcinol O-methyltransferase [Rosa hybrid cultivar]
  misc_feature (1)..(294): NCBI GI NO: 20514369 NR Description: orcinol O-methyltransferase [Rosa hybrid cultivar]
  misc_feature (1)..(294): NCBI GI NO: 38175602 NR Description: putative catechol O-methyltransferase
  misc_feature (1)..(294): NCBI GI NO: 2282586 NR Description: methyltransferase [Prunus armeniaca]
MRVLTTTGVFSIVQGKGSNDHAGDGAAYYKLTRVSRLLVERSPHNLSPMVGTIVNTLCWTSLLKMPEWFTQGQEGESAQSHSLVQLANGCTFWDTTKVDGGLFNDGMAADSRIAMKVLLKEHGGAFGEVKSSLVDIGGNHGATASAVARAFPHLKCSVLDLPHVVAAAPASDILTFVAGNMFEYVPPADAVLLKWILHDWKHEDCVKIMRRCKEAIPAKEAGGKVIIIDMVVGYPVTQPNHSKEAQVLLDIYMMGSDGMEREENEWSLIFSEAGFSDYKITPTNGIRSIIEVYP

SEQ ID NO: 14448 - DNA, 1188 bp, Triticum aestivum
  misc_feature (1)..(1188): Ceres Seq. ID no. 13597338
aaaaacagatcagtccggggtcgtggcctccactcggcatcttcttcctcccccacatcgcacttcctcccctgctagattcgtccctccaccgaccggcaaggcctctctcctgcacttccctcgcccaaggttgcaccagagaaggcggaaaacatcacagtttgcgaaatcgtggagcggtagagagagatggccgagacggtgttcgctccgtgtttggaagggatgaagcatgtcaggtcggacagcggggtcatgctcgccaagcccttccttgatgtctgcaagcaaatcttgcctgtcctggataaatttggtgctgctatggcaattgtgaagagtgatattggaggtaatatcacgaggttggagaacaagtattcttcagacccgtcaaaatatgagcacttgtacaccatggtccaagaagaagttgaaaagaagaccgcaaagggttcatcaagctgcacaaatggacttctatggctcacgagggctatggacttccttgttgaactgttccgtaatctacttgaccatccagactggactatgagtcaagcatgtactgattcatacacaaaaactctgaagaaatggcatgggtggctcgccagttccagttttacggtggctatgaagcttgctcctaacaaagataaatttatggaggtaattagcggaacgggtgatatcaaagcagacattgagaaattctgcaccaccttttatccctttctcaaggagaatcatgacttcctggccagtgttgggctcgatgatatgaaggcttcttaatgcaatacacaccgacaatcatcacaaatatgaagtgctgctattttctcgaattttattgtggccaaggatacactgttttgcatactgatcttcaggaaattatagacgaataataagtcaaaatgtttgggtgttcatgacccatagctacttacatacaagatgaattgaatgtatgcatgggatcaaaattaacttttgaaagtcaccttgtcagccaagccggccattttaccaattgatgtaactgaagagaacgcagaggatgcagatatgtggtgatcttgtcgttcagtttataaactgctgtgtaagtgattctgtttataaactgctgtataagtgatgaggcgaagatgcaaattaagagtctgttattgatgc

SEQ ID NO: 14449 - protein, 202 aa, Triticum aestivum
  peptide (1)..(202): Ceres Seq. ID no. 13597339
  misc_feature (1)..(202): NCBI GI NO: 34901156 NR Description: hypothetical protein~similar to Arabidopsisthaliana chromosome 2
  misc_feature (1)..(202): NCBI GI NO: 18403285 NR Description: expressed protein [Arabidopsis thaliana]
  misc_feature (26)..(201): NCBI GI NO: 9280228 NR Description: gene_id:MXL8.12~unknown protein
  misc_feature (28)..(202): NCBI GI NO: 38344077 NR Description: OSJNBa0006B20.21
  misc_feature (28)..(188): NCBI GI NO: 39545646 NR Description: OJ000114_01.1
  misc_feature (59)..(201): NCBI GI NO: 30686173 NR Description: expressed protein [Arabidopsis thaliana]
  misc_feature (64)..(201): NCBI GI NO: 18402939 NR Description: expressed protein [Arabidopsis thaliana]
  misc_feature (64)..(201): NCBI GI NO: 21554671 NR Description: unknown [Arabidopsis thaliana]
  misc_feature (19)..(164): NCBI GI NO: 30481662 NR Description: Unknown (protein for MGC:58573) [Mus musculus]
  misc_feature (10)..(200): NCBI GI NO: 28571195 NR Description: CG6299-PB [Drosophila melanogaster]
MAETVFAPCLEGMKHVRSDSGVMLAKPFLDVCKQILPVLDKFGAAMAIVKSDIGGNITRLENKYSSDPSKYEHLYTMVQEEVEKKTAKGSSSCTNGLLWLTRAMDFLVELFRNLLDHPDWTMSQACTDSYTKTLKKWHGWLASSSFTVAMKLAPNKDKFMEVISGTGDIKADIEKFCTTFYPFLKENHDFLASVGLDDMKAS

SEQ ID NO: 14450 - protein, 190 aa, Triticum aestivum
  peptide (1)..(190): Ceres Seq. ID no. 13597340
  misc_feature (1)..(190): NCBI GI NO: 34901156 NR Description: hypothetical protein~similar to Arabidopsisthaliana chromosome 2
  misc_feature (1)..(190): NCBI GI NO: 18403285 NR Description: expressed protein [Arabidopsis thaliana]
  misc_feature (14)..(189): NCBI GI NO: 9280228 NR Description: gene_id:MXL8.12~unknown protein
  misc_feature (16)..(190): NCBI GI NO: 38344077 NR Description: OSJNBa0006B20.21
  misc_feature (16)..(176): NCBI GI NO: 39545646 NR Description: OJ000114_01.1
  misc_feature (47)..(189): NCBI GI NO: 30686173 NR Description: expressed protein [Arabidopsis thaliana]
  misc_feature (52)..(189): NCBI GI NO: 18402939 NR Description: expressed protein [Arabidopsis thaliana]
  misc_feature (52)..(189): NCBI GI NO: 21554671 NR Description: unknown [Arabidopsis thaliana]
  misc_feature (7)..(152): NCBI GI NO: 30481662 NR Description: Unknown (protein for MGC:58573) [Mus musculus]
  misc_feature (1)..(188): NCBI GI NO: 28571195 NR Description: CG6299-PB [Drosophila melanogaster]
MKHVRSDSGVMLAKPFLDVCKQILPVLDKFGAAMAIVKSDIGGNITRLENKYSSDPSKYEHLYTMVQEEVEKKTAKGSSSCTNGLLWLTRAMDFLVELFRNLLDHPDWTMSQACTDSYTKTLKKWHGWLASSSFTVAMKLAPNKDKFMEVISGTGDIKADIEKFCTTFYPFLKENHDFLASVGLDDMKAS

SEQ ID NO: 14451 - protein, 180 aa, Triticum aestivum
  peptide (1)..(180): Ceres Seq. ID no. 13597341
  misc_feature (1)..(180): NCBI GI NO: 34901156 NR Description: hypothetical protein~similar to Arabidopsisthaliana chromosome 2
  misc_feature (1)..(180): NCBI GI NO: 18403285 NR Description: expressed protein [Arabidopsis thaliana]
  misc_feature (4)..(179): NCBI GI NO: 9280228 NR Description: gene_id:MXL8.12~unknown protein
  misc_feature (6)..(180): NCBI GI NO: 38344077 NR Description: OSJNBa0006B20.21
  misc_feature (6)..(166): NCBI GI NO: 39545646 NR Description: OJ000114_01.1
  misc_feature (37)..(179): NCBI GI NO: 30686173 NR Description: expressed protein [Arabidopsis thaliana]
  misc_feature (42)..(179): NCBI GI NO: 18402939 NR Description: expressed protein [Arabidopsis thaliana]
  misc_feature (42)..(179): NCBI GI NO: 21554671 NR Description: unknown [Arabidopsis thaliana]
  misc_feature (1)..(142): NCBI GI NO: 30481662 NR Description: Unknown (protein for MGC:58573) [Mus musculus]
  misc_feature (1)..(178): NCBI GI NO: 28571195 NR Description: CG6299-PB [Drosophila melanogaster]
MLAKPFLDVCKQILPVLDKFGAAMAIVKSDIGGNITRLENKYSSDPSKYEHLYTMVQEEVEKKTAKGSSSCTNGLLWLTRAMDFLVELFRNLLDHPDWTMSQACTDSYTKTLKKWHGWLASSSFTVAMKLAPNKDKFMEVISGTGDIKADIEKFCTTFYPFLKENHDFLASVGLDDMKAS

SEQ ID NO: 14452 - DNA, 1294 bp, Triticum aestivum
  misc_feature (1)..(1294): Ceres Seq. ID no. 13662949
gcaacaagatcagtgatgaatatttctctgaaaaaaacaagccagattcgccaagcgcccggtctccgctctccacgtaacccttctcccctcccaacctccgcgtcgtcgcaaacccaaatcctcctcccactccagccccccctcatcagatcacgcgagcagggggcaccggaaccggatcgggcgcggcggcggaggcgggcgacggcgatgatgcacggcgtgggcccgtcggacgacgccgcggcggcggcggcgctggagctgcaggagtccgggtgggaggagctgcggcgggaggcgcggaagctggagggggacctggacgtgaagctctcctcgtacgcgcgcctcgccgcgcgctcctcctccgcctccgcctcggcctcggcctcggcggcctcccccaccgccgaccgctcctcctggaagtccacggagctcgagatccaggcgctgctcgacaagctgcaggacgtcaacgacgccatgagccgctgcgccgcgcccgccgcccccgccaccgcttccgtctcccagaagctcgcgcgccaccgcgacatcctgcacgagttcacgcaggagttcaggaggacgcgggggaacctgagctccatgagggagcacgccgacctgctcagctccgtgcgcggcgacatcaccgagtccaaggctaccggcggcatgtcgccgagggtacatttgctccgggagagggcttccattcacggcagcgtcaaccagatagacgaggtaattgggcaagctcaaagcacaagagcagccctatccaatcagagggccttgtttggagatgttcaggggaaagtcaagcagttgggtgaaaaattccctgtggtccgaggcctccttggcgccatcaagaggaagaaatcaaaggacacgatcatcctttcagcagtaatcgcggcctgcaccatctttttgatcatctactggctctcaaaatgatcggtccgttgttgggaaagctcgcgacggggacttcctctctcaccacagaatgactgacaagtgaccaacagatggcacgataaaagactggtgattattatccatttcttagggctagtacgagggaatgggagatcccgttgtgtttagctctcaccgtgctgccctcgacatatcttgtttttggagatctcccttgtcatttataccttagatcaattttgtttggtgaattgagatgttgcttgtttcgagtaaatacgatgacacacttctgacacttccatcttacaatgggaattgagctgttgcttgt

SEQ ID NO: 14453 - protein, 324 aa, Triticum aestivum
  peptide (1)..(324): Ceres Seq. ID no. 13662950
  misc_feature (151)..(302): Pfam Name: Pfam Description:  Vesicle transport v-SNARE protein
  misc_feature (86)..(324): NCBI GI NO: 15225431 NR Description: cis-Golgi SNARE protein, putative
  misc_feature (95)..(320): NCBI GI NO: 28280046 NR Description: Similar to golgi SNAP receptor complex member 1
  misc_feature (93)..(324): NCBI GI NO: 18394296 NR Description: cis-Golgi SNARE protein, putative
  misc_feature (95)..(320): NCBI GI NO: 11132038 NR Description: 28 kDa Golgi SNARE protein
  misc_feature (95)..(320): NCBI GI NO: 16758358 NR Description: golgi SNAP receptor complex member 1
  misc_feature (95)..(320): NCBI GI NO: 30388705 NR Description: Gosr1 protein [Mus musculus]
  misc_feature (95)..(320): NCBI GI NO: 31542904 NR Description: golgi SNAP receptor complex member 1
  misc_feature (93)..(320): NCBI GI NO: 4758456 NR Description: golgi SNAP receptor complex member 1
  misc_feature (95)..(320): NCBI GI NO: 11132188 NR Description: 28 kDa Golgi SNARE protein
  misc_feature (97)..(320): NCBI GI NO: 3335132 NR Description: GOS28/P28 protein [Homo sapiens]
ATRSVMNISLKKTSQIRQAPGLRSPRNPSPLPTSASSQTQILLPLQPPLIRSREQGAPEPDRARRRRRATAMMHGVGPSDDAAAAAALELQESGWEELRREARKLEGDLDVKLSSYARLAARSSSASASASASAASPTADRSSWKSTELEIQALLDKLQDVNDAMSRCAAPAAPATASVSQKLARHRDILHEFTQEFRRTRGNLSSMREHADLLSSVRGDITESKATGGMSPRVHLLRERASIHGSVNQIDEVIGQAQSTRAALSNQRALFGDVQGKVKQLGEKFPVVRGLLGAIKRKKSKDTIILSAVIAACTIFLIIYWLSK

SEQ ID NO: 14454 - protein, 319 aa, Triticum aestivum
  peptide (1)..(319): Ceres Seq. ID no. 13662951
  misc_feature (146)..(297): Pfam Name: Pfam Description:  Vesicle transport v-SNARE protein
  misc_feature (81)..(319): NCBI GI NO: 15225431 NR Description: cis-Golgi SNARE protein, putative
  misc_feature (90)..(315): NCBI GI NO: 28280046 NR Description: Similar to golgi SNAP receptor complex member 1
  misc_feature (88)..(319): NCBI GI NO: 18394296 NR Description: cis-Golgi SNARE protein, putative
  misc_feature (90)..(315): NCBI GI NO: 11132038 NR Description: 28 kDa Golgi SNARE protein
  misc_feature (90)..(315): NCBI GI NO: 30388705 NR Description: Gosr1 protein [Mus musculus]
  misc_feature (90)..(315): NCBI GI NO: 16758358 NR Description: golgi SNAP receptor complex member 1
  misc_feature (90)..(315): NCBI GI NO: 31542904 NR Description: golgi SNAP receptor complex member 1
  misc_feature (88)..(315): NCBI GI NO: 4758456 NR Description: golgi SNAP receptor complex member 1
  misc_feature (90)..(315): NCBI GI NO: 11132188 NR Description: 28 kDa Golgi SNARE protein
  misc_feature (92)..(315): NCBI GI NO: 3335132 NR Description: GOS28/P28 protein [Homo sapiens]
MNISLKKTSQIRQAPGLRSPRNPSPLPTSASSQTQILLPLQPPLIRSREQGAPEPDRARRRRRATAMMHGVGPSDDAAAAAALELQESGWEELRREARKLEGDLDVKLSSYARLAARSSSASASASASAASPTADRSSWKSTELEIQALLDKLQDVNDAMSRCAAPAAPATASVSQKLARHRDILHEFTQEFRRTRGNLSSMREHADLLSSVRGDITESKATGGMSPRVHLLRERASIHGSVNQIDEVIGQAQSTRAALSNQRALFGDVQGKVKQLGEKFPVVRGLLGAIKRKKSKDTIILSAVIAACTIFLIIYWLSK

SEQ ID NO: 14455 - protein, 253 aa, Triticum aestivum
  peptide (1)..(253): Ceres Seq. ID no. 13662952
  misc_feature (80)..(231): Pfam Name: Pfam Description:  Vesicle transport v-SNARE protein
  misc_feature (15)..(253): NCBI GI NO: 15225431 NR Description: cis-Golgi SNARE protein, putative
  misc_feature (24)..(249): NCBI GI NO: 28280046 NR Description: Similar to golgi SNAP receptor complex member 1
  misc_feature (22)..(253): NCBI GI NO: 18394296 NR Description: cis-Golgi SNARE protein, putative
  misc_feature (24)..(249): NCBI GI NO: 11132038 NR Description: 28 kDa Golgi SNARE protein
  misc_feature (24)..(249): NCBI GI NO: 30388705 NR Description: Gosr1 protein [Mus musculus]
  misc_feature (24)..(249): NCBI GI NO: 16758358 NR Description: golgi SNAP receptor complex member 1
  misc_feature (24)..(249): NCBI GI NO: 31542904 NR Description: golgi SNAP receptor complex member 1
  misc_feature (22)..(249): NCBI GI NO: 4758456 NR Description: golgi SNAP receptor complex member 1
  misc_feature (24)..(249): NCBI GI NO: 11132188 NR Description: 28 kDa Golgi SNARE protein
  misc_feature (26)..(249): NCBI GI NO: 3335132 NR Description: GOS28/P28 protein [Homo sapiens]
MMHGVGPSDDAAAAAALELQESGWEELRREARKLEGDLDVKLSSYARLAARSSSASASASASAASPTADRSSWKSTELEIQALLDKLQDVNDAMSRCAAPAAPATASVSQKLARHRDILHEFTQEFRRTRGNLSSMREHADLLSSVRGDITESKATGGMSPRVHLLRERASIHGSVNQIDEVIGQAQSTRAALSNQRALFGDVQGKVKQLGEKFPVVRGLLGAIKRKKSKDTIILSAVIAACTIFLIIYWLSK

SEQ ID NO: 14456 - DNA, 1036 bp, Triticum aestivum
  misc_feature (1)..(1036): Ceres Seq. ID no. 12618436
gaacatcctaaccggaaaattaatcgatgctacacagcaataacgcggcagaagaaagatccagcagaaggcaacaacagccaaagactgaaggagaggggatccggcttccggcgaaatggctgcgctgccgccacctccgccgtcgctggagccggagatcggccccgacggcctcgcccgagactcccccgtcctggcctacactgagaaggtcattgcggaggagcagctgcaactgaagaaatatattcaggaaaattattccaaaattcgggatgttgagaaggagctagagaatctgactctagaagttaaactgacagctggaccaaagaaagcagcactcgagcatttgaggaaaaagattgagatgtcaactgagagaatacgtttggctaaggtgaaagaggacgaggcaaaaaaggcctgggaagctgctgcacaagttgttaaagaggaagaggaggctaagcagaggctatgtgatgatctgaaccggttggttcaagagagcgcggcttcacaatattcgaggttagaagagttaaagaagcgtttagaatgtctaaatcccatcagggcttctgtcgatgtttctggtatcaacattgtacagcaggctgccacaaattcggtacctcagcaacccacttcacaaaatctagcgaatgcaattgcccctgcaagcaatatccacaagcccgccaccagcggatcacagcaacaaagaaccgctgaggcggaaaggaagcagagatcatcaaactcgggaggaagagggagaggcggtgtgatggtcctccccaagggaaggggaagctctggatcaggatggacaggtgctgggtttgagacatgatgctgggatccgtagttatatatacttgaaagaattggcatggttgtcttggtataaaacgatggcttggttgtcttggtataaaacgatggcttggttggaactggaaggttgaaagtgtaatggaatgtcgatcctttttggatgtgttagaagcgtgagagggatttggcg

SEQ ID NO: 14457 - protein, 247 aa, Triticum aestivum
  peptide (1)..(247): Ceres Seq. ID no. 12618437
  misc_feature (9)..(246): NCBI GI NO: 18423326 NR Description: expressed protein; protein id: At5g51840
  misc_feature (9)..(246): NCBI GI NO: 21593113 NR Description: unknown [Arabidopsis thaliana]
  misc_feature (1)..(246): NCBI GI NO: 37531870 NR Description: hypothetical protein
  misc_feature (9)..(103): NCBI GI NO: 10177883 NR Description: gene_id:MIO24.2~unknown protein
MAALPPPPPSLEPEIGPDGLARDSPVLAYTEKVIAEEQLQLKKYIQENYSKIRDVEKELENLTLEVKLTAGPKKAALEHLRKKIEMSTERIRLAKVKEDEAKKAWEAAAQVVKEEEEAKQRLCDDLNRLVQESAASQYSRLEELKKRLECLNPIRASVDVSGINIVQQAATNSVPQQPTSQNLANAIAPASNIHKPATSGSQQQRTAEAERKQRSSNSGGRGRGGVMVLPKGRGSSGSGWTGAGFET

SEQ ID NO: 14458 - protein, 162 aa, Triticum aestivum
  peptide (1)..(162): Ceres Seq. ID no. 12618438
  misc_feature (1)..(161): NCBI GI NO: 18423326 NR Description: expressed protein; protein id: At5g51840
  misc_feature (1)..(161): NCBI GI NO: 21593113 NR Description: unknown [Arabidopsis thaliana]
  misc_feature (1)..(161): NCBI GI NO: 37531870 NR Description: hypothetical protein
  misc_feature (1)..(18): NCBI GI NO: 10177883 NR Description: gene_id:MIO24.2~unknown protein
MSTERIRLAKVKEDEAKKAWEAAAQVVKEEEEAKQRLCDDLNRLVQESAASQYSRLEELKKRLECLNPIRASVDVSGINIVQQAATNSVPQQPTSQNLANAIAPASNIHKPATSGSQQQRTAEAERKQRSSNSGGRGRGGVMVLPKGRGSSGSGWTGAGFET

SEQ ID NO: 14459 - DNA, 1764 bp, Triticum aestivum
  misc_feature (1)..(1764): Ceres Seq. ID no. 13597796
acctagaacatcctaatcgaaaactaaaagaaaaaaaaacactcccctaatcccctccatcttgccgccgccgccgccggattgcttccgcccgtcgccatgtccgccgcgggagaccgctctcccccgcgagaggaaggccgcgcttcgattcgcgcccgggctctccccagcgggccgccggccgggaggctcatcgacgacatcctcgtggagatcctctcgcgcgtcccggccaaggaactctgccgctgcaagagcgtctcgaagcactggttcggcctcatccaccaccccgaccaccgcaagcggctcccccaaaccctggccggcttcttctacggcagcagcgccggcaccaccgcgcagcggctcctggagctgcccttccgcttcaccagcgtctcgggggaccgctgccctccgttcggcgcctccctcaccttcctgcccaaccaccacctgcccgtcgatctgctggactcctgcaacggcctcctcctctgccgatgttaccacgtctccgacggggttggcgcgttccattacgtcgtgtgcaatcccgccacccagaagtgggtcgtgttgcccagctcctgcaaggacagcagcgaggtggccaccacatctctgggcttcgacccggctctatcgtcgcatttccatgtgtttgagctggtagttgagcagaattatactcaggacactgagctttgcggagtggcggtgtattcgtctgaaaccggagaatggatttataaggagaagagatggaacagagctagtcggcactccgcaacagtctttctcgacggccttctgttttttcgtgtccttggccttgaatatcacgactgtgtggctgcggtggacacaaagggagaaacatggatgaaattcagggtccctggtggtcaggttgatgattttggtctggctgatggttttgttcagcagatgttattcagggttcctggtggtccggctgatgattttggtctggctcatggttttattcagcagtcgcagggctgcttgcattttgccaattttcagagggatgaacatggtgttggcattcgattggtggtttatgttctgaaaaactatgaaagcgaagaatggatagtgaagcatagcattaaaacttcagacatatgtggatggacagatttatggcttgatgcggattttgatttcattgcgattcatccagaatgcaactcgttgttcttcattgcggggggtgtcacattaatgtgctataatatggataatcggcaggtcaaagtgatctcctatcttggaggtgccaagccgctatttctgccctatgtgccgttgtacacagagtcactatcactgcactgctaagtggatctctgatcggagtcaattcttcattctatggggcagcgtgcttgccatgtctgcttgaatttggctctcatttgctctgactgatgaatgcatgtttttctggtttggagcaatggtggttcagtatggagggaatttgactgatttctctgtgatctgctatccaaatttgcactaaactttctgccatatgtattggtctctggtttagtcaacttctaccttcatgcattgcttaacctcgtgtagcgtttgtgttaaggtactatgatcattatgtaagacatggacaatggttatcatgcaggaaaacttttctcgaacatcatgctgagggttaaacttttatcttctacagtatttgcagccatgggaattataagc

SEQ ID NO: 14460 - protein, 424 aa, Triticum aestivum
  peptide (1)..(424): Ceres Seq. ID no. 13597797
  misc_feature (23)..(275): NCBI GI NO: 34898788 NR Description: OJ1131_E05.20
  misc_feature (304)..(424): NCBI GI NO: 34898788 NR Description: OJ1131_E05.20
  misc_feature (23)..(275): NCBI GI NO: 34898790 NR Description: OJ1131_E05.21
  misc_feature (304)..(421): NCBI GI NO: 34898790 NR Description: OJ1131_E05.21
  misc_feature (27)..(279): NCBI GI NO: 34898810 NR Description: OJ1131_E05.32
  misc_feature (304)..(420): NCBI GI NO: 34898810 NR Description: OJ1131_E05.32
  misc_feature (58)..(307): NCBI GI NO: 33146479 NR Description: receptor-like kinase-like
  misc_feature (304)..(420): NCBI GI NO: 33146479 NR Description: receptor-like kinase-like
  misc_feature (58)..(307): NCBI GI NO: 34898802 NR Description: OJ1131_E05.28
  misc_feature (304)..(420): NCBI GI NO: 34898802 NR Description: OJ1131_E05.28
MSAAGDRSPPREEGRASIRARALPSGPPAGRLIDDILVEILSRVPAKELCRCKSVSKHWFGLIHHPDHRKRLPQTLAGFFYGSSAGTTAQRLLELPFRFTSVSGDRCPPFGASLTFLPNHHLPVDLLDSCNGLLLCRCYHVSDGVGAFHYVVCNPATQKWVVLPSSCKDSSEVATTSLGFDPALSSHFHVFELVVEQNYTQDTELCGVAVYSSETGEWIYKEKRWNRASRHSATVFLDGLLFFRVLGLEYHDCVAAVDTKGETWMKFRVPGGQVDDFGLADGFVQQMLFRVPGGPADDFGLAHGFIQQSQGCLHFANFQRDEHGVGIRLVVYVLKNYESEEWIVKHSIKTSDICGWTDLWLDADFDFIAIHPECNSLFFIAGGVTLMCYNMDNRQVKVISYLGGAKPLFLPYVPLYTESLSLHC

SEQ ID NO: 14461 - DNA, 904 bp, Triticum aestivum
  misc_feature (1)..(904): Ceres Seq. ID no. 13584363
aggcctcgaaactgggccgagtgttggcccacgctccttgggctaaaccctaacgcagagcgtcctctcctctccaacccgacgccggcctccgcctcctcctccgccctcgcctccttcctagccgcacaccttgctggtctggtttgggttgacccggagtgaggcgggatggcgctgaggggcgtttggcagctgcagaagctcgtggtgaacttctgcgattggggagggagcagcaaggggatcagggcttttatggagtcgcatcttccagctatcaaggaaaagaatccccagttagaggtggtgacacagcttgtccgtggccagcatcctaacttgaagggcatttacaaaaaccataatgagagagtggtttgcgtcagaaacttggcacctgaggacataatgctgcaagctagtaggctaaggtgttctctgggcaggaaagtggtgaagctgagaaccagacacgtgacgaagcggccaagcgtccagggaacatggacgacggaactgaagatgtgagtcaaagttcctgatggcacgcactcagcaacaaccgtctcagatctatagcaagaactccgtgctgctattagacctctgttccgtcagtagttattacagtttcattctgtctccttttgtttgagccgcagtctgataataacatgtgaacttggggattttttttttttgttagtgtcacctgtctagctgatattttgatggcaaatgcctgatctttagaccattgcattcattaaagctgtcagcgcagaatttgttctgaaggaaggaggaatgttctgcatgttatgacaggacaagttataaatgtaaaactgtcatgaactatatacattgtgccatgtcttgctgtccatctggtgcactc

SEQ ID NO: 14462 - protein, 119 aa, Triticum aestivum
  peptide (1)..(119): Ceres Seq. ID no. 13584364
  misc_feature (2)..(92): Pfam Name: Pfam Description:  Mitochondrial ribosomal protein L51 / S25 / CI-B8 domain
  misc_feature (1)..(119): NCBI GI NO: 26006491 NR Description: Unknown protein
  misc_feature (1)..(118): NCBI GI NO: 15231727 NR Description: expressed protein [Arabidopsis thaliana]
  misc_feature (6)..(114): NCBI GI NO: 40739113 NR Description: hypothetical protein AN6904.2
  misc_feature (8)..(114): NCBI GI NO: 17505717 NR Description: NADH-ubiquinone oxidoreductase B8
  misc_feature (8)..(114): NCBI GI NO: 39589613 NR Description: Hypothetical protein CBG12220
  misc_feature (10)..(114): NCBI GI NO: 19112489 NR Description: hypothetical protein [Schizosaccharomyces pombe]
  misc_feature (4)..(119): NCBI GI NO: 17647665 NR Description: mitochondrial ribosomal protein L-CI-B8 CG5479-PA
  misc_feature (6)..(114): NCBI GI NO: 6325356 NR Description: Mitochondrial Ribosome Protein, Large Subunit
MALRGVWQLQKLVVNFCDWGGSSKGIRAFMESHLPAIKEKNPQLEVVTQLVRGQHPNLKGIYKNHNERVVCVRNLAPEDIMLQASRLRCSLGRKVVKLRTRHVTKRPSVQGTWTTELKM

SEQ ID NO: 14463 - protein, 90 aa, Triticum aestivum
  peptide (1)..(90): Ceres Seq. ID no. 13584365
  misc_feature (1)..(63): Pfam Name: Pfam Description:  Mitochondrial ribosomal protein L51 / S25 / CI-B8 domain
  misc_feature (1)..(90): NCBI GI NO: 26006491 NR Description: Unknown protein
  misc_feature (1)..(89): NCBI GI NO: 15231727 NR Description: expressed protein [Arabidopsis thaliana]
  misc_feature (1)..(85): NCBI GI NO: 40739113 NR Description: hypothetical protein AN6904.2
  misc_feature (1)..(85): NCBI GI NO: 17505717 NR Description: NADH-ubiquinone oxidoreductase B8
  misc_feature (1)..(85): NCBI GI NO: 39589613 NR Description: Hypothetical protein CBG12220
  misc_feature (1)..(85): NCBI GI NO: 19112489 NR Description: hypothetical protein [Schizosaccharomyces pombe]
  misc_feature (1)..(90): NCBI GI NO: 17647665 NR Description: mitochondrial ribosomal protein L-CI-B8 CG5479-PA
  misc_feature (1)..(85): NCBI GI NO: 6325356 NR Description: Mitochondrial Ribosome Protein, Large Subunit
MESHLPAIKEKNPQLEVVTQLVRGQHPNLKGIYKNHNERVVCVRNLAPEDIMLQASRLRCSLGRKVVKLRTRHVTKRPSVQGTWTTELKM

SEQ ID NO: 14464 - DNA, 1448 bp, Triticum aestivum
  misc_feature (1)..(1448): Ceres Seq. ID no. 13597018
ctccctctccttccctctctctctctctcgctcgtcttccttgccccctcgcgcaacagcagcgccacaacgcagtgagtggcacttccgtgatttcgccgccgcgggggcggggggaggaggaggagggaaggaggccatgggcaacgccagcggcagggaggaggacgccgccgcgcccggggaggccgacgccgccgacgtcgacgtcgaggacggaggcgacgactcctcggcccgcggcttccctccctacggcggaggcgccaaccacgtgcgccgtgcgtgctcagtgggcgtcgtgggggccagcggcgggcccggatcgccgcccgtgagccccggccgctccctctcgccgcggatgttcgtgccccagacacctgtacctccattgcaaagacctgctgatgtaactccagtattcaatgaaatactgatgaatgaacaagaagaagaatttgatggcccccctcaaaaggaaatacctgctttgattgtgtggactcttggaggaaagaatgtatctgttgaaggatcttgggataactggaaatcaaggaaaccgatgcagaaatctggaaaagatcattctcttctgttgatccttccttctggagtttatcgttatagatttgttgtagatggagagaggagatgttttcctgaccttccatgtgaaactgacgccatgggcaatgctgttaaccttcttgatgttcatgattttgttcctgaaagtgttgaaagtgtatcagaatttgaggctcctccatccccagaatctagctacagtttccaggcacctgaggaaaaggactttgcgaatgagccacctgctcttccgtctcagcttcacctcggcgttcttaactcacagaactcagaggaaatatgtgcacggccccaacacatcgtcctcaaccaccttttcatcgagaagggttggggtgcccatccgctggtggctcttggtgtaacccacagattcgagtccaaatatgtaacggtcgtcttgtataagcccatagaacgatagcatagcaaccgcatgaaagttgaagctaatgcttgacaactcaccgcgaaaccagcaatgaacagcaacagcgtggcctctctccctgtaaaagcacttcaggtacaggaatattttcgataacttgaaggagcttctagtcgtgatattgctccccttctgtatacctcctggcggatggccttatcgtcgtgagttcatacatatacttgtgttgttgttgttgttgtttccaaccccttgggaatgatatgtgtagaattgtcaccgaaaagtgagaactgagaaccgtgggactccgctgaatcgctaagcttcagagttagatcttgtgatccttattcttcattgtttttcattgtgatgatggtgttgtataataatacaaagctaccggttacggatttgg

SEQ ID NO: 14465 - protein, 345 aa, Triticum aestivum
  peptide (1)..(345): Ceres Seq. ID no. 15222016
  misc_feature (257)..(343): Pfam Name: Pfam Description:  5'-AMP-activated protein kinase
  misc_feature (47)..(345): NCBI GI NO: 22324436 NR Description: AKIN beta1-like protein
  misc_feature (47)..(345): NCBI GI NO: 6686782 NR Description: AKIN gamma [Arabidopsis thaliana]
  misc_feature (47)..(345): NCBI GI NO: 15242175 NR Description: AMPKBI
  misc_feature (47)..(345): NCBI GI NO: 5702015 NR Description: GAL83 protein [Solanum tuberosum]
  misc_feature (47)..(345): NCBI GI NO: 6686784 NR Description: AKIN beta2 [Arabidopsis thaliana]
  misc_feature (122)..(345): NCBI GI NO: 11935162 NR Description: SNF1-related kinase complex anchoring protein SIP1
  misc_feature (109)..(345): NCBI GI NO: 15234895 NR Description: kinase like protein [Arabidopsis thaliana]
  misc_feature (109)..(303): NCBI GI NO: 29725558 NR Description: SNF1 kinase complex anchoring protein
  misc_feature (103)..(343): NCBI GI NO: 4885561 NR Description: protein kinase
  misc_feature (88)..(343): NCBI GI NO: 12018316 NR Description: AMP-activated protein kinase beta-2 regulatory subunit
SLSFPLSLSRSSSLPPRATAAPQRSEWHFRDFAAAGAGGGGGGKEAMGNASGREEDAAAPGEADAADVDVEDGGDDSSARGFPPYGGGANHVRRACSVGVVGASGGPGSPPVSPGRSLSPRMFVPQTPVPPLQRPADVTPVFNEILMNEQEEEFDGPPQKEIPALIVWTLGGKNVSVEGSWDNWKSRKPMQKSGKDHSLLLILPSGVYRYRFVVDGERRCFPDLPCETDAMGNAVNLLDVHDFVPESVESVSEFEAPPSPESSYSFQAPEEKDFANEPPALPSQLHLGVLNSQNSEEICARPQHIVLNHLFIEKGWGAHPLVALGVTHRFESKYVTVVLYKPIER

SEQ ID NO: 14466 - protein, 299 aa, Triticum aestivum
  peptide (1)..(299): Ceres Seq. ID no. 15222017
  misc_feature (211)..(297): Pfam Name: Pfam Description:  5'-AMP-activated protein kinase
  misc_feature (1)..(299): NCBI GI NO: 22324436 NR Description: AKIN beta1-like protein
  misc_feature (1)..(299): NCBI GI NO: 6686782 NR Description: AKIN gamma [Arabidopsis thaliana]
  misc_feature (1)..(299): NCBI GI NO: 15242175 NR Description: AMPKBI
  misc_feature (1)..(299): NCBI GI NO: 5702015 NR Description: GAL83 protein [Solanum tuberosum]
  misc_feature (1)..(299): NCBI GI NO: 6686784 NR Description: AKIN beta2 [Arabidopsis thaliana]
  misc_feature (76)..(299): NCBI GI NO: 11935162 NR Description: SNF1-related kinase complex anchoring protein SIP1
  misc_feature (63)..(299): NCBI GI NO: 15234895 NR Description: kinase like protein [Arabidopsis thaliana]
  misc_feature (63)..(257): NCBI GI NO: 29725558 NR Description: SNF1 kinase complex anchoring protein
  misc_feature (57)..(297): NCBI GI NO: 4885561 NR Description: protein kinase
  misc_feature (42)..(297): NCBI GI NO: 12018316 NR Description: AMP-activated protein kinase beta-2 regulatory subunit
MGNASGREEDAAAPGEADAADVDVEDGGDDSSARGFPPYGGGANHVRRACSVGVVGASGGPGSPPVSPGRSLSPRMFVPQTPVPPLQRPADVTPVFNEILMNEQEEEFDGPPQKEIPALIVWTLGGKNVSVEGSWDNWKSRKPMQKSGKDHSLLLILPSGVYRYRFVVDGERRCFPDLPCETDAMGNAVNLLDVHDFVPESVESVSEFEAPPSPESSYSFQAPEEKDFANEPPALPSQLHLGVLNSQNSEEICARPQHIVLNHLFIEKGWGAHPLVALGVTHRFESKYVTVVLYKPIER

SEQ ID NO: 14467 - protein, 224 aa, Triticum aestivum
  peptide (1)..(224): Ceres Seq. ID no. 15222018
  misc_feature (136)..(222): Pfam Name: Pfam Description:  5'-AMP-activated protein kinase
  misc_feature (1)..(224): NCBI GI NO: 22324436 NR Description: AKIN beta1-like protein
  misc_feature (1)..(224): NCBI GI NO: 6686782 NR Description: AKIN gamma [Arabidopsis thaliana]
  misc_feature (1)..(224): NCBI GI NO: 15242175 NR Description: AMPKBI
  misc_feature (1)..(224): NCBI GI NO: 5702015 NR Description: GAL83 protein [Solanum tuberosum]
  misc_feature (1)..(224): NCBI GI NO: 6686784 NR Description: AKIN beta2 [Arabidopsis thaliana]
  misc_feature (1)..(224): NCBI GI NO: 11935162 NR Description: SNF1-related kinase complex anchoring protein SIP1
  misc_feature (1)..(224): NCBI GI NO: 15234895 NR Description: kinase like protein [Arabidopsis thaliana]
  misc_feature (1)..(182): NCBI GI NO: 29725558 NR Description: SNF1 kinase complex anchoring protein
  misc_feature (1)..(222): NCBI GI NO: 4885561 NR Description: protein kinase
  misc_feature (1)..(222): NCBI GI NO: 12018316 NR Description: AMP-activated protein kinase beta-2 regulatory subunit
MFVPQTPVPPLQRPADVTPVFNEILMNEQEEEFDGPPQKEIPALIVWTLGGKNVSVEGSWDNWKSRKPMQKSGKDHSLLLILPSGVYRYRFVVDGERRCFPDLPCETDAMGNAVNLLDVHDFVPESVESVSEFEAPPSPESSYSFQAPEEKDFANEPPALPSQLHLGVLNSQNSEEICARPQHIVLNHLFIEKGWGAHPLVALGVTHRFESKYVTVVLYKPIER

SEQ ID NO: 14468 - DNA, 1204 bp, Triticum aestivum
  misc_feature (1)..(1204): Ceres Seq. ID no. 13597854
ctgtcgcttcatccttcacgccaccgctctcctcccccttctatatcaatcgccgctcccccggcggcagacacagcggagcgcatctcgacggcggccatggcgacgaacgagagaaccgtcgcgtccgtcgaccccgacgtcgcgctcgcctacaggttccccgaggtctccttcgcctacgacgagagggacgtggcgctctacgcgctcggcgtgggggcctgcggcgcggacgccgtcgacgacaaggagctccacctcgtgcaccacagggacagccagcgccacatcaaggtgcttcctacctttgtttctttatttcctaacaagaacagcaatgggcgtggaattgttaatgtgcctggcattcacttcgatgaaagccttctattgcacggtcaacaatacatagagatctacaagccaattccttcatgtgccagtgttgtaaacaaggttaaggtagctggtttgcacgacaaagggaaagcaacaattcttgagattgaaactacgaccagtctcaaggattctggcgaagtgttatgtatgaacaggagcactattttcttgcgtggtgcgggaggtttttcggactcttccaggccatactcgtatacaacttatcctgccaaccagatttctcgcatttccattccaaattccacaccttccgcagtgcatgaagaccagacacaacaatcccaggcactcttatacaggttatctggggattataatcctttgcattcagaccctatggttgcacagattgcaggattcactcgtccaatactgcacggcctctgcactctggggttcgcggccagggcagtcatcaagtctttctgcaacggggacccagcagcggtgcggaacatcttcggccggttcctgctgcacgtctaccccggcgaaacgctggtcaccgagatgtgggtcgacggccagagggtgcagtaccagaccaaggcgaaagagcgtgaccgcgccgtgctttccggatacgtgctgctcaaacacatcccctcatcattgtaagtgctgtgaggatcatactttttaatcggcgatttgattagttaactgtggtggtctgaagagaggatggtttccggtgtaaactatatatactcctaagagatgacacggttgtgcagatgatgaactcgtattagtgcttgctttttgttttgttcgt

SEQ ID NO: 14469 - protein, 347 aa, Triticum aestivum
  peptide (1)..(347): Ceres Seq. ID no. 13597855
  misc_feature (212)..(337): Pfam Name: Pfam Description:  MaoC like domain
  misc_feature (34)..(347): NCBI GI NO: 22330656 NR Description: expressed protein [Arabidopsis thaliana]
  misc_feature (34)..(238): NCBI GI NO: 6573727 NR Description: T23E18.9 [Arabidopsis thaliana]
  misc_feature (49)..(338): NCBI GI NO: 4504505 NR Description: hydroxysteroid (17-beta) dehydrogenase 4
  misc_feature (6)..(338): NCBI GI NO: 2315981 NR Description: 17-beta-hydroxysteroid dehydrogenase type IV
  misc_feature (49)..(346): NCBI GI NO: 499340 NR Description: 17beta-estradiol dehydrogenase [Sus scrofa]
  misc_feature (10)..(346): NCBI GI NO: 3005897 NR Description: mutifunctional protein2 [Cavia porcellus]
  misc_feature (10)..(346): NCBI GI NO: 13242303 NR Description: peroxisomal multifunctional enzyme type II
  misc_feature (10)..(346): NCBI GI NO: 2492741 NR Description: Estradiol 17 beta-dehydrogenase 4
  misc_feature (10)..(346): NCBI GI NO: 1620451 NR Description: multifunctional protein 2 [Rattus norvegicus]
  misc_feature (10)..(346): NCBI GI NO: 7514017 NR Description: multifunctional beta-oxidation protein 2
LSLHPSRHRSPPPSISIAAPPAADTAERISTAAMATNERTVASVDPDVALAYRFPEVSFAYDERDVALYALGVGACGADAVDDKELHLVHHRDSQRHIKVLPTFVSLFPNKNSNGRGIVNVPGIHFDESLLLHGQQYIEIYKPIPSCASVVNKVKVAGLHDKGKATILEIETTTSLKDSGEVLCMNRSTIFLRGAGGFSDSSRPYSYTTYPANQISRISIPNSTPSAVHEDQTQQSQALLYRLSGDYNPLHSDPMVAQIAGFTRPILHGLCTLGFAARAVIKSFCNGDPAAVRNIFGRFLLHVYPGETLVTEMWVDGQRVQYQTKAKERDRAVLSGYVLLKHIPSSL

SEQ ID NO: 14470 - protein, 314 aa, Triticum aestivum
  peptide (1)..(314): Ceres Seq. ID no. 13597856
  misc_feature (179)..(304): Pfam Name: Pfam Description:  MaoC like domain
  misc_feature (1)..(314): NCBI GI NO: 22330656 NR Description: expressed protein [Arabidopsis thaliana]
  misc_feature (1)..(205): NCBI GI NO: 6573727 NR Description: T23E18.9 [Arabidopsis thaliana]
  misc_feature (16)..(305): NCBI GI NO: 4504505 NR Description: hydroxysteroid (17-beta) dehydrogenase 4
  misc_feature (1)..(305): NCBI GI NO: 2315981 NR Description: 17-beta-hydroxysteroid dehydrogenase type IV
  misc_feature (16)..(313): NCBI GI NO: 499340 NR Description: 17beta-estradiol dehydrogenase [Sus scrofa]
  misc_feature (1)..(313): NCBI GI NO: 3005897 NR Description: mutifunctional protein2 [Cavia porcellus]
  misc_feature (1)..(313): NCBI GI NO: 13242303 NR Description: peroxisomal multifunctional enzyme type II
  misc_feature (1)..(313): NCBI GI NO: 2492741 NR Description: Estradiol 17 beta-dehydrogenase 4
  misc_feature (1)..(313): NCBI GI NO: 1620451 NR Description: multifunctional protein 2 [Rattus norvegicus]
  misc_feature (1)..(313): NCBI GI NO: 7514017 NR Description: multifunctional beta-oxidation protein 2
MATNERTVASVDPDVALAYRFPEVSFAYDERDVALYALGVGACGADAVDDKELHLVHHRDSQRHIKVLPTFVSLFPNKNSNGRGIVNVPGIHFDESLLLHGQQYIEIYKPIPSCASVVNKVKVAGLHDKGKATILEIETTTSLKDSGEVLCMNRSTIFLRGAGGFSDSSRPYSYTTYPANQISRISIPNSTPSAVHEDQTQQSQALLYRLSGDYNPLHSDPMVAQIAGFTRPILHGLCTLGFAARAVIKSFCNGDPAAVRNIFGRFLLHVYPGETLVTEMWVDGQRVQYQTKAKERDRAVLSGYVLLKHIPSSL

SEQ ID NO: 14471 - DNA, 1498 bp, Triticum aestivum
  misc_feature (1)..(1498): Ceres Seq. ID no. 13597887
caaaggcaaacccctcttttgaattccctccccctctcccctcggccgcctcgccgccgacccggcccgggacggaggccccctccctcccggaacctcctggaagcttccgcggctccctcccctgctccggcaacagcccgcgtcgtcgccgccgccgagggccagcacctcgcgctgccggcccgttgcttgcagcgggaggaaaggggtcaagatggttgtcggatcattcatcaccagagctttaatacttgttcttggatatgcatatccagcttatgattgttacaagacagtggagctgaataggcctgagattgagcagttgcggttctggtgtcagtactggattttacttgcaatgcttactgttttcgagagagttggggataatttcatatcatggttgccaatgtatagtgaagcaaagctggcttttattgtgtatttgtggtatcctaagacacaggggacttcatatgtctatgagtcgttcttcaagccttatatcgcaaaacacgaatctgagattgatcgcaatcttcttgagttgaggacaagggctagtgatattgctgttacttacttccacaaggttgcagactacagccagtcaaggttccatgaaatcttgcaatatattgcttctcaatcacaaggatctcgttctcaggcacagcaacagcagcagcgtccaccacctccacggactcggatggcgaatcctgcaccaccacctgttcccgcaccaacggcaccaccgatgccgccacaggccgcccaagttcctcctactccaccaaggatgcaggtgcaagataaaggcccagttccagttgcccctcctggcgcagtgcctcctgtgcagcaacaaacaccttcctgtcctggccctgtcgccggcaacagccccccaaagagtgaagacatgctggttgatcaatctgggccttcgacaagcaacgtgccaccccgcccaacaatgcctgaagacgaggagacgctcatccaggaggctattcggttgactcggggccggctcaggaggcgcatgggtggatctggacctccatccaactagctcttctcgcacttacgacgatggcaggggaaatgctgggttggtccatcaggcatggctgaatttcctcgcacagttgcaagctcacgtccaccttgtaaaacgatgaatcctggttcctgttgtttcacagcccagattgtgtatataaacccaccccatgccaggggtaaaaacgctgggatgccagtggaccaccagtttagctaggcggtagcagaagatggtggttaagatgctcggtgaaatcggttccaacttagttctgtcgaaattcgttggtggtgacttcgtctgtattggaaagtggttcaaaggtgaagtgaaataatcttaggctgtaccgggaagatagaaccttcgcccgcctcgcattagctgttkaaacacaataaagttggaactggagggggg

SEQ ID NO: 14472 - protein, 288 aa, Triticum aestivum
  peptide (1)..(288): Ceres Seq. ID no. 15222226
  misc_feature (4)..(99): Pfam Name: Pfam Description:  TB2/DP1, HVA22 family
  misc_feature (2)..(158): NCBI GI NO: 20502988 NR Description: Putative InsB from Escherichia coli
  misc_feature (145)..(286): NCBI GI NO: 20502988 NR Description: Putative InsB from Escherichia coli
  misc_feature (2)..(278): NCBI GI NO: 21553813 NR Description: unknown [Arabidopsis thaliana]
  misc_feature (2)..(278): NCBI GI NO: 18422223 NR Description: expressed protein [Arabidopsis thaliana]
  misc_feature (6)..(278): NCBI GI NO: 9759014 NR Description: gene_id:K16E1.3~unknown protein
  misc_feature (2)..(260): NCBI GI NO: 18394805 NR Description: expressed protein [Arabidopsis thaliana]
  misc_feature (2)..(255): NCBI GI NO: 21553483 NR Description: pathogenicity protein PATH531-like protein
  misc_feature (13)..(260): NCBI GI NO: 25513732 NR Description: T20H2.26 protein - Arabidopsis thaliana
  misc_feature (13)..(163): NCBI GI NO: 15222332 NR Description: hypothetical protein [Arabidopsis thaliana]
  misc_feature (2)..(168): NCBI GI NO: 37531658 NR Description: putative Magnaporthe grisea pathogenicity protein
MVVGSFITRALILVLGYAYPAYDCYKTVELNRPEIEQLRFWCQYWILLAMLTVFERVGDNFISWLPMYSEAKLAFIVYLWYPKTQGTSYVYESFFKPYIAKHESEIDRNLLELRTRASDIAVTYFHKVADYSQSRFHEILQYIASQSQGSRSQAQQQQQRPPPPRTRMANPAPPPVPAPTAPPMPPQAAQVPPTPPRMQVQDKGPVPVAPPGAVPPVQQQTPSCPGPVAGNSPPKSEDMLVDQSGPSTSNVPPRPTMPEDEETLIQEAIRLTRGRLRRRMGGSGPPSN

SEQ ID NO: 14473 - protein, 239 aa, Triticum aestivum
  peptide (1)..(239): Ceres Seq. ID no. 15222227
  misc_feature (79)..(194): Pfam Name: Pfam Description:  Minor capsid protein VI
  misc_feature (1)..(109): NCBI GI NO: 20502988 NR Description: Putative InsB from Escherichia coli
  misc_feature (96)..(237): NCBI GI NO: 20502988 NR Description: Putative InsB from Escherichia coli
  misc_feature (1)..(229): NCBI GI NO: 21553813 NR Description: unknown [Arabidopsis thaliana]
  misc_feature (1)..(229): NCBI GI NO: 18422223 NR Description: expressed protein [Arabidopsis thaliana]
  misc_feature (1)..(229): NCBI GI NO: 9759014 NR Description: gene_id:K16E1.3~unknown protein
  misc_feature (1)..(211): NCBI GI NO: 18394805 NR Description: expressed protein [Arabidopsis thaliana]
  misc_feature (1)..(206): NCBI GI NO: 21553483 NR Description: pathogenicity protein PATH531-like protein
  misc_feature (1)..(211): NCBI GI NO: 25513732 NR Description: T20H2.26 protein - Arabidopsis thaliana
  misc_feature (1)..(114): NCBI GI NO: 15222332 NR Description: hypothetical protein [Arabidopsis thaliana]
  misc_feature (1)..(119): NCBI GI NO: 37531658 NR Description: putative Magnaporthe grisea pathogenicity protein
MLTVFERVGDNFISWLPMYSEAKLAFIVYLWYPKTQGTSYVYESFFKPYIAKHESEIDRNLLELRTRASDIAVTYFHKVADYSQSRFHEILQYIASQSQGSRSQAQQQQQRPPPPRTRMANPAPPPVPAPTAPPMPPQAAQVPPTPPRMQVQDKGPVPVAPPGAVPPVQQQTPSCPGPVAGNSPPKSEDMLVDQSGPSTSNVPPRPTMPEDEETLIQEAIRLTRGRLRRRMGGSGPPSN

SEQ ID NO: 14474 - protein, 222 aa, Triticum aestivum
  peptide (1)..(222): Ceres Seq. ID no. 15222228
  misc_feature (62)..(177): Pfam Name: Pfam Description:  Minor capsid protein VI
  misc_feature (1)..(92): NCBI GI NO: 20502988 NR Description: Putative InsB from Escherichia coli
  misc_feature (79)..(220): NCBI GI NO: 20502988 NR Description: Putative InsB from Escherichia coli
  misc_feature (1)..(212): NCBI GI NO: 21553813 NR Description: unknown [Arabidopsis thaliana]
  misc_feature (1)..(212): NCBI GI NO: 18422223 NR Description: expressed protein [Arabidopsis thaliana]
  misc_feature (1)..(212): NCBI GI NO: 9759014 NR Description: gene_id:K16E1.3~unknown protein
  misc_feature (1)..(194): NCBI GI NO: 18394805 NR Description: expressed protein [Arabidopsis thaliana]
  misc_feature (1)..(189): NCBI GI NO: 21553483 NR Description: pathogenicity protein PATH531-like protein
  misc_feature (1)..(194): NCBI GI NO: 25513732 NR Description: T20H2.26 protein - Arabidopsis thaliana
  misc_feature (1)..(97): NCBI GI NO: 15222332 NR Description: hypothetical protein [Arabidopsis thaliana]
  misc_feature (1)..(102): NCBI GI NO: 37531658 NR Description: putative Magnaporthe grisea pathogenicity protein
MYSEAKLAFIVYLWYPKTQGTSYVYESFFKPYIAKHESEIDRNLLELRTRASDIAVTYFHKVADYSQSRFHEILQYIASQSQGSRSQAQQQQQRPPPPRTRMANPAPPPVPAPTAPPMPPQAAQVPPTPPRMQVQDKGPVPVAPPGAVPPVQQQTPSCPGPVAGNSPPKSEDMLVDQSGPSTSNVPPRPTMPEDEETLIQEAIRLTRGRLRRRMGGSGPPSN

SEQ ID NO: 14475 - DNA, 1205 bp, Triticum aestivum
  misc_feature (1)..(1205): Ceres Seq. ID no. 13597888
actcctctccaccgcctggacgccgcgccgccgcctcgaccgagcctcggccacgcggctcgccccgtcccccggcctgtcctgccgctcctcccggccgacgcgctccgtgcgcccgatggcgtcgtcgacgaccgcggcccgggccgacgcggcgccgccggggctgaaggagggcatcgcggggctctacgacgagtcgtccggcctgtgggagagcatctggggcgagcacatgcaccacggcttctacgactccggcgaggccgcctccatgtccgaccaccgccgcgcccagatccgcatgatcgaggaggccctcgccttcgccgccgtccccgacgatccgacaaacaaaccgaaaacgattgttgatgttggatgcggaatcggtggtagctcaagatacctggcgaacaaatatggagcacaatgctctgggatcacattgagcccagtgcaagccgagagaggaaatgccctcgcagcagtgcaggggttgtcggacaaggcttctttccaagttgctgatgctctggagcaaccatttcctgatgggcagtttgatcttgtctggtctatggagagtggtgagcacatgccgaacaaacagaagtttgtaagcgagctggcacgcgtcgcagctccaggagcaactatcatcatcgtgacctggtgccataggaacctcgcgccgtcggaggactcactgaaacctgacgagctgaatcttttgaaaaagatttgtgatgcatattacctcccagattggtgctcgccctcggattatgtcaagattgccgagtcattgtctcttgaggatatcaaaacggctgactggtctgaaaacgtggccccgttctggcctgctgtcatccaatcagcactgacatggaaaggcctcacttctctactaaggagtggatggaagacgataaagggagcactggtgatgcctctcatgatccaaggctacaagaaaggcctcattaagttcagcatcatcacctgccgcaaaccccaagcagcaatagaaggagaacctgaggccgcatcgcccagtgtagaatagaacccatgtgattggaatagactcggcttgctgtcgcctcgtagctgaataatttcatgttaccgtgcatctgtatctgcaactggaagtgccatatgaaagtggttcctaaagcaaaattctcctcacattc

SEQ ID NO: 14476 - protein, 356 aa, Triticum aestivum
  peptide (1)..(356): Ceres Seq. ID no. 13597889
  misc_feature (46)..(340): NCBI GI NO: 22208517 NR Description: putative gamma-tocopherol methyltransferase
  misc_feature (35)..(340): NCBI GI NO: 17224292 NR Description: gamma-tocopherol methyltransferase
  misc_feature (23)..(340): NCBI GI NO: 27448218 NR Description: gamma-tocopherol methyltransferase
  misc_feature (30)..(340): NCBI GI NO: 24211769 NR Description: Tocopherol O-methyltransferase
  misc_feature (30)..(340): NCBI GI NO: 15217804 NR Description: gamma-tocopherol methyltransferase
  misc_feature (30)..(340): NCBI GI NO: 21592747 NR Description: gamma-tocopherol methyltransferase
  misc_feature (56)..(339): NCBI GI NO: 23128517 NR Description: hypothetical protein [Nostoc punctiforme]
  misc_feature (42)..(340): NCBI GI NO: 16331764 NR Description: delta(24)-sterol C-methyltransferase
  misc_feature (56)..(335): NCBI GI NO: 17229295 NR Description: gamma-tocopherol methyltransferase
  misc_feature (56)..(339): NCBI GI NO: 23039419 NR Description: hypothetical protein
LLSTAWTPRRRLDRASATRLAPSPGLSCRSSRPTRSVRPMASSTTAARADAAPPGLKEGIAGLYDESSGLWESIWGEHMHHGFYDSGEAASMSDHRRAQIRMIEEALAFAAVPDDPTNKPKTIVDVGCGIGGSSRYLANKYGAQCSGITLSPVQAERGNALAAVQGLSDKASFQVADALEQPFPDGQFDLVWSMESGEHMPNKQKFVSELARVAAPGATIIIVTWCHRNLAPSEDSLKPDELNLLKKICDAYYLPDWCSPSDYVKIAESLSLEDIKTADWSENVAPFWPAVIQSALTWKGLTSLLRSGWKTIKGALVMPLMIQGYKKGLIKFSIITCRKPQAAIEGEPEAASPSVE

SEQ ID NO: 14477 - protein, 317 aa, Triticum aestivum
  peptide (1)..(317): Ceres Seq. ID no. 13597890
  misc_feature (7)..(301): NCBI GI NO: 22208517 NR Description: putative gamma-tocopherol methyltransferase
  misc_feature (1)..(301): NCBI GI NO: 17224292 NR Description: gamma-tocopherol methyltransferase
  misc_feature (1)..(301): NCBI GI NO: 27448218 NR Description: gamma-tocopherol methyltransferase
  misc_feature (1)..(301): NCBI GI NO: 24211769 NR Description: Tocopherol O-methyltransferase
  misc_feature (1)..(301): NCBI GI NO: 15217804 NR Description: gamma-tocopherol methyltransferase
  misc_feature (1)..(301): NCBI GI NO: 21592747 NR Description: gamma-tocopherol methyltransferase
  misc_feature (17)..(300): NCBI GI NO: 23128517 NR Description: hypothetical protein [Nostoc punctiforme]
  misc_feature (3)..(301): NCBI GI NO: 16331764 NR Description: delta(24)-sterol C-methyltransferase
  misc_feature (17)..(296): NCBI GI NO: 17229295 NR Description: gamma-tocopherol methyltransferase
  misc_feature (17)..(300): NCBI GI NO: 23039419 NR Description: hypothetical protein
MASSTTAARADAAPPGLKEGIAGLYDESSGLWESIWGEHMHHGFYDSGEAASMSDHRRAQIRMIEEALAFAAVPDDPTNKPKTIVDVGCGIGGSSRYLANKYGAQCSGITLSPVQAERGNALAAVQGLSDKASFQVADALEQPFPDGQFDLVWSMESGEHMPNKQKFVSELARVAAPGATIIIVTWCHRNLAPSEDSLKPDELNLLKKICDAYYLPDWCSPSDYVKIAESLSLEDIKTADWSENVAPFWPAVIQSALTWKGLTSLLRSGWKTIKGALVMPLMIQGYKKGLIKFSIITCRKPQAAIEGEPEAASPSVE

SEQ ID NO: 14478 - protein, 278 aa, Triticum aestivum
  peptide (1)..(278): Ceres Seq. ID no. 13597891
  misc_feature (1)..(262): NCBI GI NO: 22208517 NR Description: putative gamma-tocopherol methyltransferase
  misc_feature (1)..(262): NCBI GI NO: 17224292 NR Description: gamma-tocopherol methyltransferase
  misc_feature (1)..(262): NCBI GI NO: 27448218 NR Description: gamma-tocopherol methyltransferase
  misc_feature (1)..(262): NCBI GI NO: 24211769 NR Description: Tocopherol O-methyltransferase
  misc_feature (1)..(262): NCBI GI NO: 15217804 NR Description: gamma-tocopherol methyltransferase
  misc_feature (1)..(262): NCBI GI NO: 21592747 NR Description: gamma-tocopherol methyltransferase
  misc_feature (1)..(261): NCBI GI NO: 23128517 NR Description: hypothetical protein [Nostoc punctiforme]
  misc_feature (1)..(262): NCBI GI NO: 16331764 NR Description: delta(24)-sterol C-methyltransferase
  misc_feature (1)..(257): NCBI GI NO: 17229295 NR Description: gamma-tocopherol methyltransferase
  misc_feature (1)..(261): NCBI GI NO: 23039419 NR Description: hypothetical protein
MHHGFYDSGEAASMSDHRRAQIRMIEEALAFAAVPDDPTNKPKTIVDVGCGIGGSSRYLANKYGAQCSGITLSPVQAERGNALAAVQGLSDKASFQVADALEQPFPDGQFDLVWSMESGEHMPNKQKFVSELARVAAPGATIIIVTWCHRNLAPSEDSLKPDELNLLKKICDAYYLPDWCSPSDYVKIAESLSLEDIKTADWSENVAPFWPAVIQSALTWKGLTSLLRSGWKTIKGALVMPLMIQGYKKGLIKFSIITCRKPQAAIEGEPEAASPSVE

SEQ ID NO: 14479 - DNA, 1568 bp, Triticum aestivum
  misc_feature (1)..(1568): Ceres Seq. ID no. 13597019
ctccgtcgtcgccaaaagcatcgcgacacccagaaacggccacgaaccgagagcaagcgagcgagcgagggagcgagtcagccatccgtccgtccgtcggccatggcactagtggacgcgctgtgcgcctccagcgtcgacaatgcggcgctcgtctacagcaccttcaacgccgcgggcttcctcttcgacaatgccgcgggcttctacgacgacaccggcattgccggtggcccggcgcttgcgttgcaggcggccgacagagcgccggggctgtccgccgcgggtgacgtggcgccgtgcctggagaagcaggccacgttgtcgcccgcgccgccgaggaggaagcggcgtcggcgggcgaggagctgcaagtcgagggaggagaccgagtgccagcgcatgacccacatcgccgtggagcgcaaccgccggcgacagatgaacgagtacctcgtcgtgctccgctccctcatgccggagtcctacgtccagaggggtgaccaggcatcgatcgtcggaggggcgatagatttcgtcaaggagctggagcagcagctgcagtccctggaggcgcagaagcgggcgctggctcaccagcagcagcacaaggcaggacgcgacgcggcgccgctgccgacggccatgccggcgcgcgccagcaccagcggcggcattggcaacgcgtgcgtggagtcgacgagcaactgcagcagcagcgtgaccgaggcggacggcgctcccgacgcgccgccgttcgcggggttcttcacgtacccgcagtacgtgtggcgccagtcgccgcgcgacgccacgacgctgtcggcggacgagagccgcgccggggtggccgacatcgaggtgaccctggtggagacgcacgccagcctccgcgtcatggcgccgcggcggcccggccagctgctccgcatggtcgccggcctgcaggcgctccgtctcaccgtgctgcacctcaacgtcaccgcgctcgactccctggccctctactccctcagcctcaaggtggaggaggggtgtggcctgacgacggcggacgacatcgcggcggcagtgcaccatgtgctctgcttcatccacgcggaggcggaggcggcgccgcagcagctgctcgcgccggcgcagtaggcaacgatggccgcggcggccggagggttaagccgcagccctcgtatatgtatgtactcgggcagctaggtagtgtatgccattttaaggattattaaggacgagtcatgtaatttaacccgtcggatctactgggcttagatgttgtcgacggcgcacgtcgcgctgccgctttctggcaagtctatccagtgtgatgtggcggcctagtgtaccgtagtactagattcagatgcatgcgttttcgcaataggcgagtcgtttcagtttctcaaaaacaagtcttgctatgtgctactgattattttcagtctatgccactgatcaagtgctggccatttcggttaaccttctgtcaggagatctacgttcagcatgtaaattcatcgtttgtttctgcctatgcattccagttgtactgt

SEQ ID NO: 14480 - protein, 381 aa, Triticum aestivum
  peptide (1)..(381): Ceres Seq. ID no. 13597020
  misc_feature (133)..(184): Pfam Name: Pfam Description:  Helix-loop-helix DNA-binding domain
  misc_feature (35)..(341): NCBI GI NO: 38346722 NR Description: OSJNBa0086O06.20
  misc_feature (325)..(378): NCBI GI NO: 38346722 NR Description: OSJNBa0086O06.20
  misc_feature (50)..(227): NCBI GI NO: 37533680 NR Description: putative helix-loop-helix DNA-binding protein
  misc_feature (252)..(362): NCBI GI NO: 37533680 NR Description: putative helix-loop-helix DNA-binding protein
  misc_feature (110)..(250): NCBI GI NO: 34902426 NR Description: Unknown protein
  misc_feature (270)..(362): NCBI GI NO: 34902426 NR Description: Unknown protein
  misc_feature (252)..(368): NCBI GI NO: 18395124 NR Description: bHLH protein family [Arabidopsis thaliana]
  misc_feature (252)..(368): NCBI GI NO: 21593808 NR Description: unknown [Arabidopsis thaliana]
  misc_feature (110)..(199): NCBI GI NO: 18395124 NR Description: bHLH protein family [Arabidopsis thaliana]
  misc_feature (110)..(199): NCBI GI NO: 21593808 NR Description: unknown [Arabidopsis thaliana]
LRRRQKHRDTQKRPRTESKRASEGASQPSVRPSAMALVDALCASSVDNAALVYSTFNAAGFLFDNAAGFYDDTGIAGGPALALQAADRAPGLSAAGDVAPCLEKQATLSPAPPRRKRRRRARSCKSREETECQRMTHIAVERNRRRQMNEYLVVLRSLMPESYVQRGDQASIVGGAIDFVKELEQQLQSLEAQKRALAHQQQHKAGRDAAPLPTAMPARASTSGGIGNACVESTSNCSSSVTEADGAPDAPPFAGFFTYPQYVWRQSPRDATTLSADESRAGVADIEVTLVETHASLRVMAPRRPGQLLRMVAGLQALRLTVLHLNVTALDSLALYSLSLKVEEGCGLTTADDIAAAVHHVLCFIHAEAEAAPQQLLAPAQ

SEQ ID NO: 14481 - protein, 347 aa, Triticum aestivum
  peptide (1)..(347): Ceres Seq. ID no. 13597021
  misc_feature (99)..(150): Pfam Name: Pfam Description:  Helix-loop-helix DNA-binding domain
  misc_feature (1)..(307): NCBI GI NO: 38346722 NR Description: OSJNBa0086O06.20
  misc_feature (291)..(344): NCBI GI NO: 38346722 NR Description: OSJNBa0086O06.20
  misc_feature (16)..(193): NCBI GI NO: 37533680 NR Description: putative helix-loop-helix DNA-binding protein
  misc_feature (218)..(328): NCBI GI NO: 37533680 NR Description: putative helix-loop-helix DNA-binding protein
  misc_feature (76)..(216): NCBI GI NO: 34902426 NR Description: Unknown protein
  misc_feature (236)..(328): NCBI GI NO: 34902426 NR Description: Unknown protein
  misc_feature (218)..(334): NCBI GI NO: 18395124 NR Description: bHLH protein family [Arabidopsis thaliana]
  misc_feature (218)..(334): NCBI GI NO: 21593808 NR Description: unknown [Arabidopsis thaliana]
  misc_feature (76)..(165): NCBI GI NO: 18395124 NR Description: bHLH protein family [Arabidopsis thaliana]
  misc_feature (76)..(165): NCBI GI NO: 21593808 NR Description: unknown [Arabidopsis thaliana]
MALVDALCASSVDNAALVYSTFNAAGFLFDNAAGFYDDTGIAGGPALALQAADRAPGLSAAGDVAPCLEKQATLSPAPPRRKRRRRARSCKSREETECQRMTHIAVERNRRRQMNEYLVVLRSLMPESYVQRGDQASIVGGAIDFVKELEQQLQSLEAQKRALAHQQQHKAGRDAAPLPTAMPARASTSGGIGNACVESTSNCSSSVTEADGAPDAPPFAGFFTYPQYVWRQSPRDATTLSADESRAGVADIEVTLVETHASLRVMAPRRPGQLLRMVAGLQALRLTVLHLNVTALDSLALYSLSLKVEEGCGLTTADDIAAAVHHVLCFIHAEAEAAPQQLLAPAQ

SEQ ID NO: 14482 - protein, 247 aa, Triticum aestivum
  peptide (1)..(247): Ceres Seq. ID no. 13597022
  misc_feature (1)..(50): Pfam Name: Pfam Description:  Helix-loop-helix DNA-binding domain
  misc_feature (1)..(207): NCBI GI NO: 38346722 NR Description: OSJNBa0086O06.20
  misc_feature (191)..(244): NCBI GI NO: 38346722 NR Description: OSJNBa0086O06.20
  misc_feature (1)..(93): NCBI GI NO: 37533680 NR Description: putative helix-loop-helix DNA-binding protein
  misc_feature (118)..(228): NCBI GI NO: 37533680 NR Description: putative helix-loop-helix DNA-binding protein
  misc_feature (1)..(116): NCBI GI NO: 34902426 NR Description: Unknown protein
  misc_feature (136)..(228): NCBI GI NO: 34902426 NR Description: Unknown protein
  misc_feature (118)..(234): NCBI GI NO: 18395124 NR Description: bHLH protein family [Arabidopsis thaliana]
  misc_feature (118)..(234): NCBI GI NO: 21593808 NR Description: unknown [Arabidopsis thaliana]
  misc_feature (1)..(65): NCBI GI NO: 18395124 NR Description: bHLH protein family [Arabidopsis thaliana]
  misc_feature (1)..(65): NCBI GI NO: 21593808 NR Description: unknown [Arabidopsis thaliana]
MTHIAVERNRRRQMNEYLVVLRSLMPESYVQRGDQASIVGGAIDFVKELEQQLQSLEAQKRALAHQQQHKAGRDAAPLPTAMPARASTSGGIGNACVESTSNCSSSVTEADGAPDAPPFAGFFTYPQYVWRQSPRDATTLSADESRAGVADIEVTLVETHASLRVMAPRRPGQLLRMVAGLQALRLTVLHLNVTALDSLALYSLSLKVEEGCGLTTADDIAAAVHHVLCFIHAEAEAAPQQLLAPAQ

SEQ ID NO: 14483 - DNA, 1568 bp, Triticum aestivum
  misc_feature (1)..(1568): Ceres Seq. ID no. 13598643
tgccactccagttcccggtgcatcaagctccagttccagcggcttccacaccgacgccaccgcccaccggagccccaatggccgccgccggagacctcaggtcggagtacctccaggtcctgctcagccgccgccgcgaaccccaagtgcctctgtccgtggagcaagggactccggtgacgaagccgctgttccagggcgactggcctctggggcccagagaggccatggagtcgtgcccgaggaaggaggtggaggacttccacgagaagctggtcgaggagaatttcttcctgattaccgagtcaggtgagcaggggcgtgtacctgtacttctgctgaaactcaacgacagtactgctcccgaaaggaagccggttgttgtgatactgcacagctcttacaaatgcaaggaatgggtgcgtccactgctagaggcatatgcctccaggggttatattgctgtttccatcgattctcgctatcatggtgaaagcgccagccacaagaatacttacaccgatgcactgaaagcagcttggaggaatggggacacgatgccttttatttttgacacggcatgggacttgataaagcttgcagatcatcttagtgcaaggaaggatgtcgatccctcaaggattgggattactggtgaatcactcggaggaatgcattcatggtttggtgctttcgtggatacacggtacagtgttgttgttccgatagttggttttcagggatttcggtgggcaatagacaataacatgtgggaagccagagttaacagcatcaggcctgtatttgaagaggcagcaactgatttagggaagagtgaaatagattcggaggttgtggagaaggtttgggacaggatagcacctgggcttgcttcacggtttgatgcaccttactcggttcccctgattgcaccacgtccgctcctcctcctaaatggcgctgaagacccttgttgccctatcgctggtctacaagagcctgcttccagagttgctgaagcttatgaaaaagctggttctgcggagaagttcaagttcatcgtggagccgggagttgaacatatgttaacggcgaacatggtgaaggaagcgagcgaatggttcgaccgattcctgcagtagctcggggttcgggatgcttcatggagtgcacggcctcaataaattgtcctcactttcggatcactgtcgttgttgaataaatcccttcgccgtgatggtgcgtgcgcggcgagttcgcctagaccacggtgaccgcgctcggcactcgttggatcgtgggatggcgcggtccgcaaggaggccgggtactgcgcgatctcgtggccatttttccgtcgttgctactaataacaagaggagtgcagtgaaaagccgtgaggttttacgcagcacaaattctgtgtgctccacagacttgatttgttccatcattatctagctaatcgctacgctatatttctccatttgaaacgacacagcatatgtgagcagtttttttatcatgcaccatcatgtttcctggggagctctgcatttactgaactg

SEQ ID NO: 14484 - protein, 379 aa, Triticum aestivum
  peptide (1)..(379): Ceres Seq. ID no. 13598644
  misc_feature (174)..(378): NCBI GI NO: 34898368 NR Description: ESTs C19441
  misc_feature (13)..(149): NCBI GI NO: 34898368 NR Description: ESTs C19441
  misc_feature (24)..(379): NCBI GI NO: 30689997 NR Description: expressed protein [Arabidopsis thaliana]
  misc_feature (61)..(242): NCBI GI NO: 16080077 NR Description: ytaP [Bacillus subtilis]
  misc_feature (278)..(378): NCBI GI NO: 16080077 NR Description: ytaP [Bacillus subtilis]
PLQFPVHQAPVPAASTPTPPPTGAPMAAAGDLRSEYLQVLLSRRREPQVPLSVEQGTPVTKPLFQGDWPLGPREAMESCPRKEVEDFHEKLVEENFFLITESGEQGRVPVLLLKLNDSTAPERKPVVVILHSSYKCKEWVRPLLEAYASRGYIAVSIDSRYHGESASHKNTYTDALKAAWRNGDTMPFIFDTAWDLIKLADHLSARKDVDPSRIGITGESLGGMHSWFGAFVDTRYSVVVPIVGFQGFRWAIDNNMWEARVNSIRPVFEEAATDLGKSEIDSEVVEKVWDRIAPGLASRFDAPYSVPLIAPRPLLLLNGAEDPCCPIAGLQEPASRVAEAYEKAGSAEKFKFIVEPGVEHMLTANMVKEASEWFDRFLQ

SEQ ID NO: 14485 - protein, 354 aa, Triticum aestivum
  peptide (1)..(354): Ceres Seq. ID no. 13598645
  misc_feature (149)..(353): NCBI GI NO: 34898368 NR Description: ESTs C19441
  misc_feature (1)..(124): NCBI GI NO: 34898368 NR Description: ESTs C19441
  misc_feature (1)..(354): NCBI GI NO: 30689997 NR Description: expressed protein [Arabidopsis thaliana]
  misc_feature (36)..(217): NCBI GI NO: 16080077 NR Description: ytaP [Bacillus subtilis]
  misc_feature (253)..(353): NCBI GI NO: 16080077 NR Description: ytaP [Bacillus subtilis]
MAAAGDLRSEYLQVLLSRRREPQVPLSVEQGTPVTKPLFQGDWPLGPREAMESCPRKEVEDFHEKLVEENFFLITESGEQGRVPVLLLKLNDSTAPERKPVVVILHSSYKCKEWVRPLLEAYASRGYIAVSIDSRYHGESASHKNTYTDALKAAWRNGDTMPFIFDTAWDLIKLADHLSARKDVDPSRIGITGESLGGMHSWFGAFVDTRYSVVVPIVGFQGFRWAIDNNMWEARVNSIRPVFEEAATDLGKSEIDSEVVEKVWDRIAPGLASRFDAPYSVPLIAPRPLLLLNGAEDPCCPIAGLQEPASRVAEAYEKAGSAEKFKFIVEPGVEHMLTANMVKEASEWFDRFLQ

SEQ ID NO: 14486 - protein, 304 aa, Triticum aestivum
  peptide (1)..(304): Ceres Seq. ID no. 13598646
  misc_feature (99)..(303): NCBI GI NO: 34898368 NR Description: ESTs C19441
  misc_feature (1)..(74): NCBI GI NO: 34898368 NR Description: ESTs C19441
  misc_feature (1)..(304): NCBI GI NO: 30689997 NR Description: expressed protein [Arabidopsis thaliana]
  misc_feature (1)..(167): NCBI GI NO: 16080077 NR Description: ytaP [Bacillus subtilis]
  misc_feature (203)..(303): NCBI GI NO: 16080077 NR Description: ytaP [Bacillus subtilis]
MESCPRKEVEDFHEKLVEENFFLITESGEQGRVPVLLLKLNDSTAPERKPVVVILHSSYKCKEWVRPLLEAYASRGYIAVSIDSRYHGESASHKNTYTDALKAAWRNGDTMPFIFDTAWDLIKLADHLSARKDVDPSRIGITGESLGGMHSWFGAFVDTRYSVVVPIVGFQGFRWAIDNNMWEARVNSIRPVFEEAATDLGKSEIDSEVVEKVWDRIAPGLASRFDAPYSVPLIAPRPLLLLNGAEDPCCPIAGLQEPASRVAEAYEKAGSAEKFKFIVEPGVEHMLTANMVKEASEWFDRFLQ

SEQ ID NO: 14487 - DNA, 2166 bp, Triticum aestivum
  misc_feature (1)..(2166): Ceres Seq. ID no. 13597798
aacccaaacccccccggacctaaaatctccgaaccctcctcaccggcaacacccggggtggccgccatgcacgcctccgcccgcttgctccgccgcctctcctcttcctactccgcccgctcgctccgccgcctccctctccacccatcaccctcgccgcctccacatccatctcgtctgccgccccttcgaaccgtgacccgcgccctccttccccacctcgctgctccccgcttctccaccatctcttgcgcatccacaccctctctccgcctaggtgaatgcggcgctctgggaaccccggcgataccgtcggcggaggtatccgaggaagaggaggaggtggagtctgtggcggcgcggcatgacaccgacgcgttcgcggcggtggagctcgcgctggactcggtggtgaaggtgttcacggtgtcaagtggccctaactacttcctgccgtggcagaacaaggcccagcgcgagagcatgggctccggctttgtaatttctggaaaaaggatcgtcacaaatgctcatgtggtagctgatcatacttttgttcttgtgaggaagcatggatcacctgcaaagtacaaggcggaagttcaggctattggccatgagtgtgatttggctcttcttacagttgagagtgaggagttttgggaggggatgaacagcttggatcttggagacattccatttttgcaggaagctgtcgccgtggttggctaccctcagggtggagacaatatctctgtcaccaagggggttgtttctagagtggaaccaacacagtatgcccatggtgcgactcagctcatggctatacaaatagatgcagctattaatccaggcaatagtggagggcctgcaatcatgggtgataaagtggctggagttgctttccaaaatctgtcaggagcagaaaacattgggtatattatacctgtgcctgtaattaagcgttttatttctggtgtggaagagagtggcaaatattctgggttttgttctcttgggatatcttgccaggccactgagaacatccaaataagagagtgctttggtatgcggcctgaaatgactggagtgttagtcagtagaataaatcctctgtctggtgcttacgaaattttgaggaaagacgatatccttctcgagtttgatggcgtgcctattgcgaatgatgggacagttccatttcgaaatagagagagaatcacctttgatcatcttgtgtccatgaagaagcctgaagaaacagccgttatcaaagtactaagagatggcaaagagcatgaattgaatgtgacacttagacctttgcaacctttggttcctgtacatcaatttgataaactgcccagctactacatctttgctggttttgtttttatcccgctgacccagccttatctccatgaatttggggaggactggtacaacacttcgccacgtcgattgtgtgaacgggcactgagagaacttccgaagaaggctggccaacagttagtaatattatctcaggtcctaatggatgatattaatgttggttatgaaaggctggctgaactccaggtaaagaaggtgaatggtgttgaggttgagaatttgaagcatttgtgcagtatcgtggagaactgcactgaagaaaacttgagaattgatttggacgatgagcgggtgatcgtcctgaaatttcagaacgcgaggcttgccacgtctcggatcctcaagcggcacaggattccatcagccatgtcaaatgaccttgtcgatgaacaagcgagcaaaggtgagactgaggcatcatgcacaaactgacacattttcatagacgtagctacacagtttctgcggaagcaccgatgttagctcggttgtctttccagagacagatgaggtaggccaaggactgctggagtcagcgatgagcccatgggttgcagcaggctccagttttgctgattcagttttgacagaaggtagaggtcttcagcaaataagaacccaagttcttcagcccgagttgtaacatcattctttgctcccctcccaacgatttatcattctttctttcgccactgtacgggttttggcacccttatgttaaattcggattatgtatcatcaccaaagcagaacataggagatacaaatttcaag

SEQ ID NO: 14488 - protein, 607 aa, Triticum aestivum
  peptide (1)..(607): Ceres Seq. ID no. 15222191
  misc_feature (139)..(324): Pfam Name: Pfam Description:  Trypsin
  misc_feature (26)..(606): NCBI GI NO: 18421592 NR Description: DegP protease [Arabidopsis thaliana]
  misc_feature (60)..(590): NCBI GI NO: 18408329 NR Description: DegP protease [Arabidopsis thaliana]
  misc_feature (113)..(598): NCBI GI NO: 18408327 NR Description: DegP protease [Arabidopsis thaliana]
  misc_feature (114)..(472): NCBI GI NO: 9758082 NR Description: contains similarity to serineprotease~gene_id:MNF13
  misc_feature (501)..(597): NCBI GI NO: 9758082 NR Description: contains similarity to serineprotease~gene_id:MNF13
  misc_feature (60)..(504): NCBI GI NO: 2190549 NR Description: F5I14.17 gene product [Arabidopsis thaliana]
  misc_feature (108)..(473): NCBI GI NO: 18401167 NR Description: DegP protease [Arabidopsis thaliana]
  misc_feature (509)..(591): NCBI GI NO: 18401167 NR Description: DegP protease [Arabidopsis thaliana]
  misc_feature (108)..(473): NCBI GI NO: 9279653 NR Description: gb|AAF23847
  misc_feature (505)..(591): NCBI GI NO: 9279653 NR Description: gb|AAF23847
NPNPPGPKISEPSSPATPGVAAMHASARLLRRLSSSYSARSLRRLPLHPSPSPPPHPSRLPPLRTVTRALLPHLAAPRFSTISCASTPSLRLGECGALGTPAIPSAEVSEEEEEVESVAARHDTDAFAAVELALDSVVKVFTVSSGPNYFLPWQNKAQRESMGSGFVISGKRIVTNAHVVADHTFVLVRKHGSPAKYKAEVQAIGHECDLALLTVESEEFWEGMNSLDLGDIPFLQEAVAVVGYPQGGDNISVTKGVVSRVEPTQYAHGATQLMAIQIDAAINPGNSGGPAIMGDKVAGVAFQNLSGAENIGYIIPVPVIKRFISGVEESGKYSGFCSLGISCQATENIQIRECFGMRPEMTGVLVSRINPLSGAYEILRKDDILLEFDGVPIANDGTVPFRNRERITFDHLVSMKKPEETAVIKVLRDGKEHELNVTLRPLQPLVPVHQFDKLPSYYIFAGFVFIPLTQPYLHEFGEDWYNTSPRRLCERALRELPKKAGQQLVILSQVLMDDINVGYERLAELQVKKVNGVEVENLKHLCSIVENCTEENLRIDLDDERVIVLKFQNARLATSRILKRHRIPSAMSNDLVDEQASKGETEASCTN

SEQ ID NO: 14489 - protein, 585 aa, Triticum aestivum
  peptide (1)..(585): Ceres Seq. ID no. 15222192
  misc_feature (117)..(302): Pfam Name: Pfam Description:  Trypsin
  misc_feature (4)..(584): NCBI GI NO: 18421592 NR Description: DegP protease [Arabidopsis thaliana]
  misc_feature (38)..(568): NCBI GI NO: 18408329 NR Description: DegP protease [Arabidopsis thaliana]
  misc_feature (91)..(576): NCBI GI NO: 18408327 NR Description: DegP protease [Arabidopsis thaliana]
  misc_feature (92)..(450): NCBI GI NO: 9758082 NR Description: contains similarity to serineprotease~gene_id:MNF13
  misc_feature (479)..(575): NCBI GI NO: 9758082 NR Description: contains similarity to serineprotease~gene_id:MNF13
  misc_feature (38)..(482): NCBI GI NO: 2190549 NR Description: F5I14.17 gene product [Arabidopsis thaliana]
  misc_feature (86)..(451): NCBI GI NO: 18401167 NR Description: DegP protease [Arabidopsis thaliana]
  misc_feature (487)..(569): NCBI GI NO: 18401167 NR Description: DegP protease [Arabidopsis thaliana]
  misc_feature (86)..(451): NCBI GI NO: 9279653 NR Description: gb|AAF23847
  misc_feature (483)..(569): NCBI GI NO: 9279653 NR Description: gb|AAF23847
MHASARLLRRLSSSYSARSLRRLPLHPSPSPPPHPSRLPPLRTVTRALLPHLAAPRFSTISCASTPSLRLGECGALGTPAIPSAEVSEEEEEVESVAARHDTDAFAAVELALDSVVKVFTVSSGPNYFLPWQNKAQRESMGSGFVISGKRIVTNAHVVADHTFVLVRKHGSPAKYKAEVQAIGHECDLALLTVESEEFWEGMNSLDLGDIPFLQEAVAVVGYPQGGDNISVTKGVVSRVEPTQYAHGATQLMAIQIDAAINPGNSGGPAIMGDKVAGVAFQNLSGAENIGYIIPVPVIKRFISGVEESGKYSGFCSLGISCQATENIQIRECFGMRPEMTGVLVSRINPLSGAYEILRKDDILLEFDGVPIANDGTVPFRNRERITFDHLVSMKKPEETAVIKVLRDGKEHELNVTLRPLQPLVPVHQFDKLPSYYIFAGFVFIPLTQPYLHEFGEDWYNTSPRRLCERALRELPKKAGQQLVILSQVLMDDINVGYERLAELQVKKVNGVEVENLKHLCSIVENCTEENLRIDLDDERVIVLKFQNARLATSRILKRHRIPSAMSNDLVDEQASKGETEASCTN

SEQ ID NO: 14490 - protein, 446 aa, Triticum aestivum
  peptide (1)..(446): Ceres Seq. ID no. 15222193
  misc_feature (1)..(163): Pfam Name: Pfam Description:  Trypsin
  misc_feature (1)..(445): NCBI GI NO: 18421592 NR Description: DegP protease [Arabidopsis thaliana]
  misc_feature (1)..(429): NCBI GI NO: 18408329 NR Description: DegP protease [Arabidopsis thaliana]
  misc_feature (1)..(437): NCBI GI NO: 18408327 NR Description: DegP protease [Arabidopsis thaliana]
  misc_feature (1)..(311): NCBI GI NO: 9758082 NR Description: contains similarity to serineprotease~gene_id:MNF13
  misc_feature (340)..(436): NCBI GI NO: 9758082 NR Description: contains similarity to serineprotease~gene_id:MNF13
  misc_feature (1)..(343): NCBI GI NO: 2190549 NR Description: F5I14.17 gene product [Arabidopsis thaliana]
  misc_feature (1)..(312): NCBI GI NO: 18401167 NR Description: DegP protease [Arabidopsis thaliana]
  misc_feature (348)..(430): NCBI GI NO: 18401167 NR Description: DegP protease [Arabidopsis thaliana]
  misc_feature (1)..(312): NCBI GI NO: 9279653 NR Description: gb|AAF23847
  misc_feature (344)..(430): NCBI GI NO: 9279653 NR Description: gb|AAF23847
MGSGFVISGKRIVTNAHVVADHTFVLVRKHGSPAKYKAEVQAIGHECDLALLTVESEEFWEGMNSLDLGDIPFLQEAVAVVGYPQGGDNISVTKGVVSRVEPTQYAHGATQLMAIQIDAAINPGNSGGPAIMGDKVAGVAFQNLSGAENIGYIIPVPVIKRFISGVEESGKYSGFCSLGISCQATENIQIRECFGMRPEMTGVLVSRINPLSGAYEILRKDDILLEFDGVPIANDGTVPFRNRERITFDHLVSMKKPEETAVIKVLRDGKEHELNVTLRPLQPLVPVHQFDKLPSYYIFAGFVFIPLTQPYLHEFGEDWYNTSPRRLCERALRELPKKAGQQLVILSQVLMDDINVGYERLAELQVKKVNGVEVENLKHLCSIVENCTEENLRIDLDDERVIVLKFQNARLATSRILKRHRIPSAMSNDLVDEQASKGETEASCTN

SEQ ID NO: 14491 - DNA, 831 bp, Triticum aestivum
  misc_feature (1)..(831): Ceres Seq. ID no. 12585694
ctcacagaaacgacgcgtcgactctcccttcctctcctccttccccctctctagcaatcggcgagcagcgatggcgtgggcgacacggttcctgtccgcggtgtgcttcttcgcggcgggcgtcctcttcgccccagatgtcctcgtcggcgaccgctccggctccggcgccaccgccgtcacggccgccaaggtgtcccacctcctctgcttcgccacctgctggggcgctgcgctttgggctaccttcatcggtggaatcatcatgttcaagaatctgccgaggcaccagttcgggaacctgcaggggaagatgttcccggcctatttcacgctcatctccgcctgcgccgccgtctccgtcgccgcctttgcctacctccacccgtggaaggccgcctccgccgtcgagcgctaccagcttgggttcctcatctccgcgctcggcttcaacctctccaacctgctggtcttcacccccatgaccattgagatgatgaagaagaggcacaagatcgagagagagcttagcatcggtgacgaggtcgggtggtcgaagaacgtcaagacggcaaaaagcaaccctaccctcgctgcgatgaacaagaagtttgggatgatccacggtctctcatcgctggccaacatcttgtcgttcggcagccttgccatgcactcctggtactttgccagcaagcttgagctgtgaagtgtacaaacacccagcttgaccacgaacacggttgaatctagtatcatcgcaatatgcctatgctttgttctaaaaacagctacatgttatgagcttgcaaacagatttaatgtagactg

SEQ ID NO: 14492 - protein, 235 aa, Triticum aestivum
  peptide (1)..(235): Ceres Seq. ID no. 12585695
  misc_feature (24)..(235): NCBI GI NO: 18412424 NR Description: putative membrane protein; protein id: At3g62580
  misc_feature (24)..(213): NCBI GI NO: 15724187 NR Description: AT3g62580/T12C14_280 [Arabidopsis thaliana]
  misc_feature (65)..(209): NCBI GI NO: 11357672 NR Description: hypothetical protein F26K9
  misc_feature (64)..(216): NCBI GI NO: 37552510 NR Description: similar to Hypothetical protein MGC18837
  misc_feature (64)..(216): NCBI GI NO: 31982159 NR Description: hypothetical protein MGC18837 [Mus musculus]
  misc_feature (64)..(216): NCBI GI NO: 7259296 NR Description: contains transmembrane (TM) region [Mus musculus]
  misc_feature (64)..(216): NCBI GI NO: 27719651 NR Description: similar to hypothetical protein MBC3205
  misc_feature (52)..(233): NCBI GI NO: 31204397 NR Description: ENSANGP00000020420 [Anopheles gambiae]
  misc_feature (57)..(235): NCBI GI NO: 20304097 NR Description: CG32512-PA [Drosophila melanogaster]
  misc_feature (67)..(234): NCBI GI NO: 40741706 NR Description: hypothetical protein AN4553.2
SQKRRVDSPFLSSFPLSSNRRAAMAWATRFLSAVCFFAAGVLFAPDVLVGDRSGSGATAVTAAKVSHLLCFATCWGAALWATFIGGIIMFKNLPRHQFGNLQGKMFPAYFTLISACAAVSVAAFAYLHPWKAASAVERYQLGFLISALGFNLSNLLVFTPMTIEMMKKRHKIERELSIGDEVGWSKNVKTAKSNPTLAAMNKKFGMIHGLSSLANILSFGSLAMHSWYFASKLEL

SEQ ID NO: 14493 - protein, 212 aa, Triticum aestivum
  peptide (1)..(212): Ceres Seq. ID no. 12585696
  misc_feature (1)..(212): NCBI GI NO: 18412424 NR Description: putative membrane protein; protein id: At3g62580
  misc_feature (1)..(190): NCBI GI NO: 15724187 NR Description: AT3g62580/T12C14_280 [Arabidopsis thaliana]
  misc_feature (42)..(186): NCBI GI NO: 11357672 NR Description: hypothetical protein F26K9
  misc_feature (41)..(193): NCBI GI NO: 37552510 NR Description: similar to Hypothetical protein MGC18837
  misc_feature (41)..(193): NCBI GI NO: 31982159 NR Description: hypothetical protein MGC18837 [Mus musculus]
  misc_feature (41)..(193): NCBI GI NO: 7259296 NR Description: contains transmembrane (TM) region [Mus musculus]
  misc_feature (41)..(193): NCBI GI NO: 27719651 NR Description: similar to hypothetical protein MBC3205
  misc_feature (29)..(210): NCBI GI NO: 31204397 NR Description: ENSANGP00000020420 [Anopheles gambiae]
  misc_feature (34)..(212): NCBI GI NO: 20304097 NR Description: CG32512-PA [Drosophila melanogaster]
  misc_feature (44)..(211): NCBI GI NO: 40741706 NR Description: hypothetical protein AN4553.2
MAWATRFLSAVCFFAAGVLFAPDVLVGDRSGSGATAVTAAKVSHLLCFATCWGAALWATFIGGIIMFKNLPRHQFGNLQGKMFPAYFTLISACAAVSVAAFAYLHPWKAASAVERYQLGFLISALGFNLSNLLVFTPMTIEMMKKRHKIERELSIGDEVGWSKNVKTAKSNPTLAAMNKKFGMIHGLSSLANILSFGSLAMHSWYFASKLEL

SEQ ID NO: 14494 - protein, 160 aa, Triticum aestivum
  peptide (1)..(160): Ceres Seq. ID no. 12585697
  misc_feature (44)..(160): Pfam Name: Pfam Description:  Extensin-like region
  misc_feature (5)..(159): NCBI GI NO: 32699068 NR Description: hypothetical protein FLJ35107 [Homo sapiens]
  misc_feature (6)..(160): NCBI GI NO: 23017082 NR Description: hypothetical protein [Thermobifida fusca]
  misc_feature (36)..(160): NCBI GI NO: 32699068 NR Description: hypothetical protein FLJ35107 [Homo sapiens]
  misc_feature (7)..(160): NCBI GI NO: 15233976 NR Description: extensin-like protein; protein id: At4g18670.1
  misc_feature (9)..(159): NCBI GI NO: 3044086 NR Description: unknown [Myxococcus xanthus]
  misc_feature (5)..(158): NCBI GI NO: 32699068 NR Description: hypothetical protein FLJ35107 [Homo sapiens]
  misc_feature (7)..(160): NCBI GI NO: 15240947 NR Description: putative protein; protein id: At5g38560
  misc_feature (3)..(158): NCBI GI NO: 32699068 NR Description: hypothetical protein FLJ35107 [Homo sapiens]
  misc_feature (5)..(160): NCBI GI NO: 13592175 NR Description: ppg3 [Leishmania major]
  misc_feature (6)..(160): NCBI GI NO: 11359723 NR Description: proteophosphoglycan, membrane-associated
HRNDASTLPSSPPSPSLAIGEQRWRGRHGSCPRCASSRRASSSPQMSSSATAPAPAPPPSRPPRCPTSSASPPAGALRFGLPSSVESSCSRICRGTSSGTCRGRCSRPISRSSPPAPPSPSPPLPTSTRGRPPPPSSATSLGSSSPRSASTSPTCWSSPP

SEQ ID NO: 14495 - DNA, 1022 bp, Triticum aestivum
  misc_feature (1)..(1022): Ceres Seq. ID no. 15225623
aaaccgaaaccgaccggccttcccctctcgctctcgcgtctctcggcgggcgttcactctccggcgacgccgacctcccgtctccggcgaccggctgccgccccgccctccctctcaaccggctcggcggtgttccatagcctgccatgtcgaagaagaggggcctttccttggaggagaagcgggagcaaatgcttcaaatattttacgagagtcaagacttctatctgcttaaagagcttgagaagatgggtcctaaaaaaggagtgatcagccagtctgttaaggatgttgtgcaaagcctggtggatgatgatcttgtcttgagagacaaaataggaacttctgtgtacttttggagtcttcccagttgtgccggaaatcagctgaggactacctacaacaagctggagtctgatctttcaaactctaaaaaacgttacatggagcttcttgagcagagagatgacttgaaaagaggcagggaagacactgatgagagagaagacgctttggaggagctgaaggctgtagagctacgccataagaagttaaaggaagaactagctgcctatgctgatagtgatccatctgcactagaggcgatgaaggatgctactgaggttgcccattcggcagctaacagatggacagacaacatcttcactttgcaacaatggtgttcaactacattcccgcaagcaaaagaacagcttgaacacatgtacaaggaggtgggcataactgaagactttgagtatctgcagtaatgctcgacagcctgcatatgccctattgcatcatcgtgtgcagtctccctcagcacgtggtgttggatctagagtagttcacccaaaattggtgagaatcacccgtaccgtcggctatttaacatttgagcagatgatgccattattgcacatgttctgttatgtagaggtgagatgccttgcctatcattgtcgtcaggagagaatgttcactacgttaaaacggtgctacaagatgaatttggcacatgc

SEQ ID NO: 14496 - protein, 207 aa, Triticum aestivum
  peptide (1)..(207): Ceres Seq. ID no. 15225624
  misc_feature (1)..(207): NCBI GI NO: 30688234 NR Description: expressed protein [Arabidopsis thaliana]
  misc_feature (1)..(206): NCBI GI NO: 34857888 NR Description: similar to RIKEN cDNA 2610034E18 gene
  misc_feature (1)..(206): NCBI GI NO: 20380711 NR Description: GAJ protein [Mus musculus]
  misc_feature (1)..(206): NCBI GI NO: 37591185 NR Description: GAJ protein [Mus musculus]
  misc_feature (1)..(206): NCBI GI NO: 14149769 NR Description: GAJ protein; homolog of yeast MND1 [Homo sapiens]
  misc_feature (11)..(206): NCBI GI NO: 29841076 NR Description: similar to GenBank Accession Number AY028916 GAJ inHomo sapiens
  misc_feature (16)..(137): NCBI GI NO: 7485748 NR Description: hypothetical protein F19B15
  misc_feature (5)..(207): NCBI GI NO: 19113903 NR Description: hypothetical coiled-coil protein
  misc_feature (5)..(207): NCBI GI NO: 29246883 NR Description: GLP_76_12374_11763 [Giardia lamblia ATCC 50803]
  misc_feature (10)..(207): NCBI GI NO: 19074771 NR Description: similarity to HYPOTHETICAL PROTEIN YA53_SCHPO
MSKKRGLSLEEKREQMLQIFYESQDFYLLKELEKMGPKKGVISQSVKDVVQSLVDDDLVLRDKIGTSVYFWSLPSCAGNQLRTTYNKLESDLSNSKKRYMELLEQRDDLKRGREDTDEREDALEELKAVELRHKKLKEELAAYADSDPSALEAMKDATEVAHSAANRWTDNIFTLQQWCSTTFPQAKEQLEHMYKEVGITEDFEYLQ

SEQ ID NO: 14497 - protein, 192 aa, Triticum aestivum
  peptide (1)..(192): Ceres Seq. ID no. 15225625
  misc_feature (1)..(192): NCBI GI NO: 30688234 NR Description: expressed protein [Arabidopsis thaliana]
  misc_feature (1)..(191): NCBI GI NO: 34857888 NR Description: similar to RIKEN cDNA 2610034E18 gene
  misc_feature (1)..(191): NCBI GI NO: 20380711 NR Description: GAJ protein [Mus musculus]
  misc_feature (1)..(191): NCBI GI NO: 37591185 NR Description: GAJ protein [Mus musculus]
  misc_feature (1)..(191): NCBI GI NO: 14149769 NR Description: GAJ protein; homolog of yeast MND1 [Homo sapiens]
  misc_feature (1)..(191): NCBI GI NO: 29841076 NR Description: similar to GenBank Accession Number AY028916 GAJ inHomo sapiens
  misc_feature (1)..(122): NCBI GI NO: 7485748 NR Description: hypothetical protein F19B15
  misc_feature (1)..(192): NCBI GI NO: 19113903 NR Description: hypothetical coiled-coil protein
  misc_feature (1)..(192): NCBI GI NO: 29246883 NR Description: GLP_76_12374_11763 [Giardia lamblia ATCC 50803]
  misc_feature (1)..(192): NCBI GI NO: 19074771 NR Description: similarity to HYPOTHETICAL PROTEIN YA53_SCHPO
MLQIFYESQDFYLLKELEKMGPKKGVISQSVKDVVQSLVDDDLVLRDKIGTSVYFWSLPSCAGNQLRTTYNKLESDLSNSKKRYMELLEQRDDLKRGREDTDEREDALEELKAVELRHKKLKEELAAYADSDPSALEAMKDATEVAHSAANRWTDNIFTLQQWCSTTFPQAKEQLEHMYKEVGITEDFEYLQ

SEQ ID NO: 14498 - protein, 173 aa, Triticum aestivum
  peptide (1)..(173): Ceres Seq. ID no. 15225626
  misc_feature (1)..(173): NCBI GI NO: 30688234 NR Description: expressed protein [Arabidopsis thaliana]
  misc_feature (1)..(172): NCBI GI NO: 34857888 NR Description: similar to RIKEN cDNA 2610034E18 gene
  misc_feature (1)..(172): NCBI GI NO: 20380711 NR Description: GAJ protein [Mus musculus]
  misc_feature (1)..(172): NCBI GI NO: 37591185 NR Description: GAJ protein [Mus musculus]
  misc_feature (1)..(172): NCBI GI NO: 14149769 NR Description: GAJ protein; homolog of yeast MND1 [Homo sapiens]
  misc_feature (1)..(172): NCBI GI NO: 29841076 NR Description: similar to GenBank Accession Number AY028916 GAJ inHomo sapiens
  misc_feature (1)..(103): NCBI GI NO: 7485748 NR Description: hypothetical protein F19B15
  misc_feature (1)..(173): NCBI GI NO: 19113903 NR Description: hypothetical coiled-coil protein
  misc_feature (1)..(173): NCBI GI NO: 29246883 NR Description: GLP_76_12374_11763 [Giardia lamblia ATCC 50803]
  misc_feature (1)..(173): NCBI GI NO: 19074771 NR Description: similarity to HYPOTHETICAL PROTEIN YA53_SCHPO
MGPKKGVISQSVKDVVQSLVDDDLVLRDKIGTSVYFWSLPSCAGNQLRTTYNKLESDLSNSKKRYMELLEQRDDLKRGREDTDEREDALEELKAVELRHKKLKEELAAYADSDPSALEAMKDATEVAHSAANRWTDNIFTLQQWCSTTFPQAKEQLEHMYKEVGITEDFEYLQ

SEQ ID NO: 14499 - DNA, 1495 bp, Triticum aestivum
  misc_feature (1)..(1495): Ceres Seq. ID no. 15225627
tcgccccctcctccctattactctcccacctgctctccccgccgctccagaatcgccgccaccttgctgcgctcaccaacggcacgcgcatcccccctcagatccctccctcacgcattccgccttctcccgaggctcgtagctgctagcacggacgatggccccttgtgcaaccgccggcgcgcagatgctggccgcacgcccctgcgtctcggcctctcagagcatgctcacctcgaggccggccgtctcacggatcgacctgacgctcgtcgctggtagcttcgcgaactgtcccagaatctcctgctccaggtctcttggttcttcccggagcggcgctgtcgccgtaagagcggtgtcaggagaaggtagctcttctgggctgcccatcgatcttagagggaaaagggcatttattgctggggttgctgatgataacggctatggctgggcaattgcaaaggctcttgccgcagctggtgctgaaattcttgttggtacatgggtgcctgcacttaacatatttgagacaagcctgaggcgtggaaaatttgacgaatcacggaagctgcctgatggatctcttatggagattgttaaagtctatccactggatgctgtctatgattccccggaggatgttcctgaagatgtcaaaacaaacaaaaggtacgcaggatcgtcaaattggactgtgaaggaagctgccgaattagttaagaaggaatatggcagcattgacattcttgtgcattctcttgctaatggtcctgaggttacaaaacctttgctggaaacctcaagaagtgggtatcttgctgcaatttcagcatccagttactcctttgtttctttacttaagcacttccttcctattatgaatccaggtggtgctagcatctcgctaacatatattgcatctgaaaggacaattcctggatatggtggtggcatgagttcagctaaagcagctcttgagagtgatacaaaagtacttgcttttgaagctggacgcaaaggcaaaatccgagttaacaccatatctgcaggtcctctgggcagcagagctgccaaggcaattggattcattgagaagatgatcgagtactcttatgtcaatgcaccattgcagaaggagcttctggcagatgaagtcgggaacacggcagcattcctggtgtctcctttggcttctgccatcactggctcgactgtttacgtcgacaacggacttaacaccatgggtcttgcggttgacagccccacagtatcttcattgttgtgattccggtaggcggacctatttttcctgattcaccgcggcttgattgttgaataaggagcttagttagttagtactgtaagaagctcttgctaagagctgagggcaggagaaaaaagagaagggggtggctgttgaaaatgactttttaagcagtccagtacctcctctttggcccatttctaatattatctcaaatgttgttgttgc

SEQ ID NO: 14500 - protein, 376 aa, Triticum aestivum
  peptide (1)..(376): Ceres Seq. ID no. 15225628
  misc_feature (1)..(374): NCBI GI NO: 38637198 NR Description: putative enoyl-ACP reductase
  misc_feature (1)..(374): NCBI GI NO: 7489537 NR Description: probable enoyl-
  misc_feature (1)..(375): NCBI GI NO: 14422255 NR Description: enoyl-
  misc_feature (2)..(375): NCBI GI NO: 14422261 NR Description: enoyl-
  misc_feature (2)..(375): NCBI GI NO: 461461 NR Description: Enoyl-
  misc_feature (48)..(375): NCBI GI NO: 14422257 NR Description: enoyl-
  misc_feature (2)..(375): NCBI GI NO: 99805 NR Description: enoyl-
  misc_feature (2)..(375): NCBI GI NO: 14422259 NR Description: enoyl-
  misc_feature (1)..(375): NCBI GI NO: 18396215 NR Description: enoyl-
  misc_feature (1)..(375): NCBI GI NO: 7488486 NR Description: probable enoyl-
MAPCATAGAQMLAARPCVSASQSMLTSRPAVSRIDLTLVAGSFANCPRISCSRSLGSSRSGAVAVRAVSGEGSSSGLPIDLRGKRAFIAGVADDNGYGWAIAKALAAAGAEILVGTWVPALNIFETSLRRGKFDESRKLPDGSLMEIVKVYPLDAVYDSPEDVPEDVKTNKRYAGSSNWTVKEAAELVKKEYGSIDILVHSLANGPEVTKPLLETSRSGYLAAISASSYSFVSLLKHFLPIMNPGGASISLTYIASERTIPGYGGGMSSAKAALESDTKVLAFEAGRKGKIRVNTISAGPLGSRAAKAIGFIEKMIEYSYVNAPLQKELLADEVGNTAAFLVSPLASAITGSTVYVDNGLNTMGLAVDSPTVSSLL

SEQ ID NO: 14501 - protein, 366 aa, Triticum aestivum
  peptide (1)..(366): Ceres Seq. ID no. 15225629
  misc_feature (1)..(364): NCBI GI NO: 38637198 NR Description: putative enoyl-ACP reductase
  misc_feature (1)..(364): NCBI GI NO: 7489537 NR Description: probable enoyl-
  misc_feature (1)..(365): NCBI GI NO: 14422255 NR Description: enoyl-
  misc_feature (1)..(365): NCBI GI NO: 14422261 NR Description: enoyl-
  misc_feature (1)..(365): NCBI GI NO: 461461 NR Description: Enoyl-
  misc_feature (38)..(365): NCBI GI NO: 14422257 NR Description: enoyl-
  misc_feature (1)..(365): NCBI GI NO: 99805 NR Description: enoyl-
  misc_feature (1)..(365): NCBI GI NO: 14422259 NR Description: enoyl-
  misc_feature (1)..(365): NCBI GI NO: 18396215 NR Description: enoyl-
  misc_feature (1)..(365): NCBI GI NO: 7488486 NR Description: probable enoyl-
MLAARPCVSASQSMLTSRPAVSRIDLTLVAGSFANCPRISCSRSLGSSRSGAVAVRAVSGEGSSSGLPIDLRGKRAFIAGVADDNGYGWAIAKALAAAGAEILVGTWVPALNIFETSLRRGKFDESRKLPDGSLMEIVKVYPLDAVYDSPEDVPEDVKTNKRYAGSSNWTVKEAAELVKKEYGSIDILVHSLANGPEVTKPLLETSRSGYLAAISASSYSFVSLLKHFLPIMNPGGASISLTYIASERTIPGYGGGMSSAKAALESDTKVLAFEAGRKGKIRVNTISAGPLGSRAAKAIGFIEKMIEYSYVNAPLQKELLADEVGNTAAFLVSPLASAITGSTVYVDNGLNTMGLAVDSPTVSSLL

SEQ ID NO: 14502 - protein, 353 aa, Triticum aestivum
  peptide (1)..(353): Ceres Seq. ID no. 15225630
  misc_feature (1)..(351): NCBI GI NO: 38637198 NR Description: putative enoyl-ACP reductase
  misc_feature (1)..(351): NCBI GI NO: 7489537 NR Description: probable enoyl-
  misc_feature (1)..(352): NCBI GI NO: 14422255 NR Description: enoyl-
  misc_feature (1)..(352): NCBI GI NO: 14422261 NR Description: enoyl-
  misc_feature (1)..(352): NCBI GI NO: 461461 NR Description: Enoyl-
  misc_feature (25)..(352): NCBI GI NO: 14422257 NR Description: enoyl-
  misc_feature (1)..(352): NCBI GI NO: 99805 NR Description: enoyl-
  misc_feature (1)..(352): NCBI GI NO: 14422259 NR Description: enoyl-
  misc_feature (1)..(352): NCBI GI NO: 18396215 NR Description: enoyl-
  misc_feature (1)..(352): NCBI GI NO: 7488486 NR Description: probable enoyl-
MLTSRPAVSRIDLTLVAGSFANCPRISCSRSLGSSRSGAVAVRAVSGEGSSSGLPIDLRGKRAFIAGVADDNGYGWAIAKALAAAGAEILVGTWVPALNIFETSLRRGKFDESRKLPDGSLMEIVKVYPLDAVYDSPEDVPEDVKTNKRYAGSSNWTVKEAAELVKKEYGSIDILVHSLANGPEVTKPLLETSRSGYLAAISASSYSFVSLLKHFLPIMNPGGASISLTYIASERTIPGYGGGMSSAKAALESDTKVLAFEAGRKGKIRVNTISAGPLGSRAAKAIGFIEKMIEYSYVNAPLQKELLADEVGNTAAFLVSPLASAITGSTVYVDNGLNTMGLAVDSPTVSSLL

SEQ ID NO: 14503 - DNA, 584 bp, Triticum aestivum
  misc_feature (1)..(584): Ceres Seq. ID no. 13584968
aaatcgatagatagatagataagtaaaaatggcgcagtgtgtgaccaaaaacacattcgtgcaaggaaaacccttccttccagttccagcagctcccactaaaaatgttcggagagtggttcagtgcggtgtgtggtgcaggaagaaggagatacacccgcaattccacgaggaagcgaaggtgtactgcaacggggagctggtgctgacgacaggtgggacccagaaggagtacgtggtcgacgtgtggtcggggaaccaccctttctacctcggaagccggtcggcgtctatggtcagcgacgaccaggtcgagaagttccgcaagaagttcggagagctaaaagagatcatggagattcctgttctcaagggagagattgttatcccctcaagacgcaagggcgtttccaaaggaggcaagaaaaaataatttattcgattcaaacatgattgtcttttttcttcttcttaatttcaattcctgtaatgtaatatgataaaacgctttaagcctgtgctatggatattgttttgagcaagcccctgaatgtgctaatgtgattgatttggtgattctgtcc

SEQ ID NO: 14504 - protein, 134 aa, Triticum aestivum
  peptide (1)..(134): Ceres Seq. ID no. 13584969
  misc_feature (38)..(105): Pfam Name: Pfam Description:  Ribosomal protein L31
  misc_feature (28)..(134): NCBI GI NO: 3885513 NR Description: similar to chloroplast 50S ribosomal protein L31
  misc_feature (14)..(133): NCBI GI NO: 18410833 NR Description: chloroplast 50S ribosomal protein L31 -related
  misc_feature (16)..(107): NCBI GI NO: 34912982 NR Description: putative chloroplast 50S ribosomal protein L31
  misc_feature (39)..(107): NCBI GI NO: 11467741 NR Description: ribosomal protein L31 [Guillardia theta]
  misc_feature (39)..(103): NCBI GI NO: 17231678 NR Description: 50S ribosomal protein L31 [Nostoc sp. PCC 7120]
  misc_feature (39)..(103): NCBI GI NO: 33241133 NR Description: Ribosomal protein L31
  misc_feature (39)..(131): NCBI GI NO: 22297654 NR Description: 50S ribosomal protein L31
  misc_feature (39)..(103): NCBI GI NO: 33862086 NR Description: 50S ribosomal protein L31
  misc_feature (39)..(104): NCBI GI NO: 23042796 NR Description: hypothetical protein
  misc_feature (39)..(103): NCBI GI NO: 33866627 NR Description: 50S ribosomal protein L31
MAQCVTKNTFVQGKPFLPVPAAPTKNVRRVVQCGVWCRKKEIHPQFHEEAKVYCNGELVLTTGGTQKEYVVDVWSGNHPFYLGSRSASMVSDDQVEKFRKKFGELKEIMEIPVLKGEIVIPSRRKGVSKGGKKK

SEQ ID NO: 14505 - DNA, 1181 bp, Triticum aestivum
  misc_feature (1)..(1181): Ceres Seq. ID no. 13585324
ctttttttaggaagtaccatctagataagtatatctatgccttagtagatttgacctaagaggttttttatagcaagcaggcagttctttaatacagtagtttacagaccttgttttacatggcccattccatgatcgtccttgtatttttgtcatcaagatctgtctgtttttgtcgttcagatttgatttcgtgcaaagccttaaccaagcagcatgttctcatcagtcgggtagtgaatggagctttattagccttgtctgtaaccaatgctgctcccctataatctgcatgtggacacgatcttgcaatcagccaaattggcaagcgatagcatttgatattgagcttggctgtggtgactagggagtcgtactgaaccccatgtgctatttgttgtttggtggcctacatgcgatgctttgatggatggaaggttgcaagtgcaacagcaacatttgtcatgatgttctcctcgtctctctctgtggtcgagttctactttctgggcaggttcccaattccttatgctctctacttgatcttcatttccatattggctgggttctggggccagtgcttggtcaggaagatcgtgcatgtgctcaagagggcctcgctgatcgtcttcatcctctcctctgtcatcttcgccagtgctcttaccatgggtgttgttgggaccgagaagagcatctcgatgatccacaatcacgaatacatggggttcctcagcttctgctgagtgaacaaaccaagcagacgaccaccagacccggggagaacccaaaccaggccaatacctaattgacctcacctctcccccagtccagttaagtccaaggatgaaataaaagaagcctgacgcgtgcccgtcgttagctcctcgctaacctgcaagcacctgcccggccaagcaaattctcctagtagtatagtgtcatggtcttgtggcgcggcgtcgtgccgtgtgctggatgttcttttttgttgtgttcatgtgctggttagctcctggttaacctgcagtgaagcattcgtcgtagggtttacgccgattcattcatgcgctagctagctcttggctggctggctacctgcaaacattggttgtattgggtgatgtaaatatatcagccggccaattggttgctgatttgtctatatagcttgttttgct

SEQ ID NO: 14506 - protein, 125 aa, Triticum aestivum
  peptide (1)..(125): Ceres Seq. ID no. 13585325
MEGCKCNSNICHDVLLVSLCGRVLLSGQVPNSLCSLLDLHFHIGWVLGPVLGQEDRACAQEGLADRLHPLLCHLRQCSYHGCCWDREEHLDDPQSRIHGVPQLLLSEQTKQTTTRPGENPNQANT

SEQ ID NO: 14507 - protein, 110 aa, Triticum aestivum
  peptide (1)..(110): Ceres Seq. ID no. 13585326
  misc_feature (8)..(110): NCBI GI NO: 30686851 NR Description: expressed protein [Arabidopsis thaliana]
  misc_feature (8)..(110): NCBI GI NO: 30682879 NR Description: expressed protein [Arabidopsis thaliana]
  misc_feature (8)..(110): NCBI GI NO: 40253412 NR Description: membrane protein-like
  misc_feature (8)..(110): NCBI GI NO: 25412342 NR Description: hypothetical protein At2g25740
  misc_feature (8)..(105): NCBI GI NO: 16660290 NR Description: hypothetical protein [Musa acuminata]
  misc_feature (8)..(110): NCBI GI NO: 40253486 NR Description: unknown protein
MRCFDGWKVASATATFVMMFSSSLSVVEFYFLGRFPIPYALYLIFISILAGFWGQCLVRKIVHVLKRASLIVFILSSVIFASALTMGVVGTEKSISMIHNHEYMGFLSFC

SEQ ID NO: 14508 - protein, 93 aa, Triticum aestivum
  peptide (1)..(93): Ceres Seq. ID no. 13585327
  misc_feature (1)..(93): NCBI GI NO: 30686851 NR Description: expressed protein [Arabidopsis thaliana]
  misc_feature (1)..(93): NCBI GI NO: 30682879 NR Description: expressed protein [Arabidopsis thaliana]
  misc_feature (1)..(93): NCBI GI NO: 40253412 NR Description: membrane protein-like
  misc_feature (1)..(93): NCBI GI NO: 25412342 NR Description: hypothetical protein At2g25740
  misc_feature (1)..(88): NCBI GI NO: 16660290 NR Description: hypothetical protein [Musa acuminata]
  misc_feature (1)..(93): NCBI GI NO: 40253486 NR Description: unknown protein
MMFSSSLSVVEFYFLGRFPIPYALYLIFISILAGFWGQCLVRKIVHVLKRASLIVFILSSVIFASALTMGVVGTEKSISMIHNHEYMGFLSFC

SEQ ID NO: 14509 - DNA, 808 bp, Triticum aestivum
  misc_feature (1)..(808): Ceres Seq. ID no. 12618251
acatcgagtcctcgcgccgtcccccgtcccatattccctttacccgttctcgcctcgtcgccggcaatggcgggtcccggcgtcggagcggccgcgcctcgcctgtcgctgctgctgctgctcgtcgtcgtcttcgcgggcccctctcgcgacagccgcaccgaggcggccgtgcggacgtgcacgtacacggtgaaggtgaagacgagctgcgcgtcgccggcgcggacgtcggacgcggtcagcgtggcgttcggggacgcgtaccggaacgaggcgtacggggcgcgcctcccgagcgcgccgggcgggagggccttcgagcggtgcggcaccgacaccttccgcgtctccggggtgtgcggctacggcgtctgctacctctacctccgccgcgccggccgcgacggctgggcgcccgagtgggtccaggtcaccgagccgggccccggcgccggagagaagcccgccaccttctacttcggggcgccgctgccggacggcgtctggtacggccacaaccgctgccccaaggccaaggccaaggcagcggcggcggctcggacaaacaccacctctgctgctgcttcgcctctgggctagcgcgacctgattcggctctacccaccgggcgcagcccctctccgtatgtaattcggcattcgccgagaataagcagactgtgcttacagattcagaataagtaattagagaatcataatccgaaatatgatgaggccatgagggcaccttcttcacaccccggaggatttgtttcctgtttacatttaccacacatctctattag

SEQ ID NO: 14510 - protein, 234 aa, Triticum aestivum
  peptide (1)..(234): Ceres Seq. ID no. 12618252
IESSRRPPSHIPFTRSRLVAGNGGSRRRSGRASPVAAAAARRRLRGPLSRQPHRGGRADVHVHGEGEDELRVAGADVGRGQRGVRGRVPERGVRGAPPERAGREGLRAVRHRHLPRLRGVRLRRLLPLPPPRRPRRLGARVGPGHRAGPRRRREARHLLLRGAAAGRRLVRPQPLPQGQGQGSGGGSDKHHLCCCFASGLARPDSALPTGRSPSPYVIRHSPRISRLCLQIQNK

SEQ ID NO: 14511 - protein, 200 aa, Triticum aestivum
  peptide (1)..(200): Ceres Seq. ID no. 12618253
  misc_feature (55)..(176): Pfam Name: ATS3 Pfam Description: Embryo-specific protein 3,
  misc_feature (55)..(185): NCBI GI NO: 34910236 NR Description: OSJNBa0089K24.2
  misc_feature (61)..(197): NCBI GI NO: 15227355 NR Description: unknown protein; protein id: At2g41470.1
  misc_feature (60)..(179): NCBI GI NO: 8809633 NR Description: contains similarity to embryo-specific protein3~gene_id:MMI9
  misc_feature (60)..(179): NCBI GI NO: 15241727 NR Description: putative protein; protein id: At5g62200.1
  misc_feature (36)..(176): NCBI GI NO: 15241758 NR Description: embryo-specific protein - like
  misc_feature (36)..(176): NCBI GI NO: 26450767 NR Description: embryo-specific protein like
  misc_feature (33)..(176): NCBI GI NO: 3335171 NR Description: embryo-specific protein 3 [Arabidopsis thaliana]
  misc_feature (33)..(176): NCBI GI NO: 13877521 NR Description: embryo-specific protein 3; ATS3
  misc_feature (33)..(176): NCBI GI NO: 15240721 NR Description: embryo-specific protein 3
TSSPRAVPRPIFPLPVLASSPAMAGPGVGAAAPRLSLLLLLVVVFAGPSRDSRTEAAVRTCTYTVKVKTSCASPARTSDAVSVAFGDAYRNEAYGARLPSAPGGRAFERCGTDTFRVSGVCGYGVCYLYLRRAGRDGWAPEWVQVTEPGPGAGEKPATFYFGAPLPDGVWYGHNRCPKAKAKAAAAARTNTTSAAASPLG

SEQ ID NO: 14512 - protein, 178 aa, Triticum aestivum
  peptide (1)..(178): Ceres Seq. ID no. 12618254
  misc_feature (33)..(154): Pfam Name: ATS3 Pfam Description: Embryo-specific protein 3,
  misc_feature (33)..(163): NCBI GI NO: 34910236 NR Description: OSJNBa0089K24.2
  misc_feature (39)..(175): NCBI GI NO: 15227355 NR Description: unknown protein; protein id: At2g41470.1
  misc_feature (38)..(157): NCBI GI NO: 8809633 NR Description: contains similarity to embryo-specific protein3~gene_id:MMI9
  misc_feature (38)..(157): NCBI GI NO: 15241727 NR Description: putative protein; protein id: At5g62200.1
  misc_feature (14)..(154): NCBI GI NO: 15241758 NR Description: embryo-specific protein - like
  misc_feature (14)..(154): NCBI GI NO: 26450767 NR Description: embryo-specific protein like
  misc_feature (11)..(154): NCBI GI NO: 3335171 NR Description: embryo-specific protein 3 [Arabidopsis thaliana]
  misc_feature (11)..(154): NCBI GI NO: 13877521 NR Description: embryo-specific protein 3; ATS3
  misc_feature (11)..(154): NCBI GI NO: 15240721 NR Description: embryo-specific protein 3
MAGPGVGAAAPRLSLLLLLVVVFAGPSRDSRTEAAVRTCTYTVKVKTSCASPARTSDAVSVAFGDAYRNEAYGARLPSAPGGRAFERCGTDTFRVSGVCGYGVCYLYLRRAGRDGWAPEWVQVTEPGPGAGEKPATFYFGAPLPDGVWYGHNRCPKAKAKAAAAARTNTTSAAASPLG

SEQ ID NO: 14513 - DNA, 1472 bp, Triticum aestivum
  misc_feature (1)..(1472): Ceres Seq. ID no. 13655434
ctaatcgaaaacattcggcagggttgtgaacaccatgtgcaacgtcggagccaaccgcaaccaggccttcgtggagttcgcagatcaaaaccaggcaatttcaatggtttcatattatgcttcatcttcagaacctgcccaagttcgtggtaaaactgtatatatccagtattcaaataggcaagaaattacaaacaataaaggcactggtgattcttctggcaatgtcctgcttgtcacctttgaaggtgtccagcctaatgatgttagcatagatgttatccatttggtattttctgcttttgggtttgttcacaagatagcaacgtttgagaaagccgctggtttccaggcacttatccaatatactgatgctccaactgctctagaggcaaaaaattcgttagacggaagaagcataccgaggtatctactggctgaacacgtcagcatttgtcacctgcgcataacattttctgcgcacaaagatttgaatattaaatttcaatcacatcgcagcagggattacacaaatccttatcttcctgttaatccaactgcaatcgagggaatcacacagcccatattaggctctgatgggaagattaaggagccagagagcaatgtacttttagcatcaatcgagaacatgcagtatgctgtgggagtggatgttctacacactgtgttctcttcttttggtgctgtccgaaagattgcaatgttcgagaagaatggtggaatgcaggctctaattcagtatccagatataacaacagcaggagttgctaaacaagctctggaggggcattgcatatatgatggtggttactgtaagcttcatctgtcatactctcgtcatactgatctgaatgtgaaggcacatgacgagagaagcagagactacaccgtctcggatcctagtgctcaggtacaagctgcaggtcaagcccctggtctaagcactcctggagcagcatggcaaagcaccacgcctgctgctttttatggaagctcagcaggaccgacctctatcggacaagcgccagcctggaatcctaacatgcagcgaggggcatttgcacctgcatcaacctcgtaccctacccaattattgatggcaaacccaggcccgcactttccagcagtcggatcaagctctggtgctcctccgatgttgtaccaagcttcgcagcagatggcacattatggcacagcccctgctgctctgcctcatgcagccttgtctggcgaaccgatgtacttcccaaaatgagctattcatccaatagagcagttgcctatgctttgtgcagcacctctggtcttcaatttttggaactgcactgtaatgccgatctgtttttcttggtacttgtgagacccctgtggcaaatgtacctgtctggctgttggtgcctgtaaactgcacaacaaaatggaaaattactcgagccatgtcagttcaatcc

SEQ ID NO: 14514 - protein, 413 aa, Triticum aestivum
  peptide (1)..(413): Ceres Seq. ID no. 13655435
  misc_feature (201)..(269): Pfam Name: a.k.a. RRM, RBD, or RNP domain Pfam Description: RNA recognition motif.
  misc_feature (1)..(408): NCBI GI NO: 18921326 NR Description: putative polypyrimidine tract-binding protein
  misc_feature (1)..(343): NCBI GI NO: 15232047 NR Description: polypyrimidine tract-binding protein 1
  misc_feature (1)..(330): NCBI GI NO: 11358627 NR Description: polypyrimidine tract-binding protein homolog
  misc_feature (1)..(381): NCBI GI NO: 15238677 NR Description: polypyrimidine tract-binding protein 1
  misc_feature (163)..(413): NCBI GI NO: 34912728 NR Description: putative polypyrimidine tract-binding protein
  misc_feature (1)..(131): NCBI GI NO: 34912728 NR Description: putative polypyrimidine tract-binding protein
  misc_feature (82)..(267): NCBI GI NO: 20260638 NR Description: putative polypyrimidine tract-binding protein
  misc_feature (1)..(285): NCBI GI NO: 22329999 NR Description: polypyrimidine tract-binding protein 1
  misc_feature (1)..(171): NCBI GI NO: 28949889 NR Description: polypyrimidine track-binding protein homologue
  misc_feature (196)..(292): NCBI GI NO: 16589094 NR Description: hephaestus [Drosophila melanogaster]
MCNVGANRNQAFVEFADQNQAISMVSYYASSSEPAQVRGKTVYIQYSNRQEITNNKGTGDSSGNVLLVTFEGVQPNDVSIDVIHLVFSAFGFVHKIATFEKAAGFQALIQYTDAPTALEAKNSLDGRSIPRYLLAEHVSICHLRITFSAHKDLNIKFQSHRSRDYTNPYLPVNPTAIEGITQPILGSDGKIKEPESNVLLASIENMQYAVGVDVLHTVFSSFGAVRKIAMFEKNGGMQALIQYPDITTAGVAKQALEGHCIYDGGYCKLHLSYSRHTDLNVKAHDERSRDYTVSDPSAQVQAAGQAPGLSTPGAAWQSTTPAAFYGSSAGPTSIGQAPAWNPNMQRGAFAPASTSYPTQLLMANPGPHFPAVGSSSGAPPMLYQASQQMAHYGTAPAALPHAALSGEPMYFPK

SEQ ID NO: 14515 - protein, 390 aa, Triticum aestivum
  peptide (1)..(390): Ceres Seq. ID no. 13655436
  misc_feature (178)..(246): Pfam Name: a.k.a. RRM, RBD, or RNP domain Pfam Description: RNA recognition motif.
  misc_feature (1)..(385): NCBI GI NO: 18921326 NR Description: putative polypyrimidine tract-binding protein
  misc_feature (1)..(320): NCBI GI NO: 15232047 NR Description: polypyrimidine tract-binding protein 1
  misc_feature (1)..(307): NCBI GI NO: 11358627 NR Description: polypyrimidine tract-binding protein homolog
  misc_feature (1)..(358): NCBI GI NO: 15238677 NR Description: polypyrimidine tract-binding protein 1
  misc_feature (140)..(390): NCBI GI NO: 34912728 NR Description: putative polypyrimidine tract-binding protein
  misc_feature (1)..(108): NCBI GI NO: 34912728 NR Description: putative polypyrimidine tract-binding protein
  misc_feature (59)..(244): NCBI GI NO: 20260638 NR Description: putative polypyrimidine tract-binding protein
  misc_feature (1)..(262): NCBI GI NO: 22329999 NR Description: polypyrimidine tract-binding protein 1
  misc_feature (1)..(148): NCBI GI NO: 28949889 NR Description: polypyrimidine track-binding protein homologue
  misc_feature (173)..(269): NCBI GI NO: 16589094 NR Description: hephaestus [Drosophila melanogaster]
MVSYYASSSEPAQVRGKTVYIQYSNRQEITNNKGTGDSSGNVLLVTFEGVQPNDVSIDVIHLVFSAFGFVHKIATFEKAAGFQALIQYTDAPTALEAKNSLDGRSIPRYLLAEHVSICHLRITFSAHKDLNIKFQSHRSRDYTNPYLPVNPTAIEGITQPILGSDGKIKEPESNVLLASIENMQYAVGVDVLHTVFSSFGAVRKIAMFEKNGGMQALIQYPDITTAGVAKQALEGHCIYDGGYCKLHLSYSRHTDLNVKAHDERSRDYTVSDPSAQVQAAGQAPGLSTPGAAWQSTTPAAFYGSSAGPTSIGQAPAWNPNMQRGAFAPASTSYPTQLLMANPGPHFPAVGSSSGAPPMLYQASQQMAHYGTAPAALPHAALSGEPMYFPK

SEQ ID NO: 14516 - protein, 208 aa, Triticum aestivum
  peptide (1)..(208): Ceres Seq. ID no. 13655437
  misc_feature (1)..(64): Pfam Name: a.k.a. RRM, RBD, or RNP domain Pfam Description: RNA recognition motif.
  misc_feature (1)..(203): NCBI GI NO: 18921326 NR Description: putative polypyrimidine tract-binding protein
  misc_feature (1)..(138): NCBI GI NO: 15232047 NR Description: polypyrimidine tract-binding protein 1
  misc_feature (1)..(125): NCBI GI NO: 11358627 NR Description: polypyrimidine tract-binding protein homolog
  misc_feature (1)..(176): NCBI GI NO: 15238677 NR Description: polypyrimidine tract-binding protein 1
  misc_feature (1)..(208): NCBI GI NO: 34912728 NR Description: putative polypyrimidine tract-binding protein
  misc_feature (1)..(62): NCBI GI NO: 20260638 NR Description: putative polypyrimidine tract-binding protein
  misc_feature (1)..(80): NCBI GI NO: 22329999 NR Description: polypyrimidine tract-binding protein 1
  misc_feature (1)..(87): NCBI GI NO: 16589094 NR Description: hephaestus [Drosophila melanogaster]
  misc_feature (1)..(87): NCBI GI NO: 17861972 NR Description: LD03185p [Drosophila melanogaster]
  misc_feature (1)..(87): NCBI GI NO: 17864284 NR Description: hephaestus CG31000-PC [Drosophila melanogaster]
MQYAVGVDVLHTVFSSFGAVRKIAMFEKNGGMQALIQYPDITTAGVAKQALEGHCIYDGGYCKLHLSYSRHTDLNVKAHDERSRDYTVSDPSAQVQAAGQAPGLSTPGAAWQSTTPAAFYGSSAGPTSIGQAPAWNPNMQRGAFAPASTSYPTQLLMANPGPHFPAVGSSSGAPPMLYQASQQMAHYGTAPAALPHAALSGEPMYFPK

SEQ ID NO: 14517 - DNA, 1260 bp, Triticum aestivum
  misc_feature (1)..(1260): Ceres Seq. ID no. 13598749
actccactcaatccccaaaatggggacgctgcttccgtgtcaccctacccttaccctcctccccctcctcttcgccgccgccatcgtcggcgtgcgttgcgcgccggtgtacaggccggagtacctggtggacgggaaccagctggtaaacatgcagtaccacatgggccccgtcgtgtcaggcgcgccgaccaacctgttcctcatctggtacggccggtgggaggccccggcgcaggctgtgctccgcgacttcctcgcctccctctccgctccggcgccgttccccgccgtctccgactggtgggcccgcacgccgcggctctacacggaccaatccggcgccaatgtcaccgccacattcgccatcgccggggagcactccgacgccgggtactcccacggcgcctccctgaagcggatcgacatgcagtccatcatccgcaccgccgtggtcgcgtacccggaccctctgccgctcgacccgtacaacggcgtgtacctggtgctctcctcaccggacgtgcaggtggaggagttctgccgcgccatgtgcggcttccactacttcaccttcgcgtccgtggtcggggtcaccgtcccgtacgcgtgggtcgggaacagcggctcgcagtgcccagggaggtgtgcgtatccgttcgccgcgccggagtacggcgccagcgggcagggggtgctgcggccgccgaacggcgaccccggggtggacgggatggtgatcgtgctggggcacgagcttgcggagctggccaccaacccgctggtgaacgcgtggtacgccggtgacacgccaacggcgcccacggagatcgccgacctctgtctcggggtctacggcgacggcggtggagcaggcgggttcgtcgggaatgtctcccacgcagccgacggcagctcctacaacgtgaacggcgtcaacggtcggcggttcctggtgcagtggctctggaaccccgtcctcggcgcgtgctacggacccaactccagcaactgaagccgctcttctcttccccggatccgtggcttctctcagttgatgccattgcgctggatggcgttgcagaggcaggaatggcaagtccatggatggatgggtacgacatgccatgatatccagatactgaatgtctgaaatgtcattcagactcgatctgttccttatttgttggcccagggtttgcgataggtttatggattttgatagatctgtatctgtgaggacaagatgcaaatttttgc

SEQ ID NO: 14518 - protein, 337 aa, Triticum aestivum
  peptide (1)..(337): Ceres Seq. ID no. 13598750
  misc_feature (51)..(334): Pfam Name: Pfam Description:  Phosphate-induced protein 1 conserved region
  misc_feature (17)..(337): NCBI GI NO: 34901824 NR Description: putative phi-1(phosphate-induced protein 1)
  misc_feature (46)..(335): NCBI GI NO: 18398352 NR Description: expressed protein [Arabidopsis thaliana]
  misc_feature (46)..(335): NCBI GI NO: 21594010 NR Description: unknown [Arabidopsis thaliana]
  misc_feature (16)..(337): NCBI GI NO: 25408357 NR Description: hypothetical protein At2g35150
  misc_feature (46)..(337): NCBI GI NO: 18403760 NR Description: expressed protein [Arabidopsis thaliana]
  misc_feature (46)..(335): NCBI GI NO: 11875173 NR Description: contains ESTsC27834
  misc_feature (11)..(335): NCBI GI NO: 16604527 NR Description: AT5g51550/K17N15_10 [Arabidopsis thaliana]
  misc_feature (11)..(335): NCBI GI NO: 15242118 NR Description: expressed protein [Arabidopsis thaliana]
  misc_feature (11)..(335): NCBI GI NO: 21592873 NR Description: unknown [Arabidopsis thaliana]
  misc_feature (22)..(330): NCBI GI NO: 15219504 NR Description: phosphate-induced (phi-1) protein -related
LHSIPKMGTLLPCHPTLTLLPLLFAAAIVGVRCAPVYRPEYLVDGNQLVNMQYHMGPVVSGAPTNLFLIWYGRWEAPAQAVLRDFLASLSAPAPFPAVSDWWARTPRLYTDQSGANVTATFAIAGEHSDAGYSHGASLKRIDMQSIIRTAVVAYPDPLPLDPYNGVYLVLSSPDVQVEEFCRAMCGFHYFTFASVVGVTVPYAWVGNSGSQCPGRCAYPFAAPEYGASGQGVLRPPNGDPGVDGMVIVLGHELAELATNPLVNAWYAGDTPTAPTEIADLCLGVYGDGGGAGGFVGNVSHAADGSSYNVNGVNGRRFLVQWLWNPVLGACYGPNSSN

SEQ ID NO: 14519 - protein, 331 aa, Triticum aestivum
  peptide (1)..(331): Ceres Seq. ID no. 13598751
  misc_feature (45)..(328): Pfam Name: Pfam Description:  Phosphate-induced protein 1 conserved region
  misc_feature (11)..(331): NCBI GI NO: 34901824 NR Description: putative phi-1(phosphate-induced protein 1)
  misc_feature (40)..(329): NCBI GI NO: 18398352 NR Description: expressed protein [Arabidopsis thaliana]
  misc_feature (40)..(329): NCBI GI NO: 21594010 NR Description: unknown [Arabidopsis thaliana]
  misc_feature (10)..(331): NCBI GI NO: 25408357 NR Description: hypothetical protein At2g35150
  misc_feature (40)..(331): NCBI GI NO: 18403760 NR Description: expressed protein [Arabidopsis thaliana]
  misc_feature (40)..(329): NCBI GI NO: 11875173 NR Description: contains ESTsC27834
  misc_feature (5)..(329): NCBI GI NO: 16604527 NR Description: AT5g51550/K17N15_10 [Arabidopsis thaliana]
  misc_feature (5)..(329): NCBI GI NO: 15242118 NR Description: expressed protein [Arabidopsis thaliana]
  misc_feature (5)..(329): NCBI GI NO: 21592873 NR Description: unknown [Arabidopsis thaliana]
  misc_feature (16)..(324): NCBI GI NO: 15219504 NR Description: phosphate-induced (phi-1) protein -related
MGTLLPCHPTLTLLPLLFAAAIVGVRCAPVYRPEYLVDGNQLVNMQYHMGPVVSGAPTNLFLIWYGRWEAPAQAVLRDFLASLSAPAPFPAVSDWWARTPRLYTDQSGANVTATFAIAGEHSDAGYSHGASLKRIDMQSIIRTAVVAYPDPLPLDPYNGVYLVLSSPDVQVEEFCRAMCGFHYFTFASVVGVTVPYAWVGNSGSQCPGRCAYPFAAPEYGASGQGVLRPPNGDPGVDGMVIVLGHELAELATNPLVNAWYAGDTPTAPTEIADLCLGVYGDGGGAGGFVGNVSHAADGSSYNVNGVNGRRFLVQWLWNPVLGACYGPNSSN

SEQ ID NO: 14520 - protein, 287 aa, Triticum aestivum
  peptide (1)..(287): Ceres Seq. ID no. 13598752
  misc_feature (1)..(284): Pfam Name: Pfam Description:  Phosphate-induced protein 1 conserved region
  misc_feature (1)..(287): NCBI GI NO: 34901824 NR Description: putative phi-1(phosphate-induced protein 1)
  misc_feature (1)..(285): NCBI GI NO: 18398352 NR Description: expressed protein [Arabidopsis thaliana]
  misc_feature (1)..(285): NCBI GI NO: 21594010 NR Description: unknown [Arabidopsis thaliana]
  misc_feature (1)..(287): NCBI GI NO: 25408357 NR Description: hypothetical protein At2g35150
  misc_feature (1)..(287): NCBI GI NO: 18403760 NR Description: expressed protein [Arabidopsis thaliana]
  misc_feature (1)..(285): NCBI GI NO: 11875173 NR Description: contains ESTsC27834
  misc_feature (1)..(285): NCBI GI NO: 16604527 NR Description: AT5g51550/K17N15_10 [Arabidopsis thaliana]
  misc_feature (1)..(285): NCBI GI NO: 15242118 NR Description: expressed protein [Arabidopsis thaliana]
  misc_feature (1)..(285): NCBI GI NO: 21592873 NR Description: unknown [Arabidopsis thaliana]
  misc_feature (1)..(280): NCBI GI NO: 15219504 NR Description: phosphate-induced (phi-1) protein -related
MQYHMGPVVSGAPTNLFLIWYGRWEAPAQAVLRDFLASLSAPAPFPAVSDWWARTPRLYTDQSGANVTATFAIAGEHSDAGYSHGASLKRIDMQSIIRTAVVAYPDPLPLDPYNGVYLVLSSPDVQVEEFCRAMCGFHYFTFASVVGVTVPYAWVGNSGSQCPGRCAYPFAAPEYGASGQGVLRPPNGDPGVDGMVIVLGHELAELATNPLVNAWYAGDTPTAPTEIADLCLGVYGDGGGAGGFVGNVSHAADGSSYNVNGVNGRRFLVQWLWNPVLGACYGPNSSN

SEQ ID NO: 14521 - DNA, 1251 bp, Triticum aestivum
  misc_feature (1)..(1251): Ceres Seq. ID no. 12618555
attcccactttactccagcaatcttgtgctctcttctaattttatctcggttgctcggtattgattcaccgtctcctccttccagggcgcagcgcttgctcgtttcatctctcgtgccatgccacaggtagcacagtacaagatcgcgctgtgccagctgcctgtcaccgcggacaagcacggcaacatcgcccgcgcgcgcgcccgcatcgacgccgccgcggccgccggcgccaagctcgtcgtcctgccggaaatatggaactgcccctacgcgatggagaccatgccgagctacgccgaggacatcgacggcggccggtcgccgtcggtctcgatgctgtcggaggtggccgctgccaggaagatcaccatcgtcggcggatccgtgcccgagatggcgtcggggcagctgttcaacacctgctgcgtggtcggtcccgacggagagatcaaggccaagcacaggaagctgcatctgtttggaattgacatccccggagacatcactttcagggaatccgataccttcactgctgggcaagaacccaccgtggttgacacagatgttggacggattggtattgggatttgtcatgatatccggttcccagaactggcaatgctgtatcgatcaagaggtgcacacttgatatgctacccttctgcatttaacatgagcaccgggcagctcctctgggaccttatgcagaagtccagggctgttgacaatcagctgttcgtggcgacctgctcacctgcgcgagaccccaactcgccgtcggaattcgtggtctggggcaactcaagcctcatcgcaccatttggcgaggttcttgcggcggcagggcacgaggacgcgaccgtcatcggcgagatcgacctgtctttggttgaagctgtaagggcgaacctccctttggaaacgcagggtagaggggatctgtacaggctgatcgatgtccagagggaacgttcgagctagctgcgttgctcgaggagatggaaatgcagcgcacagagctgaagaaggccacgtctgcatgtgttggtcacatgctaggttcagtaagacactaagactgtaaggggtttgcaaaattgtgtagcggcatgcaaagattcgggatgccataatactgtatccttgtactgcatttgttttcttattacagtgaactaaaagtagatgtggatttgagtagtccggattctgctaaaacccggttactagtaggttttccctttttg

SEQ ID NO: 14522 - protein, 288 aa, Triticum aestivum
  peptide (1)..(288): Ceres Seq. ID no. 12618556
  misc_feature (2)..(284): NCBI GI NO: 22326744 NR Description: putative protein; protein id: At5g12040
  misc_feature (2)..(284): NCBI GI NO: 11357420 NR Description: hypothetical protein F14F18
  misc_feature (31)..(206): NCBI GI NO: 18390107 NR Description: putative protein NP_196765.1 [Sorghum bicolor]
  misc_feature (236)..(263): NCBI GI NO: 18390107 NR Description: putative protein NP_196765.1 [Sorghum bicolor]
  misc_feature (4)..(277): NCBI GI NO: 9910460 NR Description: Nit protein 2 [Homo sapiens]
  misc_feature (4)..(277): NCBI GI NO: 18088311 NR Description: Nit protein 2 [Homo sapiens]
  misc_feature (4)..(277): NCBI GI NO: 34868007 NR Description: similar to Nit protein 2 [Rattus norvegicus]
  misc_feature (4)..(277): NCBI GI NO: 12963555 NR Description: Nit protein 2 [Mus musculus]
  misc_feature (7)..(277): NCBI GI NO: 19115066 NR Description: putative amidohydrolase
  misc_feature (8)..(277): NCBI GI NO: 40743456 NR Description: hypothetical protein AN5486.2
MPQVAQYKIALCQLPVTADKHGNIARARARIDAAAAAGAKLVVLPEIWNCPYAMETMPSYAEDIDGGRSPSVSMLSEVAAARKITIVGGSVPEMASGQLFNTCCVVGPDGEIKAKHRKLHLFGIDIPGDITFRESDTFTAGQEPTVVDTDVGRIGIGICHDIRFPELAMLYRSRGAHLICYPSAFNMSTGQLLWDLMQKSRAVDNQLFVATCSPARDPNSPSEFVVWGNSSLIAPFGEVLAAAGHEDATVIGEIDLSLVEAVRANLPLETQGRGDLYRLIDVQRERSS

SEQ ID NO: 14523 - protein, 235 aa, Triticum aestivum
  peptide (1)..(235): Ceres Seq. ID no. 12618557
  misc_feature (1)..(231): NCBI GI NO: 22326744 NR Description: putative protein; protein id: At5g12040
  misc_feature (1)..(231): NCBI GI NO: 11357420 NR Description: hypothetical protein F14F18
  misc_feature (1)..(153): NCBI GI NO: 18390107 NR Description: putative protein NP_196765.1 [Sorghum bicolor]
  misc_feature (183)..(210): NCBI GI NO: 18390107 NR Description: putative protein NP_196765.1 [Sorghum bicolor]
  misc_feature (1)..(224): NCBI GI NO: 9910460 NR Description: Nit protein 2 [Homo sapiens]
  misc_feature (1)..(224): NCBI GI NO: 18088311 NR Description: Nit protein 2 [Homo sapiens]
  misc_feature (1)..(224): NCBI GI NO: 34868007 NR Description: similar to Nit protein 2 [Rattus norvegicus]
  misc_feature (1)..(224): NCBI GI NO: 12963555 NR Description: Nit protein 2 [Mus musculus]
  misc_feature (1)..(224): NCBI GI NO: 19115066 NR Description: putative amidohydrolase
  misc_feature (1)..(224): NCBI GI NO: 40743456 NR Description: hypothetical protein AN5486.2
METMPSYAEDIDGGRSPSVSMLSEVAAARKITIVGGSVPEMASGQLFNTCCVVGPDGEIKAKHRKLHLFGIDIPGDITFRESDTFTAGQEPTVVDTDVGRIGIGICHDIRFPELAMLYRSRGAHLICYPSAFNMSTGQLLWDLMQKSRAVDNQLFVATCSPARDPNSPSEFVVWGNSSLIAPFGEVLAAAGHEDATVIGEIDLSLVEAVRANLPLETQGRGDLYRLIDVQRERSS

SEQ ID NO: 14524 - protein, 232 aa, Triticum aestivum
  peptide (1)..(232): Ceres Seq. ID no. 12618558
  misc_feature (1)..(228): NCBI GI NO: 22326744 NR Description: putative protein; protein id: At5g12040
  misc_feature (1)..(228): NCBI GI NO: 11357420 NR Description: hypothetical protein F14F18
  misc_feature (1)..(150): NCBI GI NO: 18390107 NR Description: putative protein NP_196765.1 [Sorghum bicolor]
  misc_feature (180)..(207): NCBI GI NO: 18390107 NR Description: putative protein NP_196765.1 [Sorghum bicolor]
  misc_feature (1)..(221): NCBI GI NO: 9910460 NR Description: Nit protein 2 [Homo sapiens]
  misc_feature (1)..(221): NCBI GI NO: 18088311 NR Description: Nit protein 2 [Homo sapiens]
  misc_feature (1)..(221): NCBI GI NO: 34868007 NR Description: similar to Nit protein 2 [Rattus norvegicus]
  misc_feature (1)..(221): NCBI GI NO: 12963555 NR Description: Nit protein 2 [Mus musculus]
  misc_feature (1)..(221): NCBI GI NO: 19115066 NR Description: putative amidohydrolase
  misc_feature (1)..(221): NCBI GI NO: 40743456 NR Description: hypothetical protein AN5486.2
MPSYAEDIDGGRSPSVSMLSEVAAARKITIVGGSVPEMASGQLFNTCCVVGPDGEIKAKHRKLHLFGIDIPGDITFRESDTFTAGQEPTVVDTDVGRIGIGICHDIRFPELAMLYRSRGAHLICYPSAFNMSTGQLLWDLMQKSRAVDNQLFVATCSPARDPNSPSEFVVWGNSSLIAPFGEVLAAAGHEDATVIGEIDLSLVEAVRANLPLETQGRGDLYRLIDVQRERSS

SEQ ID NO: 14525 - DNA, 1489 bp, Triticum aestivum
  misc_feature (1)..(1489): Ceres Seq. ID no. 12618461
atcagggggtttttggttgccagggttcggagttcggtacacagatcggaagggtctagaagcttctggtggtgacgatggcggtcctcgcgaggtcggccgccgccgtggctgcgctcgcgctcgcgctgctcgtgtcggccgtcgccggcgaggtcttcttccaggagaagttcgacgatggatgggaggatcggtgggtcaagtcggagtggaagaaggaggacaacacggccggcgagtggaaccacacctccggcaaatggaacggagacgctgacgacaaaggcatccagacgtcggaggactacaggttctacgccatctcggcgcagtacccggagttgaggaacaaggacaagaccctggtgctgcagttctccgtcaagcacgagcaggacctcgactgcggcggcggctacatcaagctcctccccgccgacgtcgaccagaagaagttcggcggtgagaccccatacagcatcatgttcgggccggacatctgcgggtacgccaccaagaaggtgcacgcgatcctcaccaagaacggcaagaaccatctgatcaagaaggaggtgccctgcgagacggaccaactcacgcacgtctacaccttgatcttccggcccgacgccacgtacagcatcctcatcgacaacgtcgagaagcagtccggcagcgtctacgatgactgggacatccttcctgccaagaagaagagggatcctaatgccaagaagccagaggactgggaggacgaggagttccttcctgaccccgaggacaagaagccagaggggtatgatgacattcccaaggaaatcactgaacctgatgcaacgaagcctgaggactgggatgatgaggaagatggtgaatggacagctccaaccatcccaaacccggagtacaagggaccatggatccaaaagaaaatcaagaaccctaatttcaagggaaaatggaaggcacctttgatcgacaacccagagtacaaggacgatccttacatctacgcttttgacagcctgaagcacattggcattgagctgtggcaggttaaatcaggaactctgttcgacaacatcctgatcactgatgaccctgagtacgccaagaagttcgcggaggagacctggggcaagcacaaggatgctgagaaggccgcctttgatgaggccgagaagaagaggcttgaggaggaatccgcaaacactaagaccgaagacaatgacgatgcagctgatcaggaggatgagggcaaagctgccggcgccagcgatgaggagaacaaggatgcctccggcgatgaggaaattagcaaggatgcttcttcttcttccgacaagaaggacgagctttagagtgtggcaggcaggctctgtatctaaactttttcctcttgaggcagtagagcttcccatccagcaattagaagaacattttctctgaaagatgacagaagaagtaatgcaatctcggctcttgt

SEQ ID NO: 14526 - protein, 428 aa, Triticum aestivum
  peptide (1)..(428): Ceres Seq. ID no. 12618462
  misc_feature (27)..(339): Pfam Name: Pfam Description:  Calreticulin family
  misc_feature (1)..(428): NCBI GI NO: 2119370 NR Description: calreticulin precursor - maize
  misc_feature (11)..(428): NCBI GI NO: 7441498 NR Description: calreticulin - barley (fragment)
  misc_feature (1)..(428): NCBI GI NO: 11131840 NR Description: Calreticulin precursor
  misc_feature (20)..(428): NCBI GI NO: 7441499 NR Description: calreticulin - barley (fragment)
  misc_feature (1)..(428): NCBI GI NO: 11131838 NR Description: Calreticulin precursor
  misc_feature (1)..(413): NCBI GI NO: 11131949 NR Description: Calreticulin precursor
  misc_feature (1)..(428): NCBI GI NO: 11131904 NR Description: Calreticulin precursor
  misc_feature (17)..(414): NCBI GI NO: 11131769 NR Description: Calreticulin precursor
  misc_feature (13)..(428): NCBI GI NO: 15223517 NR Description: calreticulin (crt1); protein id: At1g56340
  misc_feature (13)..(428): NCBI GI NO: 11131745 NR Description: Calreticulin precursor
MAVLARSAAAVAALALALLVSAVAGEVFFQEKFDDGWEDRWVKSEWKKEDNTAGEWNHTSGKWNGDADDKGIQTSEDYRFYAISAQYPELRNKDKTLVLQFSVKHEQDLDCGGGYIKLLPADVDQKKFGGETPYSIMFGPDICGYATKKVHAILTKNGKNHLIKKEVPCETDQLTHVYTLIFRPDATYSILIDNVEKQSGSVYDDWDILPAKKKRDPNAKKPEDWEDEEFLPDPEDKKPEGYDDIPKEITEPDATKPEDWDDEEDGEWTAPTIPNPEYKGPWIQKKIKNPNFKGKWKAPLIDNPEYKDDPYIYAFDSLKHIGIELWQVKSGTLFDNILITDDPEYAKKFAEETWGKHKDAEKAAFDEAEKKRLEEESANTKTEDNDDAADQEDEGKAAGASDEENKDASGDEEISKDASSSSDKKDEL

SEQ ID NO: 14527 - protein, 292 aa, Triticum aestivum
  peptide (1)..(292): Ceres Seq. ID no. 12618463
  misc_feature (1)..(203): Pfam Name: Pfam Description:  Calreticulin family
  misc_feature (1)..(292): NCBI GI NO: 2119370 NR Description: calreticulin precursor - maize
  misc_feature (1)..(292): NCBI GI NO: 7441498 NR Description: calreticulin - barley (fragment)
  misc_feature (1)..(292): NCBI GI NO: 11131840 NR Description: Calreticulin precursor
  misc_feature (1)..(292): NCBI GI NO: 7441499 NR Description: calreticulin - barley (fragment)
  misc_feature (1)..(292): NCBI GI NO: 11131838 NR Description: Calreticulin precursor
  misc_feature (1)..(277): NCBI GI NO: 11131949 NR Description: Calreticulin precursor
  misc_feature (1)..(292): NCBI GI NO: 11131904 NR Description: Calreticulin precursor
  misc_feature (1)..(278): NCBI GI NO: 11131769 NR Description: Calreticulin precursor
  misc_feature (1)..(292): NCBI GI NO: 15223517 NR Description: calreticulin (crt1); protein id: At1g56340
  misc_feature (1)..(292): NCBI GI NO: 11131745 NR Description: Calreticulin precursor
MFGPDICGYATKKVHAILTKNGKNHLIKKEVPCETDQLTHVYTLIFRPDATYSILIDNVEKQSGSVYDDWDILPAKKKRDPNAKKPEDWEDEEFLPDPEDKKPEGYDDIPKEITEPDATKPEDWDDEEDGEWTAPTIPNPEYKGPWIQKKIKNPNFKGKWKAPLIDNPEYKDDPYIYAFDSLKHIGIELWQVKSGTLFDNILITDDPEYAKKFAEETWGKHKDAEKAAFDEAEKKRLEEESANTKTEDNDDAADQEDEGKAAGASDEENKDASGDEEISKDASSSSDKKDEL

SEQ ID NO: 14528 - DNA, 846 bp, Triticum aestivum
  misc_feature (1)..(846): Ceres Seq. ID no. 13585022
ctcaactcaaaccaccggcattagtcactcctcttcactccaaaccagcgagtaacactccaaacagccaatggcgttccccaagcccctggcggctctcctcctcgccgtggcgctggcagcgactgccatgtccgccgccggtcaggatccccaaaactgcaagccgagccgcaaggtgacggtgcagaacctgtgcggcaaggacctttacctcggcatcgagccgctggccaacagcaagctcctctacagccctggctacctgctccgccacggcacccacgtgtcgtacgacgtgtgctcgtggacggggcgcgtgaaggtgcaggacgccgtggtgacggagtttcacatcgggtacgacggcggggcgtggtaccaggtgagcaccgaccagtcccacatgcccatccgtgtctccatcaccccccacggccaccccctgaaagaccactgccccaccgccggctgcaacagcggtggccactgcttcgagcactccgtccccggcggcaagtgccacggcgtcgacgagatcaagatcgtcttctacaacccctagatccagctgctgggcgtgtttaataagtttgcagctcggtgatcttagtcgtattgcagctgctagtcagtgaatcatctgctccaacgagctattgtcgtgtcgtgtcgtgtcgatttactgttcaattagtagttgcggtggtgaatgtgtggctagagatgtttcatagccgtgcaatgaactgcatgtcgtcagctctgtatccgtcgttggtgtgttgtgtgttttctagtttataaatccgatttaaaatgtggctgggtcaccgaactgatgtc

SEQ ID NO: 14529 - protein, 164 aa, Triticum aestivum
  peptide (1)..(164): Ceres Seq. ID no. 13585023
  misc_feature (1)..(164): NCBI GI NO: 13194668 NR Description: unknown [Pennisetum ciliare]
MAFPKPLAALLLAVALAATAMSAAGQDPQNCKPSRKVTVQNLCGKDLYLGIEPLANSKLLYSPGYLLRHGTHVSYDVCSWTGRVKVQDAVVTEFHIGYDGGAWYQVSTDQSHMPIRVSITPHGHPLKDHCPTAGCNSGGHCFEHSVPGGKCHGVDEIKIVFYNP

SEQ ID NO: 14530 - protein, 144 aa, Triticum aestivum
  peptide (1)..(144): Ceres Seq. ID no. 13585024
  misc_feature (1)..(144): NCBI GI NO: 13194668 NR Description: unknown [Pennisetum ciliare]
MSAAGQDPQNCKPSRKVTVQNLCGKDLYLGIEPLANSKLLYSPGYLLRHGTHVSYDVCSWTGRVKVQDAVVTEFHIGYDGGAWYQVSTDQSHMPIRVSITPHGHPLKDHCPTAGCNSGGHCFEHSVPGGKCHGVDEIKIVFYNP

SEQ ID NO: 14531 - DNA, 1363 bp, Triticum aestivum
  misc_feature (1)..(1363): Ceres Seq. ID no. 12616314
aaaaacaagcacaaccggaaattctccacccagcaactcacacggtcacactccctcgcgctcacatcaaaacagcgagagaacgcgccgccgccgtggaccacgcaccgctcgacagccgataatgctcctcctcttcgcgctcctcgccggcgccggcgccgccgccttcctcctcttcaagttcgccaccgccgacggagatttcaccctcttgtcgtgcggccgggcgcggcgggacaaagtggacggcaaggttgtatggatcacgggagcgagccgtgggattggggaggttctttcgatgcagtttgcgagtttaggagcaaagctcatactatctgcacgtaacaaggaggagcttgagagagtgaaacgtaacatcatcagcaagcatccagatagcaaagttgaagtgttacctatggatttatcatctgatgaagaatctctgaaagaagttgtacattcagcggaatcactcttttccagtgcaggcattgactatatgatgcacaatgcggcctttgagcgtccaaaaaggggggccctggaagaaactgaggaaggtcttaaggctacttttcatgtcaatgtctttggaacaattactttgactcgccttcttgcacctttcatgttggatagagggatgggtcattttgttgtgatgagtagtgcagctggaaaggtgcccacacctggtcaggctctttactctgcttccaaacatgctctcaatggctactttgcttctctgcgctctgagttatgtacgaaaggcattaaggtcactgttgtctgtcctggacctattgaaacaccagtaccttctggtgcaacttcttcatcacaaaggcattcatccgagaaacgtgtttcagtggaaagatgtgctgaactgacaatagttgccgcaactcatggactaaaagaagcatggatatcatatcagcctgtgctggctgttatgtacgtggtgcaatacatgccaacaattggatggtggcttatggacaaggttggtgcgaagcgagtggatgctgctgcaaagaagggcaacgcctacagttggaatctcctcttcggtggcaaaaagtcggcttgacaatgaagttgctcattacgcctacagttggaatctcattgagattctgaaatagtcatacacatctatctatatagattatgaaccttgtcaccctttttcatctttatgtgcgaaatgaccaacgggaagcaagcactccttgtaatgtcacctagtcagcgagttgaagtattttataactcagatacaagtcagcattccagcttcgcatttccacaaaagaataaatcatgcaagatggatgactatttt

SEQ ID NO: 14532 - protein, 368 aa, Triticum aestivum
  peptide (1)..(368): Ceres Seq. ID no. 12616315
  misc_feature (41)..(365): NCBI GI NO: 30678824 NR Description: short-chain dehydrogenase/reductase family protein
  misc_feature (41)..(307): NCBI GI NO: 6017123 NR Description: unknown protein [Arabidopsis thaliana]
  misc_feature (288)..(365): NCBI GI NO: 6017123 NR Description: unknown protein [Arabidopsis thaliana]
  misc_feature (43)..(347): NCBI GI NO: 7706318 NR Description: CGI-86 protein [Homo sapiens]
  misc_feature (43)..(346): NCBI GI NO: 34865424 NR Description: similar to retinal short-chaindehydrogenase/reductase 4
  misc_feature (86)..(347): NCBI GI NO: 6318548 NR Description: retinal short-chain dehydrogenase/ reductase retSDR4
  misc_feature (41)..(346): NCBI GI NO: 34395851 NR Description: Retinal short-chain dehydrogenase/ reductase 4precursor
  misc_feature (86)..(346): NCBI GI NO: 21313492 NR Description: RIKEN cDNA 2310016E22 [Mus musculus]
  misc_feature (42)..(342): NCBI GI NO: 34865689 NR Description: similar to CGI-86 protein [Rattus norvegicus]
  misc_feature (79)..(352): NCBI GI NO: 21358495 NR Description: CG7601-PA [Drosophila melanogaster]
KTSTTGNSPPSNSHGHTPSRSHQNSERTRRRRGPRTARQPIMLLLFALLAGAGAAAFLLFKFATADGDFTLLSCGRARRDKVDGKVVWITGASRGIGEVLSMQFASLGAKLILSARNKEELERVKRNIISKHPDSKVEVLPMDLSSDEESLKEVVHSAESLFSSAGIDYMMHNAAFERPKRGALEETEEGLKATFHVNVFGTITLTRLLAPFMLDRGMGHFVVMSSAAGKVPTPGQALYSASKHALNGYFASLRSELCTKGIKVTVVCPGPIETPVPSGATSSSQRHSSEKRVSVERCAELTIVAATHGLKEAWISYQPVLAVMYVVQYMPTIGWWLMDKVGAKRVDAAAKKGNAYSWNLLFGGKKSA

SEQ ID NO: 14533 - protein, 327 aa, Triticum aestivum
  peptide (1)..(327): Ceres Seq. ID no. 12616316
  misc_feature (1)..(324): NCBI GI NO: 30678824 NR Description: short-chain dehydrogenase/reductase family protein
  misc_feature (1)..(266): NCBI GI NO: 6017123 NR Description: unknown protein [Arabidopsis thaliana]
  misc_feature (247)..(324): NCBI GI NO: 6017123 NR Description: unknown protein [Arabidopsis thaliana]
  misc_feature (2)..(306): NCBI GI NO: 7706318 NR Description: CGI-86 protein [Homo sapiens]
  misc_feature (2)..(305): NCBI GI NO: 34865424 NR Description: similar to retinal short-chaindehydrogenase/reductase 4
  misc_feature (45)..(306): NCBI GI NO: 6318548 NR Description: retinal short-chain dehydrogenase/ reductase retSDR4
  misc_feature (1)..(305): NCBI GI NO: 34395851 NR Description: Retinal short-chain dehydrogenase/ reductase 4precursor
  misc_feature (45)..(305): NCBI GI NO: 21313492 NR Description: RIKEN cDNA 2310016E22 [Mus musculus]
  misc_feature (1)..(301): NCBI GI NO: 34865689 NR Description: similar to CGI-86 protein [Rattus norvegicus]
  misc_feature (38)..(311): NCBI GI NO: 21358495 NR Description: CG7601-PA [Drosophila melanogaster]
MLLLFALLAGAGAAAFLLFKFATADGDFTLLSCGRARRDKVDGKVVWITGASRGIGEVLSMQFASLGAKLILSARNKEELERVKRNIISKHPDSKVEVLPMDLSSDEESLKEVVHSAESLFSSAGIDYMMHNAAFERPKRGALEETEEGLKATFHVNVFGTITLTRLLAPFMLDRGMGHFVVMSSAAGKVPTPGQALYSASKHALNGYFASLRSELCTKGIKVTVVCPGPIETPVPSGATSSSQRHSSEKRVSVERCAELTIVAATHGLKEAWISYQPVLAVMYVVQYMPTIGWWLMDKVGAKRVDAAAKKGNAYSWNLLFGGKKSA

SEQ ID NO: 14534 - protein, 267 aa, Triticum aestivum
  peptide (1)..(267): Ceres Seq. ID no. 12616317
  misc_feature (1)..(264): NCBI GI NO: 30678824 NR Description: short-chain dehydrogenase/reductase family protein
  misc_feature (1)..(206): NCBI GI NO: 6017123 NR Description: unknown protein [Arabidopsis thaliana]
  misc_feature (187)..(264): NCBI GI NO: 6017123 NR Description: unknown protein [Arabidopsis thaliana]
  misc_feature (1)..(246): NCBI GI NO: 7706318 NR Description: CGI-86 protein [Homo sapiens]
  misc_feature (1)..(245): NCBI GI NO: 34865424 NR Description: similar to retinal short-chaindehydrogenase/reductase 4
  misc_feature (1)..(246): NCBI GI NO: 6318548 NR Description: retinal short-chain dehydrogenase/ reductase retSDR4
  misc_feature (1)..(245): NCBI GI NO: 34395851 NR Description: Retinal short-chain dehydrogenase/ reductase 4precursor
  misc_feature (1)..(245): NCBI GI NO: 21313492 NR Description: RIKEN cDNA 2310016E22 [Mus musculus]
  misc_feature (1)..(241): NCBI GI NO: 34865689 NR Description: similar to CGI-86 protein [Rattus norvegicus]
  misc_feature (1)..(251): NCBI GI NO: 21358495 NR Description: CG7601-PA [Drosophila melanogaster]
MQFASLGAKLILSARNKEELERVKRNIISKHPDSKVEVLPMDLSSDEESLKEVVHSAESLFSSAGIDYMMHNAAFERPKRGALEETEEGLKATFHVNVFGTITLTRLLAPFMLDRGMGHFVVMSSAAGKVPTPGQALYSASKHALNGYFASLRSELCTKGIKVTVVCPGPIETPVPSGATSSSQRHSSEKRVSVERCAELTIVAATHGLKEAWISYQPVLAVMYVVQYMPTIGWWLMDKVGAKRVDAAAKKGNAYSWNLLFGGKKSA

SEQ ID NO: 14535 - DNA, 1526 bp, Triticum aestivum
  misc_feature (1)..(1526): Ceres Seq. ID no. 13655442
acatcctaatcgaaaaaccacacacgagcacccgccggagccgatcgaccgagagccgccgcgcgcgcagctcagctcagccccgccgcctcccctcctcctccaccgcgccgcattcctctcccgcgcgcaggcagggggagatccgcctccctggcccgatggcgccgtcgcggccgctgatgcgcggggcgggcccgccgcgggtcttcggctccgggcgcgccggccgggcatcgccgtacgcgctcgcgctcgccgcgctgctcctcgcctccgccttcctcctcgccctcatcgccttcggcgtcttctcgctccccgtctcctcccccgcgctccccaccaccggcgccgagaccgagtcgtccggcgacggcggggccgcggagtccgatgcctccggcggctcctcccgcgccgcgcgcagccgcgcccgccgcgacctcagcgaggggctgggcgagcgcggcgcgcagtggacggaggtcatctcgtgggagcccagggcgttcgtctaccacaacttcctgtctaaggaagagtgtgagtacttaattggattggcgaagcctcgcatggtgaaatcaacagtggtcgacagtgagactggtaaaagcaaggacagcagggttcgtacaagttcaggcatgtttcttcaaagagggcgggacaaggttatccgggccattgaaaggaggatagcagattacaccttcatacctgcagaacatggagagggactccaagtactgcactatgaagtcgggcagaagtacgaaccccactttgattattttcttgacgagttcaacaccaagaatggtggccagaggatggcaactattctcatgtacctgtcagatgttgaagaagggggtgagactattttccccgatgcaaatgtgaacagcagttccttaccgtggtacaacgaactttcagagtgtgccagaaaaggtcttgctgtcaaaccgaagatgggagatgcgctgcttttctggagcatgaaaccagatgccactctagatccactaagtttgcacgggggctgtcctgtcatcaaagggaacaaatggtcatcaaccaagtggctgcatgttcacgagtacaaagcataggccttgtgaactcattccaaagatgacacgatctgagcatgtgacctgggctctttacatgatggctttacagttacagatccacccccattgtgttcattgcttgtggaggacatatatatacaaggagggcttcatgctggaatactgactcggcatttttcttcttcttctccctcgccgcagtgcccccagcaacttattatagaggaatgaatatgatatgatgtgatgtatgtagcgtcgggggctgtaggatccggagttccattttcggttcgtgttcttgtcctgtttgtagcactagtactataatgcagtactgatgtagcagcctcgaggtgagtcgttactgaacaataactattgaggattttgcttgtctcggcattttacacagttatt

SEQ ID NO: 14536 - protein, 372 aa, Triticum aestivum
  peptide (1)..(372): Ceres Seq. ID no. 13655443
  misc_feature (244)..(367): Pfam Name: II Pfam Description: 2OG-Fe
  misc_feature (144)..(371): NCBI GI NO: 18394842 NR Description: oxidoreductase, 2OG-Fe(II) oxygenase family
  misc_feature (144)..(371): NCBI GI NO: 21537370 NR Description: putative prolyl 4-hydroxylase, alpha subunit
  misc_feature (58)..(354): NCBI GI NO: 37535718 NR Description: putative prolyl 4-hydroxylase, alpha subunit
  misc_feature (151)..(371): NCBI GI NO: 15227885 NR Description: oxidoreductase, 2OG-Fe(II) oxygenase family
  misc_feature (151)..(371): NCBI GI NO: 21593091 NR Description: putative prolyl 4-hydroxylase, alpha subunit
  misc_feature (134)..(349): NCBI GI NO: 15239240 NR Description: oxidoreductase, 2OG-Fe(II) oxygenase family
  misc_feature (151)..(349): NCBI GI NO: 7488226 NR Description: procollagen-proline dioxygenase alpha chain homologA_TM017A05
  misc_feature (210)..(349): NCBI GI NO: 15233341 NR Description: oxidoreductase, 2OG-Fe(II) oxygenase family
  misc_feature (148)..(213): NCBI GI NO: 15233341 NR Description: oxidoreductase, 2OG-Fe(II) oxygenase family
  misc_feature (164)..(370): NCBI GI NO: 29150365 NR Description: putative oxidoreductase
ILIEKPHTSTRRSRSTESRRARSSAQPRRLPSSSTAPHSSPARRQGEIRLPGPMAPSRPLMRGAGPPRVFGSGRAGRASPYALALAALLLASAFLLALIAFGVFSLPVSSPALPTTGAETESSGDGGAAESDASGGSSRAARSRARRDLSEGLGERGAQWTEVISWEPRAFVYHNFLSKEECEYLIGLAKPRMVKSTVVDSETGKSKDSRVRTSSGMFLQRGRDKVIRAIERRIADYTFIPAEHGEGLQVLHYEVGQKYEPHFDYFLDEFNTKNGGQRMATILMYLSDVEEGGETIFPDANVNSSSLPWYNELSECARKGLAVKPKMGDALLFWSMKPDATLDPLSLHGGCPVIKGNKWSSTKWLHVHEYKA

SEQ ID NO: 14537 - protein, 319 aa, Triticum aestivum
  peptide (1)..(319): Ceres Seq. ID no. 13655444
  misc_feature (191)..(314): Pfam Name: II Pfam Description: 2OG-Fe
  misc_feature (91)..(318): NCBI GI NO: 18394842 NR Description: oxidoreductase, 2OG-Fe(II) oxygenase family
  misc_feature (91)..(318): NCBI GI NO: 21537370 NR Description: putative prolyl 4-hydroxylase, alpha subunit
  misc_feature (5)..(301): NCBI GI NO: 37535718 NR Description: putative prolyl 4-hydroxylase, alpha subunit
  misc_feature (98)..(318): NCBI GI NO: 15227885 NR Description: oxidoreductase, 2OG-Fe(II) oxygenase family
  misc_feature (98)..(318): NCBI GI NO: 21593091 NR Description: putative prolyl 4-hydroxylase, alpha subunit
  misc_feature (81)..(296): NCBI GI NO: 15239240 NR Description: oxidoreductase, 2OG-Fe(II) oxygenase family
  misc_feature (98)..(296): NCBI GI NO: 7488226 NR Description: procollagen-proline dioxygenase alpha chain homologA_TM017A05
  misc_feature (157)..(296): NCBI GI NO: 15233341 NR Description: oxidoreductase, 2OG-Fe(II) oxygenase family
  misc_feature (95)..(160): NCBI GI NO: 15233341 NR Description: oxidoreductase, 2OG-Fe(II) oxygenase family
  misc_feature (111)..(317): NCBI GI NO: 29150365 NR Description: putative oxidoreductase
MAPSRPLMRGAGPPRVFGSGRAGRASPYALALAALLLASAFLLALIAFGVFSLPVSSPALPTTGAETESSGDGGAAESDASGGSSRAARSRARRDLSEGLGERGAQWTEVISWEPRAFVYHNFLSKEECEYLIGLAKPRMVKSTVVDSETGKSKDSRVRTSSGMFLQRGRDKVIRAIERRIADYTFIPAEHGEGLQVLHYEVGQKYEPHFDYFLDEFNTKNGGQRMATILMYLSDVEEGGETIFPDANVNSSSLPWYNELSECARKGLAVKPKMGDALLFWSMKPDATLDPLSLHGGCPVIKGNKWSSTKWLHVHEYKA

SEQ ID NO: 14538 - protein, 312 aa, Triticum aestivum
  peptide (1)..(312): Ceres Seq. ID no. 13655445
  misc_feature (184)..(307): Pfam Name: II Pfam Description: 2OG-Fe
  misc_feature (84)..(311): NCBI GI NO: 18394842 NR Description: oxidoreductase, 2OG-Fe(II) oxygenase family
  misc_feature (84)..(311): NCBI GI NO: 21537370 NR Description: putative prolyl 4-hydroxylase, alpha subunit
  misc_feature (1)..(294): NCBI GI NO: 37535718 NR Description: putative prolyl 4-hydroxylase, alpha subunit
  misc_feature (91)..(311): NCBI GI NO: 15227885 NR Description: oxidoreductase, 2OG-Fe(II) oxygenase family
  misc_feature (91)..(311): NCBI GI NO: 21593091 NR Description: putative prolyl 4-hydroxylase, alpha subunit
  misc_feature (74)..(289): NCBI GI NO: 15239240 NR Description: oxidoreductase, 2OG-Fe(II) oxygenase family
  misc_feature (91)..(289): NCBI GI NO: 7488226 NR Description: procollagen-proline dioxygenase alpha chain homologA_TM017A05
  misc_feature (150)..(289): NCBI GI NO: 15233341 NR Description: oxidoreductase, 2OG-Fe(II) oxygenase family
  misc_feature (88)..(153): NCBI GI NO: 15233341 NR Description: oxidoreductase, 2OG-Fe(II) oxygenase family
  misc_feature (104)..(310): NCBI GI NO: 29150365 NR Description: putative oxidoreductase
MRGAGPPRVFGSGRAGRASPYALALAALLLASAFLLALIAFGVFSLPVSSPALPTTGAETESSGDGGAAESDASGGSSRAARSRARRDLSEGLGERGAQWTEVISWEPRAFVYHNFLSKEECEYLIGLAKPRMVKSTVVDSETGKSKDSRVRTSSGMFLQRGRDKVIRAIERRIADYTFIPAEHGEGLQVLHYEVGQKYEPHFDYFLDEFNTKNGGQRMATILMYLSDVEEGGETIFPDANVNSSSLPWYNELSECARKGLAVKPKMGDALLFWSMKPDATLDPLSLHGGCPVIKGNKWSSTKWLHVHEYKA

SEQ ID NO: 14539 - DNA, 1642 bp, Triticum aestivum
  misc_feature (1)..(1642): Ceres Seq. ID no. 15170155
agctccgcccacagggaggcaaccaagaatttaaagcggcaacaagatcgtcggcgccgccggatcctgctccgccttgttatctccgccccgtaaccacacgcccgaagctgcagccgagccgagatgcatctgagcgagaacgaggggatcgagggcgtgcggttcgtggtgacaggcgggcagggcttcgtcggcgccgccctctgcctggagctgatccgccgcggcgccctggaggtccgctccctcgacctgcgcgcctcctcctcctggtcccagcagctcctcgacgccggcgtccgcttcttccaaggggatgttcggaagaaggaggatgtggggaaggttttccgcaatgtggactgtgtcttccaccttgcttcatatggaatgtcagggaaagaaatggtacaggcaggacgaacagatgaggtcaatataaatgggacgtgcaatgtactggatgcttgccatgagcatggtgttagaaggcttgtgtatgttagcacatataatgtggtgtttgggggaaagccaattgtcaatggcagtgagacgttgccttattttcccattgaagaccatgttgatgcttatgggcgtagcaaatcgatcgctgaacagttggtgctgaagagcaatggtcggcaagctaagagtagtaaaggtactcgcctttatacatgtgcaatacgcccggctgctatctatggtccaggtgaagagcgtcatcttccaagaatcctgtctcttggaaaattgggattagcatctttcaggattgggggtccaaatgtgaagacagattgggtctatgctgataatcttgttcttgcactgatattggcaagtatgggacttttagatgacattcctggcaggaagggaactcctgtagcagctggtcaagcatacttcatatgtgatggagagcctattaatagttttgattttatcatcagtcccttgtttcgaagtttgggctatcctgtacctcgagctacactagatacctctgttgcccttgcaatttcaagaatcattttgttcatgtccacactattctatccatggttagatagtaaatggattcctcagcctcttattcttcctgctgaagtatacaaggtgggtgttacacattacttttcatatctgaaagctaaggaggaacttggctacgtgcctgtgacgagtccacaggaaggcctggccgcaacgatctcctattggcaagagcggaagaggagagagctcgatggcccgacgatattcacctgggttgcagtaatagccgggatgctggctgtgttctccgccgctttccttccacccgtcggtccgctcaaatgggtgctcgccatcaatctgttcgttttccgctcgatgctggtgatccggatagtctttgtggccgcggtcgcggcgcacgcgagtgaagccgtctacgcctggttcctggcaaagaaggtcgacccgaggaacgcgacggggtggttttggcagaccttcgccctggggttcctctccctccggtttctgctcaagagggcgagggcggggacgggaccgtgatttgtgtgttgtacttcagtaacaatggattctagtagaaattccccagaggttctaggtttgc

SEQ ID NO: 14540 - protein, 483 aa, Triticum aestivum
  peptide (1)..(483): Ceres Seq. ID no. 15170156
  misc_feature (9)..(374): Pfam Name: Pfam Description:  3-beta hydroxysteroid dehydrogenase/ isomerase family
  misc_feature (1)..(478): NCBI GI NO: 15226138 NR Description: 3-beta hydroxysteroid dehydrogenase/ isomerasefamily
  misc_feature (15)..(396): NCBI GI NO: 21553311 NR Description: NAD(P) dependent steroid dehydrogenase-like
  misc_feature (15)..(355): NCBI GI NO: 21311981 NR Description: RIKEN cDNA 4632417N05 [Mus musculus]
  misc_feature (15)..(271): NCBI GI NO: 34851797 NR Description: similar to RIKEN cDNA 4632417N05
  misc_feature (55)..(355): NCBI GI NO: 34859097 NR Description: hypothetical protein XP_219290 [Rattus norvegicus]
  misc_feature (15)..(382): NCBI GI NO: 15225272 NR Description: 3-beta hydroxysteroid dehydrogenase/ isomerasefamily
  misc_feature (15)..(374): NCBI GI NO: 18401656 NR Description: 3-beta hydroxysteroid dehydrogenase/ isomerasefamily
  misc_feature (15)..(374): NCBI GI NO: 30694041 NR Description: 3-beta hydroxysteroid dehydrogenase/ isomerasefamily
  misc_feature (8)..(384): NCBI GI NO: 31415898 NR Description: putative 3-beta hydroxysteroiddehydrogenase/isomerase
  misc_feature (8)..(384): NCBI GI NO: 31415899 NR Description: putative 3-beta hydroxysteroiddehydrogenase/isomerase
MHLSENEGIEGVRFVVTGGQGFVGAALCLELIRRGALEVRSLDLRASSSWSQQLLDAGVRFFQGDVRKKEDVGKVFRNVDCVFHLASYGMSGKEMVQAGRTDEVNINGTCNVLDACHEHGVRRLVYVSTYNVVFGGKPIVNGSETLPYFPIEDHVDAYGRSKSIAEQLVLKSNGRQAKSSKGTRLYTCAIRPAAIYGPGEERHLPRILSLGKLGLASFRIGGPNVKTDWVYADNLVLALILASMGLLDDIPGRKGTPVAAGQAYFICDGEPINSFDFIISPLFRSLGYPVPRATLDTSVALAISRIILFMSTLFYPWLDSKWIPQPLILPAEVYKVGVTHYFSYLKAKEELGYVPVTSPQEGLAATISYWQERKRRELDGPTIFTWVAVIAGMLAVFSAAFLPPVGPLKWVLAINLFVFRSMLVIRIVFVAAVAAHASEAVYAWFLAKKVDPRNATGWFWQTFALGFLSLRFLLKRARAGTGP

SEQ ID NO: 14541 - protein, 394 aa, Triticum aestivum
  peptide (1)..(394): Ceres Seq. ID no. 15170157
  misc_feature (1)..(285): Pfam Name: Pfam Description:  3-beta hydroxysteroid dehydrogenase/ isomerase family
  misc_feature (1)..(389): NCBI GI NO: 15226138 NR Description: 3-beta hydroxysteroid dehydrogenase/ isomerasefamily
  misc_feature (1)..(307): NCBI GI NO: 21553311 NR Description: NAD(P) dependent steroid dehydrogenase-like
  misc_feature (1)..(266): NCBI GI NO: 21311981 NR Description: RIKEN cDNA 4632417N05 [Mus musculus]
  misc_feature (1)..(182): NCBI GI NO: 34851797 NR Description: similar to RIKEN cDNA 4632417N05
  misc_feature (1)..(266): NCBI GI NO: 34859097 NR Description: hypothetical protein XP_219290 [Rattus norvegicus]
  misc_feature (1)..(293): NCBI GI NO: 15225272 NR Description: 3-beta hydroxysteroid dehydrogenase/ isomerasefamily
  misc_feature (1)..(285): NCBI GI NO: 18401656 NR Description: 3-beta hydroxysteroid dehydrogenase/ isomerasefamily
  misc_feature (1)..(285): NCBI GI NO: 30694041 NR Description: 3-beta hydroxysteroid dehydrogenase/ isomerasefamily
  misc_feature (1)..(295): NCBI GI NO: 31415898 NR Description: putative 3-beta hydroxysteroiddehydrogenase/isomerase
  misc_feature (1)..(295): NCBI GI NO: 31415899 NR Description: putative 3-beta hydroxysteroiddehydrogenase/isomerase
MSGKEMVQAGRTDEVNINGTCNVLDACHEHGVRRLVYVSTYNVVFGGKPIVNGSETLPYFPIEDHVDAYGRSKSIAEQLVLKSNGRQAKSSKGTRLYTCAIRPAAIYGPGEERHLPRILSLGKLGLASFRIGGPNVKTDWVYADNLVLALILASMGLLDDIPGRKGTPVAAGQAYFICDGEPINSFDFIISPLFRSLGYPVPRATLDTSVALAISRIILFMSTLFYPWLDSKWIPQPLILPAEVYKVGVTHYFSYLKAKEELGYVPVTSPQEGLAATISYWQERKRRELDGPTIFTWVAVIAGMLAVFSAAFLPPVGPLKWVLAINLFVFRSMLVIRIVFVAAVAAHASEAVYAWFLAKKVDPRNATGWFWQTFALGFLSLRFLLKRARAGTGP

SEQ ID NO: 14542 - protein, 389 aa, Triticum aestivum
  peptide (1)..(389): Ceres Seq. ID no. 15170158
  misc_feature (1)..(280): Pfam Name: Pfam Description:  3-beta hydroxysteroid dehydrogenase/ isomerase family
  misc_feature (1)..(384): NCBI GI NO: 15226138 NR Description: 3-beta hydroxysteroid dehydrogenase/ isomerasefamily
  misc_feature (1)..(302): NCBI GI NO: 21553311 NR Description: NAD(P) dependent steroid dehydrogenase-like
  misc_feature (1)..(261): NCBI GI NO: 21311981 NR Description: RIKEN cDNA 4632417N05 [Mus musculus]
  misc_feature (1)..(177): NCBI GI NO: 34851797 NR Description: similar to RIKEN cDNA 4632417N05
  misc_feature (1)..(261): NCBI GI NO: 34859097 NR Description: hypothetical protein XP_219290 [Rattus norvegicus]
  misc_feature (1)..(288): NCBI GI NO: 15225272 NR Description: 3-beta hydroxysteroid dehydrogenase/ isomerasefamily
  misc_feature (1)..(280): NCBI GI NO: 18401656 NR Description: 3-beta hydroxysteroid dehydrogenase/ isomerasefamily
  misc_feature (1)..(280): NCBI GI NO: 30694041 NR Description: 3-beta hydroxysteroid dehydrogenase/ isomerasefamily
  misc_feature (1)..(290): NCBI GI NO: 31415898 NR Description: putative 3-beta hydroxysteroiddehydrogenase/isomerase
  misc_feature (1)..(290): NCBI GI NO: 31415899 NR Description: putative 3-beta hydroxysteroiddehydrogenase/isomerase
MVQAGRTDEVNINGTCNVLDACHEHGVRRLVYVSTYNVVFGGKPIVNGSETLPYFPIEDHVDAYGRSKSIAEQLVLKSNGRQAKSSKGTRLYTCAIRPAAIYGPGEERHLPRILSLGKLGLASFRIGGPNVKTDWVYADNLVLALILASMGLLDDIPGRKGTPVAAGQAYFICDGEPINSFDFIISPLFRSLGYPVPRATLDTSVALAISRIILFMSTLFYPWLDSKWIPQPLILPAEVYKVGVTHYFSYLKAKEELGYVPVTSPQEGLAATISYWQERKRRELDGPTIFTWVAVIAGMLAVFSAAFLPPVGPLKWVLAINLFVFRSMLVIRIVFVAAVAAHASEAVYAWFLAKKVDPRNATGWFWQTFALGFLSLRFLLKRARAGTGP

SEQ ID NO: 14543 - DNA, 835 bp, Triticum aestivum
  misc_feature (1)..(835): Ceres Seq. ID no. 15174142
ccgttcgctctgtcgctcgcgtcatctcaccttccccgtcctgtggaagtcatctcctgtatcccggtaagaagaaggggtcgaaatggtgaagcacaacaatgttatccctaacggccacttcaagaagcattggcagaactatgtcaagacctggttcaaccagcctgcccgcaagcagaggcgccgcattgctcgtcaaaagaaggctgtgaagatcttccctcgccctacatctggtcctcttcgtcccattgtgcaatgccagactcggaagtacaacatgaaggcaagggctgggagaggctttacccttgaggagctgaagtcagcgggcatcccgaagaagctagctcctactattggcatttctgtggaccaccgacgtaaaaaccggtcacttgagggtatgcagtcaaacattcagcgactcaagacttacaaggccaagctggttatcttcccaaggtgtgctcacaaggttaaggctggtgattctacccctgaggaacttgccacagccacccaggtccagggtgactacttgcctattactcgtggtgagaagcgctcggttgagatcatgaaggtcactgaggagatgaaggcgttcaaggcctacggcaagctccgtgtcgagaggatgaaccagcaccagctcggtgcccgcacgaagaaggctgccgaggcagagaaggaagaaaagaagtgataagatattttgtttcattctgcagctagtgaatgttatcattgggaacttgttctaaattttgttttggggctggaaatagagaccaccggatggctttgatacctgctacttgtttgcatg

SEQ ID NO: 14544 - protein, 208 aa, Triticum aestivum
  peptide (1)..(208): Ceres Seq. ID no. 15174143
  misc_feature (6)..(185): Pfam Name: Pfam Description:  Ribosomal protein L13e
  misc_feature (1)..(208): NCBI GI NO: 34897952 NR Description: ESTs AU077873
  misc_feature (1)..(208): NCBI GI NO: 18873677 NR Description: putative cold-induced protein
  misc_feature (1)..(208): NCBI GI NO: 12580867 NR Description: 60S ribosomal protein L13E [Picea abies]
  misc_feature (2)..(208): NCBI GI NO: 15229064 NR Description: 60S ribosomal protein L13
  misc_feature (2)..(208): NCBI GI NO: 21537149 NR Description: 60S ribosomal protein L13, BBC1 protein
  misc_feature (2)..(208): NCBI GI NO: 730449 NR Description: 60S RIBOSOMAL PROTEIN L13-1
  misc_feature (2)..(208): NCBI GI NO: 7441102 NR Description: ribosomal protein L13.A, cytosolic - rape
  misc_feature (2)..(208): NCBI GI NO: 730450 NR Description: 60S RIBOSOMAL PROTEIN L13-2
  misc_feature (2)..(208): NCBI GI NO: 7441103 NR Description: ribosomal protein L13.B, cytosolic - rape
  misc_feature (1)..(208): NCBI GI NO: 34860769 NR Description: similar to 60S RIBOSOMAL PROTEIN L13
MVKHNNVIPNGHFKKHWQNYVKTWFNQPARKQRRRIARQKKAVKIFPRPTSGPLRPIVQCQTRKYNMKARAGRGFTLEELKSAGIPKKLAPTIGISVDHRRKNRSLEGMQSNIQRLKTYKAKLVIFPRCAHKVKAGDSTPEELATATQVQGDYLPITRGEKRSVEIMKVTEEMKAFKAYGKLRVERMNQHQLGARTKKAAEAEKEEKK

SEQ ID NO: 14545 - protein, 142 aa, Triticum aestivum
  peptide (1)..(142): Ceres Seq. ID no. 15174144
  misc_feature (1)..(119): Pfam Name: Pfam Description:  Ribosomal protein L13e
  misc_feature (1)..(142): NCBI GI NO: 34897952 NR Description: ESTs AU077873
  misc_feature (1)..(142): NCBI GI NO: 18873677 NR Description: putative cold-induced protein
  misc_feature (1)..(142): NCBI GI NO: 12580867 NR Description: 60S ribosomal protein L13E [Picea abies]
  misc_feature (1)..(142): NCBI GI NO: 15229064 NR Description: 60S ribosomal protein L13
  misc_feature (1)..(142): NCBI GI NO: 21537149 NR Description: 60S ribosomal protein L13, BBC1 protein
  misc_feature (1)..(142): NCBI GI NO: 730449 NR Description: 60S RIBOSOMAL PROTEIN L13-1
  misc_feature (1)..(142): NCBI GI NO: 7441102 NR Description: ribosomal protein L13.A, cytosolic - rape
  misc_feature (1)..(142): NCBI GI NO: 730450 NR Description: 60S RIBOSOMAL PROTEIN L13-2
  misc_feature (1)..(142): NCBI GI NO: 7441103 NR Description: ribosomal protein L13.B, cytosolic - rape
  misc_feature (1)..(142): NCBI GI NO: 34860769 NR Description: similar to 60S RIBOSOMAL PROTEIN L13
MKARAGRGFTLEELKSAGIPKKLAPTIGISVDHRRKNRSLEGMQSNIQRLKTYKAKLVIFPRCAHKVKAGDSTPEELATATQVQGDYLPITRGEKRSVEIMKVTEEMKAFKAYGKLRVERMNQHQLGARTKKAAEAEKEEKK

SEQ ID NO: 14546 - DNA, 1227 bp, Triticum aestivum
  misc_feature (1)..(1227): Ceres Seq. ID no. 13597233
acacaagactccaatattcagggaaccagcagcatctcaattatcaagagcggcaagagatgggatctctccccgtcccgagtgtgcaggccctggtggctgccaccggcggagacgatgtgccgctgaggtatctccggccagaggcggcagcagaggcggtcaccggcgacgccgacggcgaggctcagatccccatcatcgaccaccaaaggctgctgctggagctggaccatggcggcgaggagtctgcacgcctccacagagcctgccaggactggggtttcttccagttagttaaccacagtgtcccagacgatgtggtggagagtatgaaggccaacatccagcaattcttccagctatccgcagagacgaagaagcggttcgctcaggagcaagggcagctagaaggctacggtcaactgttcgtcgtctctgaggatcagaagctcgactgggccgacatgctcttcctctacacacagccacctgagatgaggaacaccaagttctggcctgaccagcctgctgccttcagatcggcgctggatagatattctgatgcggtgaaggatgtatcagactcccttttggctacgatggccaagaacttgggtctgaaacgagaggcgattgctgacaaatgcatccgtggaatgcagaaagtcagaataaactactacccaccatgcgcccaaccagagaaagtcgttggcttgtccccgcactctgatgctaatctcctgacacttgtcctccaagtgaatcatgtccagggcctgcagatcaagaggaacggcagctggcttcctgtcaagcccgtcccgggcgctttcgtcgtcaacatcggagatatgtttgaggtcttgacaaacgggaggtacaggagcatcgagcaccgggctgttgtcgacccgaaggaagaacggttgtcgattgcggcgttccaattcccaaacatccacaccatgataggtcctatgaaggagttgaccgcacacgaagacgatgcctacaagacattggacctcgagagcttcatgaggaccttcttctcgaccaagctcgaggggaagaacttcttggagcagatgaagctaaactagctagctagcggctgaagctgggcttgcgcgtatcatcattgagatggactcgacagtgcttgcttcagctcttctttccaatgaatggacacttctcgcaacggagttctctctcggg

SEQ ID NO: 14547 - protein, 368 aa, Triticum aestivum
  peptide (1)..(368): Ceres Seq. ID no. 15222051
  misc_feature (219)..(319): Pfam Name: II Pfam Description: 2OG-Fe
  misc_feature (20)..(366): NCBI GI NO: 34895204 NR Description: P0463A02.24
  misc_feature (18)..(368): NCBI GI NO: 37536802 NR Description: putative ethylene-forming enzyme
  misc_feature (20)..(367): NCBI GI NO: 37536804 NR Description: putative ethylene-forming enzyme
  misc_feature (22)..(367): NCBI GI NO: 37536792 NR Description: putative dioxygenase
  misc_feature (27)..(367): NCBI GI NO: 37536820 NR Description: putative ethylene-forming enzyme
  misc_feature (19)..(367): NCBI GI NO: 15219988 NR Description: oxidoreductase, 2OG-Fe(II) oxygenase family
  misc_feature (22)..(367): NCBI GI NO: 15235014 NR Description: oxidoreductase, 2OG-Fe(II) oxygenase family
  misc_feature (15)..(367): NCBI GI NO: 15219986 NR Description: oxidoreductase, 2OG-Fe(II) oxygenase family
  misc_feature (22)..(367): NCBI GI NO: 40736992 NR Description: putative oxidoreductase
  misc_feature (26)..(327): NCBI GI NO: 34898470 NR Description: ESTs D47168
TRLQYSGNQQHLNYQERQEMGSLPVPSVQALVAATGGDDVPLRYLRPEAAAEAVTGDADGEAQIPIIDHQRLLLELDHGGEESARLHRACQDWGFFQLVNHSVPDDVVESMKANIQQFFQLSAETKKRFAQEQGQLEGYGQLFVVSEDQKLDWADMLFLYTQPPEMRNTKFWPDQPAAFRSALDRYSDAVKDVSDSLLATMAKNLGLKREAIADKCIRGMQKVRINYYPPCAQPEKVVGLSPHSDANLLTLVLQVNHVQGLQIKRNGSWLPVKPVPGAFVVNIGDMFEVLTNGRYRSIEHRAVVDPKEERLSIAAFQFPNIHTMIGPMKELTAHEDDAYKTLDLESFMRTFFSTKLEGKNFLEQMKLN

SEQ ID NO: 14548 - protein, 349 aa, Triticum aestivum
  peptide (1)..(349): Ceres Seq. ID no. 15222052
  misc_feature (200)..(300): Pfam Name: II Pfam Description: 2OG-Fe
  misc_feature (1)..(347): NCBI GI NO: 34895204 NR Description: P0463A02.24
  misc_feature (1)..(349): NCBI GI NO: 37536802 NR Description: putative ethylene-forming enzyme
  misc_feature (1)..(348): NCBI GI NO: 37536804 NR Description: putative ethylene-forming enzyme
  misc_feature (3)..(348): NCBI GI NO: 37536792 NR Description: putative dioxygenase
  misc_feature (8)..(348): NCBI GI NO: 37536820 NR Description: putative ethylene-forming enzyme
  misc_feature (1)..(348): NCBI GI NO: 15219988 NR Description: oxidoreductase, 2OG-Fe(II) oxygenase family
  misc_feature (3)..(348): NCBI GI NO: 15235014 NR Description: oxidoreductase, 2OG-Fe(II) oxygenase family
  misc_feature (1)..(348): NCBI GI NO: 15219986 NR Description: oxidoreductase, 2OG-Fe(II) oxygenase family
  misc_feature (3)..(348): NCBI GI NO: 40736992 NR Description: putative oxidoreductase
  misc_feature (7)..(308): NCBI GI NO: 34898470 NR Description: ESTs D47168
MGSLPVPSVQALVAATGGDDVPLRYLRPEAAAEAVTGDADGEAQIPIIDHQRLLLELDHGGEESARLHRACQDWGFFQLVNHSVPDDVVESMKANIQQFFQLSAETKKRFAQEQGQLEGYGQLFVVSEDQKLDWADMLFLYTQPPEMRNTKFWPDQPAAFRSALDRYSDAVKDVSDSLLATMAKNLGLKREAIADKCIRGMQKVRINYYPPCAQPEKVVGLSPHSDANLLTLVLQVNHVQGLQIKRNGSWLPVKPVPGAFVVNIGDMFEVLTNGRYRSIEHRAVVDPKEERLSIAAFQFPNIHTMIGPMKELTAHEDDAYKTLDLESFMRTFFSTKLEGKNFLEQMKLN

SEQ ID NO: 14549 - protein, 258 aa, Triticum aestivum
  peptide (1)..(258): Ceres Seq. ID no. 15222053
  misc_feature (109)..(209): Pfam Name: II Pfam Description: 2OG-Fe
  misc_feature (1)..(256): NCBI GI NO: 34895204 NR Description: P0463A02.24
  misc_feature (1)..(258): NCBI GI NO: 37536802 NR Description: putative ethylene-forming enzyme
  misc_feature (1)..(257): NCBI GI NO: 37536804 NR Description: putative ethylene-forming enzyme
  misc_feature (1)..(257): NCBI GI NO: 37536792 NR Description: putative dioxygenase
  misc_feature (1)..(257): NCBI GI NO: 37536820 NR Description: putative ethylene-forming enzyme
  misc_feature (1)..(257): NCBI GI NO: 15219988 NR Description: oxidoreductase, 2OG-Fe(II) oxygenase family
  misc_feature (1)..(257): NCBI GI NO: 15235014 NR Description: oxidoreductase, 2OG-Fe(II) oxygenase family
  misc_feature (1)..(257): NCBI GI NO: 15219986 NR Description: oxidoreductase, 2OG-Fe(II) oxygenase family
  misc_feature (1)..(257): NCBI GI NO: 40736992 NR Description: putative oxidoreductase
  misc_feature (1)..(217): NCBI GI NO: 34898470 NR Description: ESTs D47168
MKANIQQFFQLSAETKKRFAQEQGQLEGYGQLFVVSEDQKLDWADMLFLYTQPPEMRNTKFWPDQPAAFRSALDRYSDAVKDVSDSLLATMAKNLGLKREAIADKCIRGMQKVRINYYPPCAQPEKVVGLSPHSDANLLTLVLQVNHVQGLQIKRNGSWLPVKPVPGAFVVNIGDMFEVLTNGRYRSIEHRAVVDPKEERLSIAAFQFPNIHTMIGPMKELTAHEDDAYKTLDLESFMRTFFSTKLEGKNFLEQMKLN

SEQ ID NO: 14550 - DNA, 1409 bp, Triticum aestivum
  misc_feature (1)..(1409): Ceres Seq. ID no. 13597899
caaaaccgtttgctccgtttcccccaaatctgccgcacgacccaaacaaaacccttgcggcggcgccccaccccatctccggcggccaagcggaatggagcgctcggcggcgggcgcctcgtaccagcgcttcccgcgcgtgcggatccgcgagctcaaggacgagtacgccaagttcgagctcaaggacaccgacgcgagcatggccaacgccctccgccgcgtcatgatcgccgaggtccccaccgtcgccatcgacctcgtcgagatcgagagcaactcctccgtcctcaacgacgagttcctcgcgcaccgcctcggcctcatcccgctcacctcctccgccgccatgtccatgcgcttctcccgcgactgcgacgcctgcgacggggacggctcctgcgagtactgctccgtcgagttccacctcgccgcccgcgccaccgactccggccagacgctcgaggtcacctccaccaaggacctccgctccaccgaccccaaggtctgccctgtcgaccagcaaagggagtaccagcaggccctcggcaacgtcgacgcttacgagcccgatgctgccggtgaccacaggggcatattaattgtaaagctgcgccgtgggcaagagctgcgtcttcgagcaattgccaggaagggaattggaaaggaccatgccaaatggtctccagctgctactgtgaccttcatgtatgagcctgacatacgtattaaccaagaactcatggagacacttacacttgaggaaaaacaaagctgggtggagagcagccctacaaaagtatttgacattgatcctgtcacccaacaggtgacgattgtggacccagaggcctacacatatgacgatgaggtgatcaagaaagcagaggccatggggaagccaggattggtagagatcaacgccaaggaggacagctttgtgttcactgtggagacaacgggggccattacagcctatgagctgattatgaacgctatcacggtcctgaggcagaagctggacgccgttcgcctgcaagacgatgacggcgatctgggcgagctcggcgcccaccttatcggaggctaaccaccgcttgtctgggaaagaagtcgccagcggtatctttgtttctccgtatctaggctcgtctcgtctaactggcttgcctgtggcaagtggtagttgatgcctcctttgatatgcagcaccagaactctacggtaatcgcctttgtatccctctgtttatgccctgacctctgccggaactctgtacgtgcaaaaagccatgggcgctgaagcttagcggcactgtggaacaagagaatagctggtagcccatgattggccgtgccgtgcggtggtgatacggcgtggtgtcttgaatgcagagttattcgcagggc

SEQ ID NO: 14551 - protein, 362 aa, Triticum aestivum
  peptide (1)..(362): Ceres Seq. ID no. 13597900
  misc_feature (88)..(228): Pfam Name: Pfam Description:  RNA polymerase Rpb3/RpoA insert domain
  misc_feature (38)..(362): NCBI GI NO: 15226523 NR Description: DNA-directed RNA polymerase II
  misc_feature (38)..(362): NCBI GI NO: 21593370 NR Description: DNA-directed RNA polymerase II
  misc_feature (38)..(362): NCBI GI NO: 15226509 NR Description: DNA-directed RNA polymerase II
  misc_feature (38)..(362): NCBI GI NO: 2129725 NR Description: DNA-directed RNA polymerase (EC 2
  misc_feature (41)..(240): NCBI GI NO: 28278474 NR Description: Similar to polymerase
  misc_feature (254)..(346): NCBI GI NO: 28278474 NR Description: Similar to polymerase
  misc_feature (46)..(356): NCBI GI NO: 116575 NR Description: Conjugation stage-specific protein
  misc_feature (41)..(240): NCBI GI NO: 39589723 NR Description: Hypothetical protein CBG12350
  misc_feature (254)..(345): NCBI GI NO: 39589723 NR Description: Hypothetical protein CBG12350
  misc_feature (41)..(240): NCBI GI NO: 40645083 NR Description: homologue of DNA-directed RNA polymerase II subunit
KTVCSVSPKSAARPKQNPCGGAPPHLRRPSGMERSAAGASYQRFPRVRIRELKDEYAKFELKDTDASMANALRRVMIAEVPTVAIDLVEIESNSSVLNDEFLAHRLGLIPLTSSAAMSMRFSRDCDACDGDGSCEYCSVEFHLAARATDSGQTLEVTSTKDLRSTDPKVCPVDQQREYQQALGNVDAYEPDAAGDHRGILIVKLRRGQELRLRAIARKGIGKDHAKWSPAATVTFMYEPDIRINQELMETLTLEEKQSWVESSPTKVFDIDPVTQQVTIVDPEAYTYDDEVIKKAEAMGKPGLVEINAKEDSFVFTVETTGAITAYELIMNAITVLRQKLDAVRLQDDDGDLGELGAHLIGG

SEQ ID NO: 14552 - protein, 331 aa, Triticum aestivum
  peptide (1)..(331): Ceres Seq. ID no. 13597901
  misc_feature (57)..(197): Pfam Name: Pfam Description:  RNA polymerase Rpb3/RpoA insert domain
  misc_feature (7)..(331): NCBI GI NO: 15226523 NR Description: DNA-directed RNA polymerase II
  misc_feature (7)..(331): NCBI GI NO: 21593370 NR Description: DNA-directed RNA polymerase II
  misc_feature (7)..(331): NCBI GI NO: 15226509 NR Description: DNA-directed RNA polymerase II
  misc_feature (7)..(331): NCBI GI NO: 2129725 NR Description: DNA-directed RNA polymerase (EC 2
  misc_feature (10)..(209): NCBI GI NO: 28278474 NR Description: Similar to polymerase
  misc_feature (223)..(315): NCBI GI NO: 28278474 NR Description: Similar to polymerase
  misc_feature (15)..(325): NCBI GI NO: 116575 NR Description: Conjugation stage-specific protein
  misc_feature (10)..(209): NCBI GI NO: 39589723 NR Description: Hypothetical protein CBG12350
  misc_feature (223)..(314): NCBI GI NO: 39589723 NR Description: Hypothetical protein CBG12350
  misc_feature (10)..(209): NCBI GI NO: 40645083 NR Description: homologue of DNA-directed RNA polymerase II subunit
MERSAAGASYQRFPRVRIRELKDEYAKFELKDTDASMANALRRVMIAEVPTVAIDLVEIESNSSVLNDEFLAHRLGLIPLTSSAAMSMRFSRDCDACDGDGSCEYCSVEFHLAARATDSGQTLEVTSTKDLRSTDPKVCPVDQQREYQQALGNVDAYEPDAAGDHRGILIVKLRRGQELRLRAIARKGIGKDHAKWSPAATVTFMYEPDIRINQELMETLTLEEKQSWVESSPTKVFDIDPVTQQVTIVDPEAYTYDDEVIKKAEAMGKPGLVEINAKEDSFVFTVETTGAITAYELIMNAITVLRQKLDAVRLQDDDGDLGELGAHLIGG

SEQ ID NO: 14553 - protein, 295 aa, Triticum aestivum
  peptide (1)..(295): Ceres Seq. ID no. 13597902
  misc_feature (21)..(161): Pfam Name: Pfam Description:  RNA polymerase Rpb3/RpoA insert domain
  misc_feature (1)..(295): NCBI GI NO: 15226523 NR Description: DNA-directed RNA polymerase II
  misc_feature (1)..(295): NCBI GI NO: 21593370 NR Description: DNA-directed RNA polymerase II
  misc_feature (1)..(295): NCBI GI NO: 15226509 NR Description: DNA-directed RNA polymerase II
  misc_feature (1)..(295): NCBI GI NO: 2129725 NR Description: DNA-directed RNA polymerase (EC 2
  misc_feature (1)..(173): NCBI GI NO: 28278474 NR Description: Similar to polymerase
  misc_feature (187)..(279): NCBI GI NO: 28278474 NR Description: Similar to polymerase
  misc_feature (1)..(289): NCBI GI NO: 116575 NR Description: Conjugation stage-specific protein
  misc_feature (1)..(173): NCBI GI NO: 39589723 NR Description: Hypothetical protein CBG12350
  misc_feature (187)..(278): NCBI GI NO: 39589723 NR Description: Hypothetical protein CBG12350
  misc_feature (1)..(173): NCBI GI NO: 40645083 NR Description: homologue of DNA-directed RNA polymerase II subunit
MANALRRVMIAEVPTVAIDLVEIESNSSVLNDEFLAHRLGLIPLTSSAAMSMRFSRDCDACDGDGSCEYCSVEFHLAARATDSGQTLEVTSTKDLRSTDPKVCPVDQQREYQQALGNVDAYEPDAAGDHRGILIVKLRRGQELRLRAIARKGIGKDHAKWSPAATVTFMYEPDIRINQELMETLTLEEKQSWVESSPTKVFDIDPVTQQVTIVDPEAYTYDDEVIKKAEAMGKPGLVEINAKEDSFVFTVETTGAITAYELIMNAITVLRQKLDAVRLQDDDGDLGELGAHLIGG

SEQ ID NO: 14554 - DNA, 1196 bp, Triticum aestivum
  misc_feature (1)..(1196): Ceres Seq. ID no. 13664349
actcactccgccctcgcccccgccacctcatcgacgcctcgaagccgaaccctgggcaaggaaaaatacctaaccctagctggtccgccatggccagggaggcgtcgtcgtcctccgcgccggggccctcagagttgccgccggcggctggtggcagcggcagcggaagcggcggggacacgccgcgagtgacgcggcgacgcgcccgcggcgaccccctcctcatcgtgtgcggctgcttcagcgtcgtcacggccgccaccgccttgctctgcgtcgccgtcaacgtcctctccgctgtccagtccttccgccgcaacggtggctacatattcgggggcatattccggtgctatgcggtggtgatctcgctgttcgtggccgtcctcgagaccgagtggggattcatcatcaaattctgcaagatattggaatactggcctgcaagggggatgctacagatatttgttgctgtcatgacgaaggcatacccaaacgttgaaaggagcgatctgattttgcttcaggacattgccagctatctgctccttgcatgtggactaatctatgtaatctcgggggtattatgtcttggtgtactaaagcgttctaggcagcagaaagcaacatcacgagagcaagcagccaaagatctgcatgagctggagaagcggagagaggaactcgaggcattgttaattgctgagaggtccgaattggtctgatgaatctgagcacgacgatttaacatttctcacgtggtgtagatagattgttgctcctgctaattgcatgccacttttcatggtcatcgatttgtcacccgagacattttcgttgggagtgcccccttttcctgttagtgctgacctttaccaatcatttgcttcctatgtttacatggattgcagtggaccatattgcgctcttattttatttttagctaggaatggcttgctaacatatttggtaaatcgacaggtgttccagttttcgtctagatttctgctgaatttggtttctggtgtgagcattttcgtggatgcatggatcaagcgggattgtgttgtctcagttgttggatttatgtcaatgccgtaggcctcaaaatgtaccatgctgacatggtgtgtgtttgttgtctctgtagtctttgactgaaccatggatgctaaataattttctgtattttgtgt

SEQ ID NO: 14555 - protein, 240 aa, Triticum aestivum
  peptide (1)..(240): Ceres Seq. ID no. 15220314
  misc_feature (30)..(240): NCBI GI NO: 34915380 NR Description: contains ESTsC27019
  misc_feature (69)..(237): NCBI GI NO: 30689751 NR Description: expressed protein [Arabidopsis thaliana]
SLRPRPRHLIDASKPNPGQGKIPNPSWSAMAREASSSSAPGPSELPPAAGGSGSGSGGDTPRVTRRRARGDPLLIVCGCFSVVTAATALLCVAVNVLSAVQSFRRNGGYIFGGIFRCYAVVISLFVAVLETEWGFIIKFCKILEYWPARGMLQIFVAVMTKAYPNVERSDLILLQDIASYLLLACGLIYVISGVLCLGVLKRSRQQKATSREQAAKDLHELEKRREELEALLIAERSELV

SEQ ID NO: 14556 - protein, 211 aa, Triticum aestivum
  peptide (1)..(211): Ceres Seq. ID no. 15220315
  misc_feature (1)..(211): NCBI GI NO: 34915380 NR Description: contains ESTsC27019
  misc_feature (40)..(208): NCBI GI NO: 30689751 NR Description: expressed protein [Arabidopsis thaliana]
MAREASSSSAPGPSELPPAAGGSGSGSGGDTPRVTRRRARGDPLLIVCGCFSVVTAATALLCVAVNVLSAVQSFRRNGGYIFGGIFRCYAVVISLFVAVLETEWGFIIKFCKILEYWPARGMLQIFVAVMTKAYPNVERSDLILLQDIASYLLLACGLIYVISGVLCLGVLKRSRQQKATSREQAAKDLHELEKRREELEALLIAERSELV

SEQ ID NO: 14557 - DNA, 1282 bp, Triticum aestivum
  misc_feature (1)..(1282): Ceres Seq. ID no. 14301882
aactggtggggggcggtggcaagtgcaaccgtgcgtgcgctcctgtatccatctgtctgccgggactcatcgtctcctccttccccaatcgccattgtcggtggtgcaagcaagcgcgccgaggcgtgtgggagggacatggcggggcgctacgatggcggcaaccctttcgaggaggaggaggacgtgaaccctttctcggaacaaacgcgaggcaaagctggcgggcagtccaactatggcggcggcggcgcgttctacatgccgaatcccagaaacgttgccccctcctcgaattcgcggctttcgccccttcccccggaacctgcagatttcagtgccacagtggatatccctcttgagtcgtcaaaggacctgaagaaaagagaaaaggagctgcaagcgagggaagcagagttgaacaagagggagaaggaattgaaaagaagggaggaagctgcagcacgagctggtattgtcatcgaggagaaaaactggcctccttttctgccactcatccaccatgacattgccaatgagataccgactcatcttcaaagaatgcaatacttcgcatttgcgtcatttcttggtttggttttctgtctcttctggaatgtcgtagcagttacttcagcctggatcaagggggaaggtgtgaaaatctggttgctagcaataatctacttcatctctggggttcctggtgcgtatgtgttatggtatcgccctctttataatgctatgaggactgacagtgcgttgaagtttggattgtttttcttgctctacttgtttcacatcattttcgtcgtatttgctgccgtggctcctcctgctgtctttgagggcaagtctttggcaggaattttaccggcgattgatcttatcagcgtgaatgctctagttgggatcttctacttcattggatttggattatttgccctggagtcattgctgagcatctgggttatccagcaagtgtacatgtacttccgaggaagtggaaaggccgcagagatgaagcgtgatgcgacgaggggcgctatgagagcggcattttgattgccacatatctcagatgatgataggtctcaagattaattccatggattagatggcacggtaaagaaaaatatatgtagcaatgtaaacatatatttttctttatcgccggtaagaaaagtggacaagtcctacaatgtcacttcatcatagcagtatgataacacggcgatcataacaaaaacttacaggttcatcggaaagtttgacaaaaggc

SEQ ID NO: 14558 - protein, 354 aa, Triticum aestivum
  peptide (1)..(354): Ceres Seq. ID no. 14301883
  misc_feature (162)..(336): Pfam Name: Pfam Description:  SCAMP family
  misc_feature (47)..(354): NCBI GI NO: 34899754 NR Description: putative secretory carrier membrane protein
  misc_feature (93)..(354): NCBI GI NO: 7109232 NR Description: secretory carrier membrane protein [Oryza sativa]
  misc_feature (90)..(353): NCBI GI NO: 15226410 NR Description: secretory carrier-associated membrane protein -related
  misc_feature (90)..(353): NCBI GI NO: 15219893 NR Description: secretory carrier membrane protein
  misc_feature (90)..(353): NCBI GI NO: 15220305 NR Description: secretory carrier membrane protein -related
  misc_feature (90)..(353): NCBI GI NO: 3941289 NR Description: similarity to SCAMP37 [Pisum sativum]
  misc_feature (90)..(352): NCBI GI NO: 18379111 NR Description: expressed protein [Arabidopsis thaliana]
  misc_feature (90)..(353): NCBI GI NO: 25402653 NR Description: hypothetical protein
  misc_feature (104)..(335): NCBI GI NO: 15222550 NR Description: secretory carrier membrane protein -related
  misc_feature (55)..(335): NCBI GI NO: 38347080 NR Description: OSJNBa0006A01.21
NWWGAVASATVRALLYPSVCRDSSSPPSPIAIVGGASKRAEACGRDMAGRYDGGNPFEEEEDVNPFSEQTRGKAGGQSNYGGGGAFYMPNPRNVAPSSNSRLSPLPPEPADFSATVDIPLESSKDLKKREKELQAREAELNKREKELKRREEAAARAGIVIEEKNWPPFLPLIHHDIANEIPTHLQRMQYFAFASFLGLVFCLFWNVVAVTSAWIKGEGVKIWLLAIIYFISGVPGAYVLWYRPLYNAMRTDSALKFGLFFLLYLFHIIFVVFAAVAPPAVFEGKSLAGILPAIDLISVNALVGIFYFIGFGLFALESLLSIWVIQQVYMYFRGSGKAAEMKRDATRGAMRAAF

SEQ ID NO: 14559 - protein, 308 aa, Triticum aestivum
  peptide (1)..(308): Ceres Seq. ID no. 14301884
  misc_feature (116)..(290): Pfam Name: Pfam Description:  SCAMP family
  misc_feature (1)..(308): NCBI GI NO: 34899754 NR Description: putative secretory carrier membrane protein
  misc_feature (47)..(308): NCBI GI NO: 7109232 NR Description: secretory carrier membrane protein [Oryza sativa]
  misc_feature (44)..(307): NCBI GI NO: 15226410 NR Description: secretory carrier-associated membrane protein -related
  misc_feature (44)..(307): NCBI GI NO: 15219893 NR Description: secretory carrier membrane protein
  misc_feature (44)..(307): NCBI GI NO: 15220305 NR Description: secretory carrier membrane protein -related
  misc_feature (44)..(307): NCBI GI NO: 3941289 NR Description: similarity to SCAMP37 [Pisum sativum]
  misc_feature (44)..(306): NCBI GI NO: 18379111 NR Description: expressed protein [Arabidopsis thaliana]
  misc_feature (44)..(307): NCBI GI NO: 25402653 NR Description: hypothetical protein
  misc_feature (58)..(289): NCBI GI NO: 15222550 NR Description: secretory carrier membrane protein -related
  misc_feature (9)..(289): NCBI GI NO: 38347080 NR Description: OSJNBa0006A01.21
MAGRYDGGNPFEEEEDVNPFSEQTRGKAGGQSNYGGGGAFYMPNPRNVAPSSNSRLSPLPPEPADFSATVDIPLESSKDLKKREKELQAREAELNKREKELKRREEAAARAGIVIEEKNWPPFLPLIHHDIANEIPTHLQRMQYFAFASFLGLVFCLFWNVVAVTSAWIKGEGVKIWLLAIIYFISGVPGAYVLWYRPLYNAMRTDSALKFGLFFLLYLFHIIFVVFAAVAPPAVFEGKSLAGILPAIDLISVNALVGIFYFIGFGLFALESLLSIWVIQQVYMYFRGSGKAAEMKRDATRGAMRAAF

SEQ ID NO: 14560 - protein, 267 aa, Triticum aestivum
  peptide (1)..(267): Ceres Seq. ID no. 14301885
  misc_feature (75)..(249): Pfam Name: Pfam Description:  SCAMP family
  misc_feature (1)..(267): NCBI GI NO: 34899754 NR Description: putative secretory carrier membrane protein
  misc_feature (6)..(267): NCBI GI NO: 7109232 NR Description: secretory carrier membrane protein [Oryza sativa]
  misc_feature (3)..(266): NCBI GI NO: 15226410 NR Description: secretory carrier-associated membrane protein -related
  misc_feature (3)..(266): NCBI GI NO: 15219893 NR Description: secretory carrier membrane protein
  misc_feature (3)..(266): NCBI GI NO: 15220305 NR Description: secretory carrier membrane protein -related
  misc_feature (3)..(266): NCBI GI NO: 3941289 NR Description: similarity to SCAMP37 [Pisum sativum]
  misc_feature (3)..(265): NCBI GI NO: 18379111 NR Description: expressed protein [Arabidopsis thaliana]
  misc_feature (3)..(266): NCBI GI NO: 25402653 NR Description: hypothetical protein
  misc_feature (17)..(248): NCBI GI NO: 15222550 NR Description: secretory carrier membrane protein -related
  misc_feature (1)..(248): NCBI GI NO: 38347080 NR Description: OSJNBa0006A01.21
MPNPRNVAPSSNSRLSPLPPEPADFSATVDIPLESSKDLKKREKELQAREAELNKREKELKRREEAAARAGIVIEEKNWPPFLPLIHHDIANEIPTHLQRMQYFAFASFLGLVFCLFWNVVAVTSAWIKGEGVKIWLLAIIYFISGVPGAYVLWYRPLYNAMRTDSALKFGLFFLLYLFHIIFVVFAAVAPPAVFEGKSLAGILPAIDLISVNALVGIFYFIGFGLFALESLLSIWVIQQVYMYFRGSGKAAEMKRDATRGAMRAAF

SEQ ID NO: 14561 - DNA, 1383 bp, Triticum aestivum
  misc_feature (1)..(1383): Ceres Seq. ID no. 12618559
aaaagtcatcgggtggacccgtgaaaccatcgaaccaactaaacaagcacagctgacacccacccctccgccaccgcagtcgccggtgaccaggacgcgcgcccgaattcgccggtggcgaggagaagggcgccgagtatggggtgctccctctcggggctcaacgccctctacgacgcagcgactggcggcggcgacgtgtggatcaacgagcgccgcttccgcgtcctccgccagatcggcgagggcggcttcgccttcgtctacctcgtcaaggagcacgacgcctcctcctacgccgcgcgcgacaggcacccctcccacgtctcagacgacgggacatatgctatgaagaaggtgctgatacagagcagggagcaactggatctggtgaaggaggagatccgcgtttcgtccttgttcaaccaccccaatctgctaccgcttcttgaccatgccataatagcagttaagagtacacagggagattggagccatgaagcctacttactcttcccagtccatttggatggtactctgttcgacaatgctgcagtcatgcagtcaaggaaagagttttattcggtggtcgatgttttgcgaatattccaacagatttgtgaaggactgaagcacatgcatagtcttgatcccacatatgcccataatgatgtcaagcctggcaatgttcttgtaacctgccgaaaagggcaagcacctcttgcaactttgatggattttggaagttcgcggcctgcaagaaatcaaattcgttctcgttctgaagcattacggttgcaggaatgggctgctgagcattgctctgcaccttttcgcgcacctgaattgtgggactgcccgagtcatgctgatattgatgagaggacagacatttggtcgctaggttgcactctttacgcgatcatgtatggtgtttctccctttgagtatgctcttggtgaatctggaggaagcttgcagctggccattatgaacgcacagttgaagtggccagcgctaccgagcacctaccctgacgcacttcacaagtttgttacctggatgcttcagccacagcctgagatgcgccctcgcatcaatgacatacttctccacgttgacaagcttgtggagaaatactcgccttaaagccagcttgcatattctgttctgacttgtttcttctttatacgattgcaaaaggggacatgttgtaagactcatgctctaggccttttcatcctttggaataggctcagtgtcaattctttatgtaactttcaggctgttaccgatatgtcgttctctaactcttggaagttatattactcgcttatcttgtacaaaatgtttgctgaatatgaaaaatacatgtgttattgc

SEQ ID NO: 14562 - protein, 336 aa, Triticum aestivum
  peptide (1)..(336): Ceres Seq. ID no. 12618560
  misc_feature (1)..(335): NCBI GI NO: 15241535 NR Description: serine/threonine protein kinase
  misc_feature (1)..(335): NCBI GI NO: 21593866 NR Description: serine/threonine protein kinase
  misc_feature (60)..(335): NCBI GI NO: 30682270 NR Description: serine/threonine protein kinase, putative
  misc_feature (1)..(30): NCBI GI NO: 30682270 NR Description: serine/threonine protein kinase, putative
  misc_feature (19)..(330): NCBI GI NO: 10640971 NR Description: F5-2 [Homo sapiens]
  misc_feature (19)..(330): NCBI GI NO: 12803571 NR Description: serine/threonine kinase 16 [Homo sapiens]
  misc_feature (19)..(330): NCBI GI NO: 33303961 NR Description: serine/threonine kinase 16 [synthetic construct]
  misc_feature (19)..(330): NCBI GI NO: 3372666 NR Description: myristilated and palmitylated serine-threoninekinase MPSK
  misc_feature (19)..(330): NCBI GI NO: 26327983 NR Description: unnamed protein product [Mus musculus]
  misc_feature (19)..(330): NCBI GI NO: 4505837 NR Description: serine/threonine kinase 16
MGCSLSGLNALYDAATGGGDVWINERRFRVLRQIGEGGFAFVYLVKEHDASSYAARDRHPSHVSDDGTYAMKKVLIQSREQLDLVKEEIRVSSLFNHPNLLPLLDHAIIAVKSTQGDWSHEAYLLFPVHLDGTLFDNAAVMQSRKEFYSVVDVLRIFQQICEGLKHMHSLDPTYAHNDVKPGNVLVTCRKGQAPLATLMDFGSSRPARNQIRSRSEALRLQEWAAEHCSAPFRAPELWDCPSHADIDERTDIWSLGCTLYAIMYGVSPFEYALGESGGSLQLAIMNAQLKWPALPSTYPDALHKFVTWMLQPQPEMRPRINDILLHVDKLVEKYSP

SEQ ID NO: 14563 - protein, 266 aa, Triticum aestivum
  peptide (1)..(266): Ceres Seq. ID no. 12618561
  misc_feature (1)..(265): NCBI GI NO: 15241535 NR Description: serine/threonine protein kinase
  misc_feature (1)..(265): NCBI GI NO: 21593866 NR Description: serine/threonine protein kinase
  misc_feature (1)..(265): NCBI GI NO: 30682270 NR Description: serine/threonine protein kinase, putative
  misc_feature (1)..(260): NCBI GI NO: 10640971 NR Description: F5-2 [Homo sapiens]
  misc_feature (1)..(260): NCBI GI NO: 12803571 NR Description: serine/threonine kinase 16 [Homo sapiens]
  misc_feature (1)..(260): NCBI GI NO: 33303961 NR Description: serine/threonine kinase 16 [synthetic construct]
  misc_feature (1)..(260): NCBI GI NO: 3372666 NR Description: myristilated and palmitylated serine-threoninekinase MPSK
  misc_feature (1)..(260): NCBI GI NO: 26327983 NR Description: unnamed protein product [Mus musculus]
  misc_feature (1)..(260): NCBI GI NO: 4505837 NR Description: serine/threonine kinase 16
  misc_feature (1)..(260): NCBI GI NO: 13626604 NR Description: SERINE/THREONINE PROTEIN KINASE 16
MKKVLIQSREQLDLVKEEIRVSSLFNHPNLLPLLDHAIIAVKSTQGDWSHEAYLLFPVHLDGTLFDNAAVMQSRKEFYSVVDVLRIFQQICEGLKHMHSLDPTYAHNDVKPGNVLVTCRKGQAPLATLMDFGSSRPARNQIRSRSEALRLQEWAAEHCSAPFRAPELWDCPSHADIDERTDIWSLGCTLYAIMYGVSPFEYALGESGGSLQLAIMNAQLKWPALPSTYPDALHKFVTWMLQPQPEMRPRINDILLHVDKLVEKYSP

SEQ ID NO: 14564 - protein, 196 aa, Triticum aestivum
  peptide (1)..(196): Ceres Seq. ID no. 12618562
  misc_feature (1)..(195): NCBI GI NO: 15241535 NR Description: serine/threonine protein kinase
  misc_feature (1)..(195): NCBI GI NO: 21593866 NR Description: serine/threonine protein kinase
  misc_feature (1)..(195): NCBI GI NO: 30682270 NR Description: serine/threonine protein kinase, putative
  misc_feature (1)..(190): NCBI GI NO: 10640971 NR Description: F5-2 [Homo sapiens]
  misc_feature (1)..(190): NCBI GI NO: 12803571 NR Description: serine/threonine kinase 16 [Homo sapiens]
  misc_feature (1)..(190): NCBI GI NO: 33303961 NR Description: serine/threonine kinase 16 [synthetic construct]
  misc_feature (1)..(190): NCBI GI NO: 3372666 NR Description: myristilated and palmitylated serine-threoninekinase MPSK
  misc_feature (1)..(190): NCBI GI NO: 26327983 NR Description: unnamed protein product [Mus musculus]
  misc_feature (1)..(190): NCBI GI NO: 4505837 NR Description: serine/threonine kinase 16
  misc_feature (1)..(190): NCBI GI NO: 13626604 NR Description: SERINE/THREONINE PROTEIN KINASE 16
MQSRKEFYSVVDVLRIFQQICEGLKHMHSLDPTYAHNDVKPGNVLVTCRKGQAPLATLMDFGSSRPARNQIRSRSEALRLQEWAAEHCSAPFRAPELWDCPSHADIDERTDIWSLGCTLYAIMYGVSPFEYALGESGGSLQLAIMNAQLKWPALPSTYPDALHKFVTWMLQPQPEMRPRINDILLHVDKLVEKYSP

SEQ ID NO: 14565 - DNA, 1342 bp, Triticum aestivum
  misc_feature (1)..(1342): Ceres Seq. ID no. 14303313
accaaaccctcgtcgcgctcgtctctcccctctcgtgctctcaccccggccagcggcatctgagattcgcgcctcgccggcggccatgggcggcgactggcaggagctggcccagtcggcggtcatcggcctcatcttcgccttcctcgtcgccaagctcatctccgtcgtcctcgccttcaaggaggacaacctccgcatcacccgctccgcccccgcccccgccccctcgcccgacgccactgcccccgcgctcgacggcggcacgagcggcggcgacggcgacagcgacggcgactgggagggcgtggagagcacggagctcgacgaggacttcagcgccgcctccgccttcgtcgcggcctccgccgccggcgtccccgaggaggcgcagctccgcctctacggcctctacaagatcgccaccgagggcccctgcaccgcgccgcagccctccgccctcaagctcaaggcccgcgccaagtggaatgcttggaataaattgggtgctatgccaacagaagaagctatggaggagtacataacaattgttgatgagatattccctaactgggctgatggctcgaaaaagaaagatggggaaaccacaatgtctgcatcaggttcgaagggaccaatgggacctgtatttagcagtttaatgtacgaggaagatcaaggaaatgaatcagaacttggtgacatccatgtttctgcaagggaaggagcaatcgaagacgttaaaaagcatcttgctgctggtgtacaaatcaacttaagagatagcgaagagagaactccgttgcactgggctgtggaccggggtcatctagatgctgttgaggttcttgtcaactcaaatgcggacgtgaatgctcaggacaacgaagggcagacagcgctccactacgccgtcctctgcgagagggaggacatcgccgaactgctcgtcaagcaccacgcggatctccagatcaaggacggcgacgggaacaccgcccgggacttgtgctcctcggcctggccgttcatgaagccggcaaactgacggcacaatgaacccgatgatacagagttgacgcctgctgctgctactaccactagtgccgagaaactatacacaccgtgcttggttagctgaatcggatgagccgttttaccaacctcatcgaatacactgtcaaaaggtaactcagcgcagggtagacatcttgtagtggtattttgcctgtttcatagtgtgtttgtgctgcaggccaactgtttggcaggaaatatatcagtgtcaggattcaggcctcgcggcctcatactgtcaatatgcatacatgttaagagcatc

SEQ ID NO: 14566 - protein, 348 aa, Triticum aestivum
  peptide (1)..(348): Ceres Seq. ID no. 14303314
  misc_feature (108)..(189): Pfam Name: Pfam Description:  Acyl CoA binding protein
  misc_feature (29)..(348): NCBI GI NO: 32488636 NR Description: OSJNBa0032F06.12
  misc_feature (90)..(345): NCBI GI NO: 15234270 NR Description: acyl-CoA binding protein -related
  misc_feature (31)..(97): NCBI GI NO: 15234270 NR Description: acyl-CoA binding protein -related
  misc_feature (32)..(345): NCBI GI NO: 15238757 NR Description: acyl-CoA binding protein (ACBP)
  misc_feature (32)..(345): NCBI GI NO: 21284389 NR Description: acyl-CoA binding protein [Arabidopsis thaliana]
  misc_feature (32)..(345): NCBI GI NO: 21593070 NR Description: putative acyl-CoA binding protein
  misc_feature (90)..(271): NCBI GI NO: 12039034 NR Description: acyl-CoA binding protein 2 [Arabidopsis thaliana]
  misc_feature (31)..(97): NCBI GI NO: 12039034 NR Description: acyl-CoA binding protein 2 [Arabidopsis thaliana]
  misc_feature (88)..(330): NCBI GI NO: 14150169 NR Description: hypothetical protein MGC2404 [Homo sapiens]
  misc_feature (88)..(330): NCBI GI NO: 34880749 NR Description: similar to RIKEN cDNA 2610100E10
PNPRRARLSPLVLSPRPAASEIRASPAAMGGDWQELAQSAVIGLIFAFLVAKLISVVLAFKEDNLRITRSAPAPAPSPDATAPALDGGTSGGDGDSDGDWEGVESTELDEDFSAASAFVAASAAGVPEEAQLRLYGLYKIATEGPCTAPQPSALKLKARAKWNAWNKLGAMPTEEAMEEYITIVDEIFPNWADGSKKKDGETTMSASGSKGPMGPVFSSLMYEEDQGNESELGDIHVSAREGAIEDVKKHLAAGVQINLRDSEERTPLHWAVDRGHLDAVEVLVNSNADVNAQDNEGQTALHYAVLCEREDIAELLVKHHADLQIKDGDGNTARDLCSSAWPFMKPAN

SEQ ID NO: 14567 - protein, 320 aa, Triticum aestivum
  peptide (1)..(320): Ceres Seq. ID no. 14303315
  misc_feature (80)..(161): Pfam Name: Pfam Description:  Acyl CoA binding protein
  misc_feature (1)..(320): NCBI GI NO: 32488636 NR Description: OSJNBa0032F06.12
  misc_feature (62)..(317): NCBI GI NO: 15234270 NR Description: acyl-CoA binding protein -related
  misc_feature (3)..(69): NCBI GI NO: 15234270 NR Description: acyl-CoA binding protein -related
  misc_feature (4)..(317): NCBI GI NO: 15238757 NR Description: acyl-CoA binding protein (ACBP)
  misc_feature (4)..(317): NCBI GI NO: 21284389 NR Description: acyl-CoA binding protein [Arabidopsis thaliana]
  misc_feature (4)..(317): NCBI GI NO: 21593070 NR Description: putative acyl-CoA binding protein
  misc_feature (62)..(243): NCBI GI NO: 12039034 NR Description: acyl-CoA binding protein 2 [Arabidopsis thaliana]
  misc_feature (3)..(69): NCBI GI NO: 12039034 NR Description: acyl-CoA binding protein 2 [Arabidopsis thaliana]
  misc_feature (60)..(302): NCBI GI NO: 14150169 NR Description: hypothetical protein MGC2404 [Homo sapiens]
  misc_feature (60)..(302): NCBI GI NO: 34880749 NR Description: similar to RIKEN cDNA 2610100E10
MGGDWQELAQSAVIGLIFAFLVAKLISVVLAFKEDNLRITRSAPAPAPSPDATAPALDGGTSGGDGDSDGDWEGVESTELDEDFSAASAFVAASAAGVPEEAQLRLYGLYKIATEGPCTAPQPSALKLKARAKWNAWNKLGAMPTEEAMEEYITIVDEIFPNWADGSKKKDGETTMSASGSKGPMGPVFSSLMYEEDQGNESELGDIHVSAREGAIEDVKKHLAAGVQINLRDSEERTPLHWAVDRGHLDAVEVLVNSNADVNAQDNEGQTALHYAVLCEREDIAELLVKHHADLQIKDGDGNTARDLCSSAWPFMKPAN

SEQ ID NO: 14568 - protein, 180 aa, Triticum aestivum
  peptide (1)..(180): Ceres Seq. ID no. 14303316
  misc_feature (37)..(160): Pfam Name: Pfam Description:  Formin Homology 2 Domain
  misc_feature (38)..(163): NCBI GI NO: 32420163 NR Description: predicted protein [Neurospora crassa]
  misc_feature (66)..(162): NCBI GI NO: 4507613 NR Description: tankyrase
  misc_feature (57)..(165): NCBI GI NO: 27461955 NR Description: tankyrase 1 [Gallus gallus]
  misc_feature (23)..(160): NCBI GI NO: 29826652 NR Description: hypothetical protein
  misc_feature (21)..(162): NCBI GI NO: 25989119 NR Description: unknown [Streptomyces aureofaciens]
  misc_feature (23)..(161): NCBI GI NO: 1076211 NR Description: hypothetical protein VSP-3 - Chlamydomonasreinhardtii
  misc_feature (37)..(161): NCBI GI NO: 1076211 NR Description: hypothetical protein VSP-3 - Chlamydomonasreinhardtii
  misc_feature (37)..(160): NCBI GI NO: 6523547 NR Description: hydroxyproline-rich glycoprotein DZ-HRGP
  misc_feature (23)..(160): NCBI GI NO: 81286 NR Description: extensin - Volvox carteri (fragment)
  misc_feature (23)..(161): NCBI GI NO: 7949115 NR Description: Ser/Arg-related nuclear matrix protein
QTLVALVSPLSCSHPGQRHLRFAPRRRPWAATGRSWPSRRSSASSSPSSSPSSSPSSSPSRRTTSASPAPPPPPPPRPTPLPPRSTAARAAATATATATGRAWRARSSTRTSAPPPPSSRPPPPASPRRRSSASTASTRSPPRAPAPRRSPPPSSSRPAPSGMLGINWVLCQQKKLWRST

SEQ ID NO: 14569 - DNA, 1154 bp, Triticum aestivum
  misc_feature (1)..(1154): Ceres Seq. ID no. 13656209
atcttccttcccccacttgttccccgaaaagcttctcgtccgctcctctcgcaccgccggagggaggcgcctcgccgtctcctcgccgccgctcgtcgagggtggttcctggcgagcgactgaagcccagccagcatggcggccaacgtgggggagtccacgagcggcagcggcagcagcgtggctggcgacggcgggggcagcttcgagtgcaacatatgcttcgagctgccgcaggagcccatcgtcacgctctgcggccacctcttctgctggccctgcctctacaagtggctgcacatccactcgcactcgcccgagtgccccgtctgcaaggccgtcgtcgaggaggacaagctcgtcccgctctacggccgcggcaaggaccgcgtcgaccccaggtccaagggcgtgccggccggggccgagatccccaaccggccgaccgggcagcggcctgccacggccccgcaggcagatcccaacaaccacttccctaatgcgaaccctaacccctggttcatggggggagggggcgtccctctggccaacgcgcggtgggggaactacaccttctcggccgcgttcggcggcctgttcccgctgctgagcttccaggtgcatggattcccggacgcggccgcgtacgggcagcctgccgggtttccctatgggtacggccatggccatggccacgggcatgctttccatggcgggcacgcccacgccgccgccccccggcacgcgccgcccgggcagcagcagcagcagcagcaggcggacgtgtacctcaaggcgctgctcatcctggttggctttctcgtgatcgcaagcctcatcacattctaggttcgtcggttcccaccattgtcatttgtcaccgtcataataagagaaacaacgattgtcgtgatacttctcagatgttgtgtgcattaccttggcccccccatacaaagccccggtctaaatccgagtggtgcgttttgagcgaaagtgttcatagaactcctgtatatatgtgctatttagacgcggtcctgtgggggggcgcatgtgtaccgtagtagtttcgcgctgattcgcggatgatttgggaaacctctgtttggagtggatgtaccagaccaattatatatcatgtgtaattttgt

SEQ ID NO: 14570 - protein, 237 aa, Triticum aestivum
  peptide (1)..(237): Ceres Seq. ID no. 15219813
  misc_feature (26)..(66): Pfam Name: RING finger Pfam Description: Zinc finger, C3HC4 type
  misc_feature (1)..(237): NCBI GI NO: 29150403 NR Description: unknown protein
  misc_feature (1)..(237): NCBI GI NO: 34909840 NR Description: P0403C05.28
  misc_feature (12)..(234): NCBI GI NO: 18394721 NR Description: zinc finger
  misc_feature (8)..(235): NCBI GI NO: 15224062 NR Description: zinc finger
  misc_feature (8)..(235): NCBI GI NO: 21553849 NR Description: putative RING zinc finger protein
  misc_feature (19)..(119): NCBI GI NO: 15222064 NR Description: zinc finger
  misc_feature (1)..(235): NCBI GI NO: 17554742 NR Description: Ring finger protein RNF-5 (24.9 kD) (rnf-5)
  misc_feature (6)..(164): NCBI GI NO: 21912604 NR Description: putative ubiquitin ligase [Taenia solium]
  misc_feature (12)..(125): NCBI GI NO: 22795037 NR Description: putative RING protein [Populus x canescens]
  misc_feature (1)..(108): NCBI GI NO: 31542783 NR Description: hypothetical protein FLJ38628 [Homo sapiens]
MAANVGESTSGSGSSVAGDGGGSFECNICFELPQEPIVTLCGHLFCWPCLYKWLHIHSHSPECPVCKAVVEEDKLVPLYGRGKDRVDPRSKGVPAGAEIPNRPTGQRPATAPQADPNNHFPNANPNPWFMGGGGVPLANARWGNYTFSAAFGGLFPLLSFQVHGFPDAAAYGQPAGFPYGYGHGHGHGHAFHGGHAHAAAPRHAPPGQQQQQQQADVYLKALLILVGFLVIASLITF

SEQ ID NO: 14571 - protein, 202 aa, Triticum aestivum
  peptide (1)..(202): Ceres Seq. ID no. 15219814
  misc_feature (1)..(202): Pfam Name: Pfam Description:  Glycoprotein GG/GX
  misc_feature (15)..(202): NCBI GI NO: 13592175 NR Description: ppg3 [Leishmania major]
  misc_feature (15)..(202): NCBI GI NO: 13592175 NR Description: ppg3 [Leishmania major]
  misc_feature (27)..(202): NCBI GI NO: 11359723 NR Description: proteophosphoglycan, membrane-associated
  misc_feature (55)..(202): NCBI GI NO: 11359723 NR Description: proteophosphoglycan, membrane-associated
  misc_feature (14)..(202): NCBI GI NO: 15231954 NR Description: hypothetical protein [Arabidopsis thaliana]
  misc_feature (27)..(202): NCBI GI NO: 5420387 NR Description: proteophosphoglycan [Leishmania major]
  misc_feature (15)..(202): NCBI GI NO: 13592175 NR Description: ppg3 [Leishmania major]
  misc_feature (15)..(202): NCBI GI NO: 13592175 NR Description: ppg3 [Leishmania major]
  misc_feature (63)..(202): NCBI GI NO: 5420387 NR Description: proteophosphoglycan [Leishmania major]
  misc_feature (63)..(202): NCBI GI NO: 5420387 NR Description: proteophosphoglycan [Leishmania major]
SSFPHLFPEKLLVRSSRTAGGRRLAVSSPPLVEGGSWRATEAQPAWRPTWGSPRAAAAAAWLATAGAASSATYASSCRRSPSSRSAATSSAGPASTSGCTSTRTRPSAPSARPSSRRTSSSRSTAAARTASTPGPRACRPGPRSPTGRPGSGLPRPRRQIPTTTSLMRTLTPGSWGEGASLWPTRGGGTTPSRPRSAACSRC

SEQ ID NO: 14572 - protein, 165 aa, Triticum aestivum
  peptide (1)..(165): Ceres Seq. ID no. 15219815
LPSPTCSPKSFSSAPLAPPEGGASPSPRRRSSRVVPGERLKPSQHGGQRGGVHERQRQQRGWRRRGQLRVQHMLRAAAGAHRHALRPPLLLALPLQVAAHPLALARVPRLQGRRRGGQARPALRPRQGPRRPQVQGRAGRGRDPQPADRAAACHGPAGRSQQPLP

SEQ ID NO: 14573 - DNA, 1092 bp, Triticum aestivum
  misc_feature (1)..(1092): Ceres Seq. ID no. 13584319
ccacccacccccgattcacatccccttcacctcctctcctctcctctcctctgccgacgggatctctccctttctccgatccatgccgggatcctccgccgtgtggccgcacacgcgtgcagccctcctccaccacccgaccgaccaggcccatcccggcggccagcccgggctgctccccgccgcggcatgggggcagggcggcgcggcggccccgagggcgagcatagtggcggcgcgggcggtgcagaccaacaggcagcaggcgcgtgggaggagcagtgctgccgaagccggcgctaggaacaagctgaggaagccgccggctggaggagctggaggtgcagcggggatccacggctccgcgccctgtccccagtcagtcccctccaaatctcgccgcagccgccacagtggtttagcatggtggtgcgaaagtgttgcggcttggtttgtgagctacagaccttatcaagcagcaaagtcatctcacatatgccgacgacgaagatccatatttattggctgagggagcaacaacacaattctgatgattctgccaatatttacttgcaaggaccagagggtatgctgatgctgcgcaggcacttgagctatttacagaaggagaggacccgaccttcttcatgtcttgtggctgtgtcttcctttgattcattcgtgcaacaaagaggggacctggccttcttcatgtctcgtgcaaaaagggtgattgacactgactacgacagcctggtgggcgtcgtgctcttcaaccacttagaggtggacttcgacgtgaagcccagcgaccgcgccgcacggatgatcgtccatgtgatcacgatgccggatgtcgccgaggtggaggacctcgacgccatcttttggcgtgagggaggattcgggtcctccggcgtctgaactccgagccttggtagatacatgtagagaaataatctgtttaggctggtggtggaacactagggaaggtagccaccttcggttgtgtgtgtttaatttattttgcactggacgtgtccctgatttctatctatgaataatgcacgtaatttttattttttttaattt

SEQ ID NO: 14574 - protein, 175 aa, Triticum aestivum
  peptide (1)..(175): Ceres Seq. ID no. 13584320
HPPPIHIPFTSSPLLSSADGISPFLRSMPGSSAVWPHTRAALLHHPTDQAHPGGQPGLLPAAAWGQGGAAAPRASIVAARAVQTNRQQARGRSSAAEAGARNKLRKPPAGGAGGAAGIHGSAPCPQSVPSKSRRSRHSGLAWWCESVAAWFVSYRPYQAAKSSHICRRRRSIFIG

SEQ ID NO: 14575 - protein, 166 aa, Triticum aestivum
  peptide (1)..(166): Ceres Seq. ID no. 13584321
  misc_feature (103)..(165): Pfam Name: Pfam Description:  dUTPase
  misc_feature (103)..(166): NCBI GI NO: 31126720 NR Description: putative deoxyuridine triphosphatase
  misc_feature (103)..(166): NCBI GI NO: 416922 NR Description: Deoxyuridine 5'-triphosphate nucleotidohydrolase
  misc_feature (103)..(166): NCBI GI NO: 15232681 NR Description: dUTP pyrophosphatase-related protein
  misc_feature (75)..(165): NCBI GI NO: 1169437 NR Description: Deoxyuridine 5'-triphosphate nucleotidohydrolase
  misc_feature (96)..(166): NCBI GI NO: 38566986 NR Description: probable dUTP pyrophosphatase [Neurospora crassa]
  misc_feature (87)..(166): NCBI GI NO: 19921126 NR Description: CG4584-PA [Drosophila melanogaster]
  misc_feature (87)..(166): NCBI GI NO: 24583610 NR Description: CG4584-PB [Drosophila melanogaster]
  misc_feature (87)..(166): NCBI GI NO: 38047903 NR Description: similar to Drosophila melanogaster BcDNA:LD08534
  misc_feature (87)..(165): NCBI GI NO: 3046554 NR Description: dUTPase homolog [orf virus strain D1701]
  misc_feature (87)..(165): NCBI GI NO: 8347092 NR Description: dUTPase [Mus musculus]
MVVRKCCGLVCELQTLSSSKVISHMPTTKIHIYWLREQQHNSDDSANIYLQGPEGMLMLRRHLSYLQKERTRPSSCLVAVSSFDSFVQQRGDLAFFMSRAKRVIDTDYDSLVGVVLFNHLEVDFDVKPSDRAARMIVHVITMPDVAEVEDLDAIFWREGGFGSSGV

SEQ ID NO: 14576 - protein, 148 aa, Triticum aestivum
  peptide (1)..(148): Ceres Seq. ID no. 13584322
MPGSSAVWPHTRAALLHHPTDQAHPGGQPGLLPAAAWGQGGAAAPRASIVAARAVQTNRQQARGRSSAAEAGARNKLRKPPAGGAGGAAGIHGSAPCPQSVPSKSRRSRHSGLAWWCESVAAWFVSYRPYQAAKSSHICRRRRSIFIG

SEQ ID NO: 14577 - DNA, 1114 bp, Triticum aestivum
  misc_feature (1)..(1114): Ceres Seq. ID no. 12626033
acattagtccagttcgtcggttggtggtggtggcgtgcgtgcctgggcgactctgcctcaaaccctcatcaggtccctcgatcgccgcgctcgagttggttatatagaactgaagggaggtaaggtgagtataagcatcagagggagtacatagcatgagtaataccagcggcgcacggcgtgccgcaaggaggcaatcgctggatggatctgctgataaagttgttgtggacttggatgcaagctcgccggtggcggggaaccatcatgggctctcggtcttccctggtgcacgcacatcgcctattgatgtggaagctctcgatgatgaagtgcaggccctatcgccttcacaagtgcctcccccgggggtgaaccggagaactagagggcaacctgtgacacaattttctctggatgaagatgctgtcctggaagagaattggagaattataaggcaatgtgcgacaccattttatcttgatgaagatgctgccatggaagagaatcggagaactagaagtcaatttttgacaccactttatctggatgaagatgctgccctggaagataatgcagctatgccttctcataacacgtggaacaaacgccaaagggttgcgcctttgatatgtctctccccagaaagggaagaagggtccagcctgcagtcgaacaatgcggtgcaaattagccaagagcctgctaaggtggtggttccaaaggaaccgaatttcacttgcccggtgtgccttaacaagctggtggagccttcgacaacaaaatgtggccatatcttctgcgcagagtgcatcaagcaagccatccagtttcagaagaaatgccctacttgccgcaaggccctgaggaagaacaacttccatcgtatttaccttccgaactcggatggttaaggtcagcatcggatcaatcgccaaagagtatcatcacatagattatggttgctgaggaacctgtagcaggtgctcagatgaacaattgattaagttgactgctgtacgtatcattagatggttggtctatgatgtaactgagattaagcttgaagctgagataaaacagtggatagcatcttcagtattggtgtgttctt

SEQ ID NO: 14578 - protein, 252 aa, Triticum aestivum
  peptide (1)..(252): Ceres Seq. ID no. 12626034
  misc_feature (200)..(233): Pfam Name: RING finger Pfam Description: Zinc finger, C3HC4 type
  misc_feature (47)..(250): NCBI GI NO: 21537318 NR Description: unknown [Arabidopsis thaliana]
  misc_feature (77)..(250): NCBI GI NO: 18422940 NR Description: Expressed protein; protein id: At5g48655
  misc_feature (77)..(250): NCBI GI NO: 21954077 NR Description: unknown protein [Arabidopsis thaliana]
  misc_feature (169)..(250): NCBI GI NO: 15231414 NR Description: putative RING zinc finger protein
  misc_feature (169)..(250): NCBI GI NO: 26451887 NR Description: putative RING finger protein
  misc_feature (200)..(251): NCBI GI NO: 19386727 NR Description: P0678F11.16
  misc_feature (190)..(247): NCBI GI NO: 24644441 NR Description: CG10981-PB [Drosophila melanogaster]
  misc_feature (190)..(247): NCBI GI NO: 21357313 NR Description: CG10981-PA [Drosophila melanogaster]
  misc_feature (107)..(247): NCBI GI NO: 20129579 NR Description: CG15150-PA [Drosophila melanogaster]
MSNTSGARRAARRQSLDGSADKVVVDLDASSPVAGNHHGLSVFPGARTSPIDVEALDDEVQALSPSQVPPPGVNRRTRGQPVTQFSLDEDAVLEENWRIIRQCATPFYLDEDAAMEENRRTRSQFLTPLYLDEDAALEDNAAMPSHNTWNKRQRVAPLICLSPEREEGSSLQSNNAVQISQEPAKVVVPKEPNFTCPVCLNKLVEPSTTKCGHIFCAECIKQAIQFQKKCPTCRKALRKNNFHRIYLPNSDG

SEQ ID NO: 14579 - protein, 138 aa, Triticum aestivum
  peptide (1)..(138): Ceres Seq. ID no. 12626035
  misc_feature (86)..(119): Pfam Name: RING finger Pfam Description: Zinc finger, C3HC4 type
  misc_feature (1)..(136): NCBI GI NO: 21537318 NR Description: unknown [Arabidopsis thaliana]
  misc_feature (1)..(136): NCBI GI NO: 18422940 NR Description: Expressed protein; protein id: At5g48655
  misc_feature (1)..(136): NCBI GI NO: 21954077 NR Description: unknown protein [Arabidopsis thaliana]
  misc_feature (55)..(136): NCBI GI NO: 15231414 NR Description: putative RING zinc finger protein
  misc_feature (55)..(136): NCBI GI NO: 26451887 NR Description: putative RING finger protein
  misc_feature (86)..(137): NCBI GI NO: 19386727 NR Description: P0678F11.16
  misc_feature (76)..(133): NCBI GI NO: 24644441 NR Description: CG10981-PB [Drosophila melanogaster]
  misc_feature (76)..(133): NCBI GI NO: 21357313 NR Description: CG10981-PA [Drosophila melanogaster]
  misc_feature (1)..(133): NCBI GI NO: 20129579 NR Description: CG15150-PA [Drosophila melanogaster]
MEENRRTRSQFLTPLYLDEDAALEDNAAMPSHNTWNKRQRVAPLICLSPEREEGSSLQSNNAVQISQEPAKVVVPKEPNFTCPVCLNKLVEPSTTKCGHIFCAECIKQAIQFQKKCPTCRKALRKNNFHRIYLPNSDG

SEQ ID NO: 14580 - DNA, 830 bp, Triticum aestivum
  misc_feature (1)..(830): Ceres Seq. ID no. 13597908
agaaaaccgtgggccgaaattgaaaccctgcggctgcaatggaggcggcggcggcggctgctgcggccgtgggcggggaggacgacgggcggggtcggaagggaagctggtacgcggtgggggagcgtgcggtgctggtgccgtacctgcgggagcacgtcccgcggtaccacgagtggatgcaggacccggcgctgctggaggccaccgcgtcggagccgctctccctcgcccaggagttcgaggtccaccgctcctggaccctcgaccctctcaaacatactttcatagtgctggataaggagttgatcgagggagacttcgtggtcgggaaccctcacacggaagctatgattggcgatgtcaacatctatatgaatgaccctgatgatttggaacttgcagagatagagattatgatagctgaacaaaagagccgtggaaagggactaggtcaagaagtgaccttaatgatgatgtcgtttgcagtagagaaatacggaattcacactttcagagcaaaaattagtgactcaaatactgcatcgttaaagctcttcaggaaattgggcttcaaggatgcttcccatagtgcagtttttaaggaggtgacactggaggcgcctgcagctgaactcccattaagctcccctttgaccataggaagttggtgacatctgtgattatatgccccaagatgtgttgcagtagacatgcaatcagtggctggtcttcaccaactgatagaagctaattgtgtgcgctatttggcatacttaatgtaatgagtactgccttcatctgccaacaactgcttgggccgattgctc

SEQ ID NO: 14581 - protein, 211 aa, Triticum aestivum
  peptide (1)..(211): Ceres Seq. ID no. 13597909
  misc_feature (97)..(180): Pfam Name: GNAT Pfam Description: Acetyltransferase
  misc_feature (1)..(190): NCBI GI NO: 24414273 NR Description: Unknown protein
  misc_feature (191)..(211): NCBI GI NO: 24414273 NR Description: Unknown protein
  misc_feature (28)..(200): NCBI GI NO: 18395874 NR Description: GCN5-related N-acetyltransferase (GNAT) family
  misc_feature (28)..(200): NCBI GI NO: 21554294 NR Description: unknown [Arabidopsis thaliana]
  misc_feature (27)..(199): NCBI GI NO: 13278945 NR Description: DKFZP564C103 protein [Homo sapiens]
  misc_feature (27)..(199): NCBI GI NO: 13384782 NR Description: RIKEN cDNA 1110028N05 [Mus musculus]
  misc_feature (27)..(200): NCBI GI NO: 39584036 NR Description: Hypothetical protein CBG11716
  misc_feature (27)..(199): NCBI GI NO: 34875069 NR Description: similar to RIKEN cDNA 1110028N05
  misc_feature (27)..(196): NCBI GI NO: 24651688 NR Description: CG11539-PA [Drosophila melanogaster]
  misc_feature (27)..(194): NCBI GI NO: 28829592 NR Description: similar to Mus musculus (Mouse)
MEAAAAAAAAVGGEDDGRGRKGSWYAVGERAVLVPYLREHVPRYHEWMQDPALLEATASEPLSLAQEFEVHRSWTLDPLKHTFIVLDKELIEGDFVVGNPHTEAMIGDVNIYMNDPDDLELAEIEIMIAEQKSRGKGLGQEVTLMMMSFAVEKYGIHTFRAKISDSNTASLKLFRKLGFKDASHSAVFKEVTLEAPAAELPLSSPLTIGSW

SEQ ID NO: 14582 - protein, 164 aa, Triticum aestivum
  peptide (1)..(164): Ceres Seq. ID no. 13597910
  misc_feature (50)..(133): Pfam Name: GNAT Pfam Description: Acetyltransferase
  misc_feature (1)..(143): NCBI GI NO: 24414273 NR Description: Unknown protein
  misc_feature (144)..(164): NCBI GI NO: 24414273 NR Description: Unknown protein
  misc_feature (1)..(153): NCBI GI NO: 18395874 NR Description: GCN5-related N-acetyltransferase (GNAT) family
  misc_feature (1)..(153): NCBI GI NO: 21554294 NR Description: unknown [Arabidopsis thaliana]
  misc_feature (1)..(152): NCBI GI NO: 13278945 NR Description: DKFZP564C103 protein [Homo sapiens]
  misc_feature (1)..(152): NCBI GI NO: 13384782 NR Description: RIKEN cDNA 1110028N05 [Mus musculus]
  misc_feature (1)..(153): NCBI GI NO: 39584036 NR Description: Hypothetical protein CBG11716
  misc_feature (1)..(152): NCBI GI NO: 34875069 NR Description: similar to RIKEN cDNA 1110028N05
  misc_feature (1)..(149): NCBI GI NO: 24651688 NR Description: CG11539-PA [Drosophila melanogaster]
  misc_feature (1)..(147): NCBI GI NO: 28829592 NR Description: similar to Mus musculus (Mouse)
MQDPALLEATASEPLSLAQEFEVHRSWTLDPLKHTFIVLDKELIEGDFVVGNPHTEAMIGDVNIYMNDPDDLELAEIEIMIAEQKSRGKGLGQEVTLMMMSFAVEKYGIHTFRAKISDSNTASLKLFRKLGFKDASHSAVFKEVTLEAPAAELPLSSPLTIGSW

SEQ ID NO: 14583 - protein, 107 aa, Triticum aestivum
  peptide (1)..(107): Ceres Seq. ID no. 13597911
  misc_feature (1)..(76): Pfam Name: GNAT Pfam Description: Acetyltransferase
  misc_feature (1)..(86): NCBI GI NO: 24414273 NR Description: Unknown protein
  misc_feature (87)..(107): NCBI GI NO: 24414273 NR Description: Unknown protein
  misc_feature (1)..(96): NCBI GI NO: 18395874 NR Description: GCN5-related N-acetyltransferase (GNAT) family
  misc_feature (1)..(96): NCBI GI NO: 21554294 NR Description: unknown [Arabidopsis thaliana]
  misc_feature (1)..(95): NCBI GI NO: 13278945 NR Description: DKFZP564C103 protein [Homo sapiens]
  misc_feature (1)..(95): NCBI GI NO: 13384782 NR Description: RIKEN cDNA 1110028N05 [Mus musculus]
  misc_feature (1)..(96): NCBI GI NO: 39584036 NR Description: Hypothetical protein CBG11716
  misc_feature (1)..(95): NCBI GI NO: 34875069 NR Description: similar to RIKEN cDNA 1110028N05
  misc_feature (1)..(92): NCBI GI NO: 24651688 NR Description: CG11539-PA [Drosophila melanogaster]
  misc_feature (1)..(90): NCBI GI NO: 28829592 NR Description: similar to Mus musculus (Mouse)
MIGDVNIYMNDPDDLELAEIEIMIAEQKSRGKGLGQEVTLMMMSFAVEKYGIHTFRAKISDSNTASLKLFRKLGFKDASHSAVFKEVTLEAPAAELPLSSPLTIGSW

SEQ ID NO: 14584 - DNA, 739 bp, Triticum aestivum
  misc_feature (1)..(739): Ceres Seq. ID no. 15173160
aagcaaccctgcgccattacaagactcacagattacatcatttgcaccggctgtactagcttgatcatcacaatatgtcctccaccaacagctggacccacgagatcgagtcggcggtcaccgcaccgcgcctcttccgcgctggcgtcatggactggcacaccctggctcccaagctcgcgccgcaaattgttgccagtgcccaccccgttgagggagaaggcggtatcggcagcgtcaggcagttcaacttcacctcagccatgcccttcaacctcatgaaggagaggctcgagttcattgacgcagataagtgcgagtgcaagtcgactcttatcgagggcggtggcatcggcatggcgatcgagacagccacttcgcacatcaaggtggagccggcagcaaacggtgggagcatagtgaaggtggaatcgacatacaagctgcttccaggcgtggaggtgaatgatgagattaccaaggccaaggattccgtcacggccatcttcaaggccgccgaggcctacctcatcgccaacccagacgcctacaactaaatcagttgagggatcaaatacgattatgttctccctggtttgatttttgtgtggtttcttcctgaataataaggctgctctaatctccaagtagtgatgcgagaacactaattaagtagagtgtggacctgagaagtttaaaatgtgtatttgtaactatcaaatggagctgttgtttgatg

SEQ ID NO: 14585 - protein, 160 aa, Triticum aestivum
  peptide (1)..(160): Ceres Seq. ID no. 15173161
  misc_feature (2)..(155): Pfam Name: Pfam Description:  Pathogenesis-related protein Bet v I family
  misc_feature (1)..(160): NCBI GI NO: 16589076 NR Description: pathogen-related protein [Oryza sativa]
  misc_feature (1)..(160): NCBI GI NO: 7442203 NR Description: pathogenesis-related protein - sorghum
  misc_feature (3)..(159): NCBI GI NO: 1572683 NR Description: early flowering protein 1 [Asparagus officinalis]
  misc_feature (6)..(159): NCBI GI NO: 939857 NR Description: pathogenesis related protein
  misc_feature (3)..(159): NCBI GI NO: 4210626 NR Description: intracellular pathogenesis-related protein
  misc_feature (3)..(159): NCBI GI NO: 4210624 NR Description: intracellular pathogenesis-related protein
  misc_feature (3)..(159): NCBI GI NO: 4210622 NR Description: intracellular pathogenesis-related protein isoform4
  misc_feature (3)..(159): NCBI GI NO: 548591 NR Description: Pathogenesis-related protein 1 (AOPR1)
  misc_feature (3)..(159): NCBI GI NO: 4210628 NR Description: intracellular pathogenesis-related protein
  misc_feature (10)..(159): NCBI GI NO: 6649902 NR Description: intracellular pathogenesis-related protein PR-105
MSSTNSWTHEIESAVTAPRLFRAGVMDWHTLAPKLAPQIVASAHPVEGEGGIGSVRQFNFTSAMPFNLMKERLEFIDADKCECKSTLIEGGGIGMAIETATSHIKVEPAANGGSIVKVESTYKLLPGVEVNDEITKAKDSVTAIFKAAEAYLIANPDAYN

SEQ ID NO: 14586 - protein, 135 aa, Triticum aestivum
  peptide (1)..(135): Ceres Seq. ID no. 15173162
  misc_feature (1)..(130): Pfam Name: Pfam Description:  Pathogenesis-related protein Bet v I family
  misc_feature (1)..(135): NCBI GI NO: 16589076 NR Description: pathogen-related protein [Oryza sativa]
  misc_feature (1)..(135): NCBI GI NO: 7442203 NR Description: pathogenesis-related protein - sorghum
  misc_feature (1)..(134): NCBI GI NO: 1572683 NR Description: early flowering protein 1 [Asparagus officinalis]
  misc_feature (1)..(134): NCBI GI NO: 939857 NR Description: pathogenesis related protein
  misc_feature (1)..(134): NCBI GI NO: 4210626 NR Description: intracellular pathogenesis-related protein
  misc_feature (1)..(134): NCBI GI NO: 4210624 NR Description: intracellular pathogenesis-related protein
  misc_feature (1)..(134): NCBI GI NO: 4210622 NR Description: intracellular pathogenesis-related protein isoform4
  misc_feature (1)..(134): NCBI GI NO: 548591 NR Description: Pathogenesis-related protein 1 (AOPR1)
  misc_feature (1)..(134): NCBI GI NO: 4210628 NR Description: intracellular pathogenesis-related protein
  misc_feature (1)..(134): NCBI GI NO: 6649902 NR Description: intracellular pathogenesis-related protein PR-105
MDWHTLAPKLAPQIVASAHPVEGEGGIGSVRQFNFTSAMPFNLMKERLEFIDADKCECKSTLIEGGGIGMAIETATSHIKVEPAANGGSIVKVESTYKLLPGVEVNDEITKAKDSVTAIFKAAEAYLIANPDAYN

SEQ ID NO: 14587 - protein, 97 aa, Triticum aestivum
  peptide (1)..(97): Ceres Seq. ID no. 15173163
  misc_feature (1)..(92): Pfam Name: Pfam Description:  Pathogenesis-related protein Bet v I family
  misc_feature (1)..(97): NCBI GI NO: 16589076 NR Description: pathogen-related protein [Oryza sativa]
  misc_feature (1)..(97): NCBI GI NO: 7442203 NR Description: pathogenesis-related protein - sorghum
  misc_feature (1)..(96): NCBI GI NO: 1572683 NR Description: early flowering protein 1 [Asparagus officinalis]
  misc_feature (1)..(96): NCBI GI NO: 939857 NR Description: pathogenesis related protein
  misc_feature (1)..(96): NCBI GI NO: 4210626 NR Description: intracellular pathogenesis-related protein
  misc_feature (1)..(96): NCBI GI NO: 4210624 NR Description: intracellular pathogenesis-related protein
  misc_feature (1)..(96): NCBI GI NO: 4210622 NR Description: intracellular pathogenesis-related protein isoform4
  misc_feature (1)..(96): NCBI GI NO: 548591 NR Description: Pathogenesis-related protein 1 (AOPR1)
  misc_feature (1)..(96): NCBI GI NO: 4210628 NR Description: intracellular pathogenesis-related protein
  misc_feature (1)..(96): NCBI GI NO: 6649902 NR Description: intracellular pathogenesis-related protein PR-105
MPFNLMKERLEFIDADKCECKSTLIEGGGIGMAIETATSHIKVEPAANGGSIVKVESTYKLLPGVEVNDEITKAKDSVTAIFKAAEAYLIANPDAYN

SEQ ID NO: 14588 - DNA, 681 bp, Triticum aestivum
  misc_feature (1)..(681): Ceres Seq. ID no. 13591179
atcccgmacgcgcacggccgcagcctttcactcccaacccttgtctccaatggcggccacggccgcggcggcgacgctggcggcggccacctcctccctcctccggcgctcctccttgctgcggccgcacgggctccgggtctcccgcgacttcgctccccgaagatttgtgcgccacattgcttcatcaacaaatgaagaggctgctgccagaacagcggcagcaactgctgatactggaggaccgaccatttttgacaagatcatagcaaaggaaatcccttcaagcattgtctatgaggacgagaaagtcttagcatttagagatatcaatccgcaagctcctgtgcatgttctagtcatcccgaaactaagagatgggctaactggacttgataaggctgaaccaaggcatgctgaaattctggggcagctgctttacgctgcgaaggtagtggccgagaaggaaggcgtggcagatggattccgggtcgtcataaacaacggagcagaaggatgtcaatcagtctaccatctgcacgtacatgtacttggtggaaggcagatgaaatggcctcctggttaagtttaagaacagtgtctgccttttttctgcttctgtatgatcgatcatactagactgctattgagtttctactacttgccacctgscttgttatt

SEQ ID NO: 14589 - protein, 194 aa, Triticum aestivum
  peptide (1)..(194): Ceres Seq. ID no. 15221031
  misc_feature (54)..(194): NCBI GI NO: 15221629 NR Description: protein kinase C inhibitor
  misc_feature (54)..(175): NCBI GI NO: 25518144 NR Description: F28K20.9 protein - Arabidopsis thaliana
  misc_feature (174)..(194): NCBI GI NO: 25518144 NR Description: F28K20.9 protein - Arabidopsis thaliana
  misc_feature (63)..(194): NCBI GI NO: 629858 NR Description: protein kinase C inhibitor - maize
  misc_feature (59)..(194): NCBI GI NO: 18410510 NR Description: protein kinase C inhibitor-related protein
  misc_feature (63)..(194): NCBI GI NO: 1177047 NR Description: 14 KD ZINC-BINDING PROTEIN
  misc_feature (67)..(194): NCBI GI NO: 11260559 NR Description: protein kinase C inhibitor-like protein -Arabidopsis thaliana
  misc_feature (83)..(194): NCBI GI NO: 1177046 NR Description: 14 KD ZINC-BINDING PROTEIN
  misc_feature (87)..(194): NCBI GI NO: 23480654 NR Description: putative protein kinase C interacting protein 1
  misc_feature (65)..(194): NCBI GI NO: 23612841 NR Description: protein kinase c inhibitor-like protein, putative
  misc_feature (2)..(2): Xaa is any aa, unknown or other
SXTRTAAAFHSQPLSPMAATAAAATLAAATSSLLRRSSLLRPHGLRVSRDFAPRRFVRHIASSTNEEAAARTAAATADTGGPTIFDKIIAKEIPSSIVYEDEKVLAFRDINPQAPVHVLVIPKLRDGLTGLDKAEPRHAEILGQLLYAAKVVAEKEGVADGFRVVINNGAEGCQSVYHLHVHVLGGRQMKWPPG

SEQ ID NO: 14590 - protein, 178 aa, Triticum aestivum
  peptide (1)..(178): Ceres Seq. ID no. 15221032
  misc_feature (38)..(178): NCBI GI NO: 15221629 NR Description: protein kinase C inhibitor
  misc_feature (38)..(159): NCBI GI NO: 25518144 NR Description: F28K20.9 protein - Arabidopsis thaliana
  misc_feature (158)..(178): NCBI GI NO: 25518144 NR Description: F28K20.9 protein - Arabidopsis thaliana
  misc_feature (47)..(178): NCBI GI NO: 629858 NR Description: protein kinase C inhibitor - maize
  misc_feature (43)..(178): NCBI GI NO: 18410510 NR Description: protein kinase C inhibitor-related protein
  misc_feature (47)..(178): NCBI GI NO: 1177047 NR Description: 14 KD ZINC-BINDING PROTEIN
  misc_feature (51)..(178): NCBI GI NO: 11260559 NR Description: protein kinase C inhibitor-like protein -Arabidopsis thaliana
  misc_feature (67)..(178): NCBI GI NO: 1177046 NR Description: 14 KD ZINC-BINDING PROTEIN
  misc_feature (71)..(178): NCBI GI NO: 23480654 NR Description: putative protein kinase C interacting protein 1
  misc_feature (49)..(178): NCBI GI NO: 23612841 NR Description: protein kinase c inhibitor-like protein, putative
MAATAAAATLAAATSSLLRRSSLLRPHGLRVSRDFAPRRFVRHIASSTNEEAAARTAAATADTGGPTIFDKIIAKEIPSSIVYEDEKVLAFRDINPQAPVHVLVIPKLRDGLTGLDKAEPRHAEILGQLLYAAKVVAEKEGVADGFRVVINNGAEGCQSVYHLHVHVLGGRQMKWPPG

SEQ ID NO: 14591 - DNA, 1410 bp, Triticum aestivum
  misc_feature (1)..(1410): Ceres Seq. ID no. 13662937
gcttctcgccgcgccctctttccccctcccctcccccgcctcgcccactgccccctcgatccagcgcgggagcaccagatggatcggccggcgccggaccagcggcccacgctcttctcgccgtaccagatgcgccgcttcagcctcgcccaccgggtggtgctggcgccgatgacgaggtgcagggccatcggcgggctgccggggccggcgctggcggagtactacgcgcagcgggtcacccagggaggcctgctcatctccgagggcaccgtcgtctcgccggccgggccggggtttcctcacgtccctggaatatacaatcaggagcagatagatggatggaaaaaggtggtggatgctgttcatgctaagggaggcatctttttctgtcaattatggcacgtaggcagagcttctcaccaagtataccagccggacggtgctgctccaatatcctcaactgataagccgatatcagcaaggtggaagatattgctgcctgatggttcatacggaacgtatcccacgccaagccgccttgcgacatcggaaataccagacatagtcgagcaatatcgccaagctgccataaacgccatcaaagcaggtttcgatggcatcgagatccacggcgctcatggctacatcatcgatcagttcctcaaggatggcatcaacgaccgcaccgacgagtatggcggatcgctcaccaaccgttgcaagtttctactcgaggtgacccgagccgtggtatccgccatcagagcagagcgaactgcggtgagggtgtcaccggccatcgaccaccttgacgcctatgactcgaacccaatgcagctaggcatggccgtcgtcgaacggctcaacgctctccagcaggaagccgggcagctcgcctacctccacgtgacacagccaaggtacgcggcctacgggcagacagagtcgggcccgcatggcagcgccgaggaggagagccggctgatgcgcaccctgcggggcgcgtaccgtggcacgttcatgtgcagcggcggctacacgcgggagctcgggctggaggcggtggagagcggcgacgccgacctggtgtcgttcgggcggctgttcatttcgaacccggacctggtcgagcggctcaggctcaacgccggcctcaacaagtacgtgaggaagacgttctacacccctgaccccgtcgtgggctacaccgactacccgttcctcggcaagcctaaatcgcgcatgtagtgtgtacaaggttagtgatcggagatgggatttattgttaagtgtatttgggggaataaggtcatatacgcgcatgtagtgtacacgaattagtgatcggagaacagagatgggtttgtgaaacgtatttgaagaaaataaagtaatatacgtgactgc

SEQ ID NO: 14592 - protein, 416 aa, Triticum aestivum
  peptide (1)..(416): Ceres Seq. ID no. 13662938
  misc_feature (38)..(387): Pfam Name: Pfam Description:  NADH:flavin oxidoreductase / NADH oxidase family
  misc_feature (27)..(409): NCBI GI NO: 12056507 NR Description: 12-oxophytodienoate reductase 3
  misc_feature (37)..(416): NCBI GI NO: 6707797 NR Description: 12-oxo-phytodienoate reductase
  misc_feature (37)..(416): NCBI GI NO: 5059115 NR Description: OPDA-reductase homolog [Arabidopsis thaliana]
  misc_feature (37)..(416): NCBI GI NO: 10242314 NR Description: 12-oxo-phytodienoate reductase
  misc_feature (37)..(416): NCBI GI NO: 7688991 NR Description: 12-oxo-phytodienoate reductase
  misc_feature (37)..(416): NCBI GI NO: 15225045 NR Description: 12-oxophytodienoate reductase (OPR3)(DDE1)
  misc_feature (19)..(409): NCBI GI NO: 7449901 NR Description: probable 12-oxophytodienoate reductase (EC1
  misc_feature (38)..(409): NCBI GI NO: 40645459 NR Description: LEDI-5c protein [Lithospermum erythrorhizon]
  misc_feature (33)..(409): NCBI GI NO: 14277800 NR Description: Chain A
  misc_feature (27)..(409): NCBI GI NO: 15223138 NR Description: 12-oxophytodienoate reductase (OPR1)
ASRRALFPPPLPRLAHCPLDPAREHQMDRPAPDQRPTLFSPYQMRRFSLAHRVVLAPMTRCRAIGGLPGPALAEYYAQRVTQGGLLISEGTVVSPAGPGFPHVPGIYNQEQIDGWKKVVDAVHAKGGIFFCQLWHVGRASHQVYQPDGAAPISSTDKPISARWKILLPDGSYGTYPTPSRLATSEIPDIVEQYRQAAINAIKAGFDGIEIHGAHGYIIDQFLKDGINDRTDEYGGSLTNRCKFLLEVTRAVVSAIRAERTAVRVSPAIDHLDAYDSNPMQLGMAVVERLNALQQEAGQLAYLHVTQPRYAAYGQTESGPHGSAEEESRLMRTLRGAYRGTFMCSGGYTRELGLEAVESGDADLVSFGRLFISNPDLVERLRLNAGLNKYVRKTFYTPDPVVGYTDYPFLGKPKSRM

SEQ ID NO: 14593 - protein, 390 aa, Triticum aestivum
  peptide (1)..(390): Ceres Seq. ID no. 13662939
  misc_feature (12)..(361): Pfam Name: Pfam Description:  NADH:flavin oxidoreductase / NADH oxidase family
  misc_feature (1)..(383): NCBI GI NO: 12056507 NR Description: 12-oxophytodienoate reductase 3
  misc_feature (11)..(390): NCBI GI NO: 6707797 NR Description: 12-oxo-phytodienoate reductase
  misc_feature (11)..(390): NCBI GI NO: 5059115 NR Description: OPDA-reductase homolog [Arabidopsis thaliana]
  misc_feature (11)..(390): NCBI GI NO: 10242314 NR Description: 12-oxo-phytodienoate reductase
  misc_feature (11)..(390): NCBI GI NO: 7688991 NR Description: 12-oxo-phytodienoate reductase
  misc_feature (11)..(390): NCBI GI NO: 15225045 NR Description: 12-oxophytodienoate reductase (OPR3)(DDE1)
  misc_feature (1)..(383): NCBI GI NO: 7449901 NR Description: probable 12-oxophytodienoate reductase (EC1
  misc_feature (12)..(383): NCBI GI NO: 40645459 NR Description: LEDI-5c protein [Lithospermum erythrorhizon]
  misc_feature (7)..(383): NCBI GI NO: 14277800 NR Description: Chain A
  misc_feature (1)..(383): NCBI GI NO: 15223138 NR Description: 12-oxophytodienoate reductase (OPR1)
MDRPAPDQRPTLFSPYQMRRFSLAHRVVLAPMTRCRAIGGLPGPALAEYYAQRVTQGGLLISEGTVVSPAGPGFPHVPGIYNQEQIDGWKKVVDAVHAKGGIFFCQLWHVGRASHQVYQPDGAAPISSTDKPISARWKILLPDGSYGTYPTPSRLATSEIPDIVEQYRQAAINAIKAGFDGIEIHGAHGYIIDQFLKDGINDRTDEYGGSLTNRCKFLLEVTRAVVSAIRAERTAVRVSPAIDHLDAYDSNPMQLGMAVVERLNALQQEAGQLAYLHVTQPRYAAYGQTESGPHGSAEEESRLMRTLRGAYRGTFMCSGGYTRELGLEAVESGDADLVSFGRLFISNPDLVERLRLNAGLNKYVRKTFYTPDPVVGYTDYPFLGKPKSRM

SEQ ID NO: 14594 - protein, 373 aa, Triticum aestivum
  peptide (1)..(373): Ceres Seq. ID no. 13662940
  misc_feature (1)..(344): Pfam Name: Pfam Description:  NADH:flavin oxidoreductase / NADH oxidase family
  misc_feature (1)..(366): NCBI GI NO: 12056507 NR Description: 12-oxophytodienoate reductase 3
  misc_feature (1)..(373): NCBI GI NO: 6707797 NR Description: 12-oxo-phytodienoate reductase
  misc_feature (1)..(373): NCBI GI NO: 5059115 NR Description: OPDA-reductase homolog [Arabidopsis thaliana]
  misc_feature (1)..(373): NCBI GI NO: 10242314 NR Description: 12-oxo-phytodienoate reductase
  misc_feature (1)..(373): NCBI GI NO: 7688991 NR Description: 12-oxo-phytodienoate reductase
  misc_feature (1)..(373): NCBI GI NO: 15225045 NR Description: 12-oxophytodienoate reductase (OPR3)(DDE1)
  misc_feature (1)..(366): NCBI GI NO: 7449901 NR Description: probable 12-oxophytodienoate reductase (EC1
  misc_feature (1)..(366): NCBI GI NO: 40645459 NR Description: LEDI-5c protein [Lithospermum erythrorhizon]
  misc_feature (1)..(366): NCBI GI NO: 14277800 NR Description: Chain A
  misc_feature (1)..(366): NCBI GI NO: 15223138 NR Description: 12-oxophytodienoate reductase (OPR1)
MRRFSLAHRVVLAPMTRCRAIGGLPGPALAEYYAQRVTQGGLLISEGTVVSPAGPGFPHVPGIYNQEQIDGWKKVVDAVHAKGGIFFCQLWHVGRASHQVYQPDGAAPISSTDKPISARWKILLPDGSYGTYPTPSRLATSEIPDIVEQYRQAAINAIKAGFDGIEIHGAHGYIIDQFLKDGINDRTDEYGGSLTNRCKFLLEVTRAVVSAIRAERTAVRVSPAIDHLDAYDSNPMQLGMAVVERLNALQQEAGQLAYLHVTQPRYAAYGQTESGPHGSAEEESRLMRTLRGAYRGTFMCSGGYTRELGLEAVESGDADLVSFGRLFISNPDLVERLRLNAGLNKYVRKTFYTPDPVVGYTDYPFLGKPKSRM

SEQ ID NO: 14595 - DNA, 1542 bp, Triticum aestivum
  misc_feature (1)..(1542): Ceres Seq. ID no. 13662984
gtgtgtcccttcccggaagaattccccaattaaaagatctctctctctctctctctctcgtcacatccacctcactccctcgcttcctgctgccattccgcggccggacatgtcgtcgtcgggggccggcgaggagggcgccgccgcgccgcaggggccgctgcccgtggagcaccgcaagggcgccaacgggctcgacaaggtcgtcctccgcgaggcccggcgcatctccgccgaggtgtacctgtatggtggccatgtaacatcatggaaagatgagcatggggaggagctgcttttcgttagtaataaggctattttcaaacctccaaaagctatacgtggaggtataccaatctgctttcctcagttttccaacttcggacagctggaagctcatggatttgcaaggaacaagatctggagtgttgacactgatccaccaccatttccagtaccaatctctagtagagcttacatcgatttaatccttaaacctactgatgaagacttaaagatctggccacatagttttgagtaccgtctgagggttgcacttggacctggtggagatctgatgctgacttcacgtataaggaatacgaatgcagatggaaagccattctcttttacctttgcatatcacacgtacttctcaatttctgatataagtgagatacgagtagaaggcctggaaactctggattacctagacaacttacaagatagggcccgcttcactgaacaaggcgatgctattgtttttgaatctgagttggacagaatatatctgggcacgccgtcaaaaattgccattattgatcatgagaaaaaaagaacatttgttgtgaggaaaggaggacttccggatgctgttgtttggaacccatgggacaaaaaagctaaggcaatggcagattttggggatgacgaatataaacgcatggtatgtgtggaagcagctgctatagaaaaggcgattactctgaagcctggcgaggagtggactggaaaattggaactatctgcagttccgtctagttattacagtggtcaattggacccagatcgtgttattcaggattcagttgttccggaggattcagtcagctagcccttagtcaagttctgtgcaggtagactattaatatcatatgcacaagggaaatggcagccacgagtgtccaaacatttcttccattctattcaaatctttgttattttcagcgtaccgaccggaacagagcgaaaatctcaacactggtttctgtttcgggatccacatgacataaagggacaaatcagtgtttgtgccctgcatagggatgatcgaagaaacatcttagatgggttgtaaaataaatttataactgtattttctttatcagtttcttttattcccagatgagtaagtttcatagtgtggccaaaaggcgaagacgatgttgaaccacctttcagataaacacacatgatgtgtaaacatgccaaggttttgagttgcatggcttgttggtggttgcggaaccatgcttattttgg

SEQ ID NO: 14596 - protein, 370 aa, Triticum aestivum
  peptide (1)..(370): Ceres Seq. ID no. 13662985
  misc_feature (66)..(342): Pfam Name: Pfam Description:  Aldose 1-epimerase
  misc_feature (38)..(370): NCBI GI NO: 19387263 NR Description: putative apospory-associated protein C
  misc_feature (50)..(360): NCBI GI NO: 38344152 NR Description: OSJNBa0041A02.19
  misc_feature (57)..(360): NCBI GI NO: 15242099 NR Description: aldose 1-epimerase family [Arabidopsis thaliana]
  misc_feature (26)..(360): NCBI GI NO: 40253263 NR Description: putative Aldose 1-epimerase
  misc_feature (31)..(359): NCBI GI NO: 2501555 NR Description: POSSIBLE APOSPORY-ASSOCIATED PROTEIN C
  misc_feature (60)..(354): NCBI GI NO: 15233165 NR Description: aldose 1-epimerase family [Arabidopsis thaliana]
  misc_feature (54)..(363): NCBI GI NO: 18395868 NR Description: aldose 1-epimerase family [Arabidopsis thaliana]
  misc_feature (39)..(347): NCBI GI NO: 15236591 NR Description: aldose 1-epimerase family [Arabidopsis thaliana]
  misc_feature (54)..(363): NCBI GI NO: 16612258 NR Description: AT3g01590/F4P13_13 [Arabidopsis thaliana]
  misc_feature (54)..(359): NCBI GI NO: 18417396 NR Description: aldose 1-epimerase family [Arabidopsis thaliana]
CVPSRKNSPIKRSLSLSLSRHIHLTPSLPAAIPRPDMSSSGAGEEGAAAPQGPLPVEHRKGANGLDKVVLREARRISAEVYLYGGHVTSWKDEHGEELLFVSNKAIFKPPKAIRGGIPICFPQFSNFGQLEAHGFARNKIWSVDTDPPPFPVPISSRAYIDLILKPTDEDLKIWPHSFEYRLRVALGPGGDLMLTSRIRNTNADGKPFSFTFAYHTYFSISDISEIRVEGLETLDYLDNLQDRARFTEQGDAIVFESELDRIYLGTPSKIAIIDHEKKRTFVVRKGGLPDAVVWNPWDKKAKAMADFGDDEYKRMVCVEAAAIEKAITLKPGEEWTGKLELSAVPSSYYSGQLDPDRVIQDSVVPEDSVS

SEQ ID NO: 14597 - protein, 334 aa, Triticum aestivum
  peptide (1)..(334): Ceres Seq. ID no. 13662986
  misc_feature (30)..(306): Pfam Name: Pfam Description:  Aldose 1-epimerase
  misc_feature (2)..(334): NCBI GI NO: 19387263 NR Description: putative apospory-associated protein C
  misc_feature (14)..(324): NCBI GI NO: 38344152 NR Description: OSJNBa0041A02.19
  misc_feature (21)..(324): NCBI GI NO: 15242099 NR Description: aldose 1-epimerase family [Arabidopsis thaliana]
  misc_feature (1)..(324): NCBI GI NO: 40253263 NR Description: putative Aldose 1-epimerase
  misc_feature (1)..(323): NCBI GI NO: 2501555 NR Description: POSSIBLE APOSPORY-ASSOCIATED PROTEIN C
  misc_feature (24)..(318): NCBI GI NO: 15233165 NR Description: aldose 1-epimerase family [Arabidopsis thaliana]
  misc_feature (18)..(327): NCBI GI NO: 18395868 NR Description: aldose 1-epimerase family [Arabidopsis thaliana]
  misc_feature (3)..(311): NCBI GI NO: 15236591 NR Description: aldose 1-epimerase family [Arabidopsis thaliana]
  misc_feature (18)..(327): NCBI GI NO: 16612258 NR Description: AT3g01590/F4P13_13 [Arabidopsis thaliana]
  misc_feature (18)..(323): NCBI GI NO: 18417396 NR Description: aldose 1-epimerase family [Arabidopsis thaliana]
MSSSGAGEEGAAAPQGPLPVEHRKGANGLDKVVLREARRISAEVYLYGGHVTSWKDEHGEELLFVSNKAIFKPPKAIRGGIPICFPQFSNFGQLEAHGFARNKIWSVDTDPPPFPVPISSRAYIDLILKPTDEDLKIWPHSFEYRLRVALGPGGDLMLTSRIRNTNADGKPFSFTFAYHTYFSISDISEIRVEGLETLDYLDNLQDRARFTEQGDAIVFESELDRIYLGTPSKIAIIDHEKKRTFVVRKGGLPDAVVWNPWDKKAKAMADFGDDEYKRMVCVEAAAIEKAITLKPGEEWTGKLELSAVPSSYYSGQLDPDRVIQDSVVPEDSVS

SEQ ID NO: 14598 - DNA, 1185 bp, Triticum aestivum
  misc_feature (1)..(1185): Ceres Seq. ID no. 13656147
actagagcagaaccacatctcatccatccccaaccccagccccaaaccccccaaagtggaagagaagattgttgcggcggcggatcggagtgagaagaatcaatggcttccgacggcgtggtggccctgtacggcaacaacaaggcggtggtggagccctccgccaagcctgccgccgccaccttctccgtcaaggtgggcctcgcccagatgctgcgcggcggcgtcatcatggacgtggtcaccgccgagcaggcgcgcctcgccgaggaggccggcgcctgcgccgtcatggcgctggagcgcgtgcccgccgacatccgcgcccagggcggcgtggcccgcatgtccgacccggccctcatccgcgacatcaagcgcgccgtcaccatcccggtgatggccaaggcccgcatcgggcacttcgtggaggcccagatcctggaggccatcggcgtggactacgtggacgagagcgaggtcctgaccctcgccgacgacgcccaccacatcaacaagcacaacttccgtgtccccttcgtgtgcggctgccgcgacctgggggaggcgctccgccgcatccgcgagggcgccgccatgatccacaccaagggcgaggccggcaccggtaacgtggtggaggccgtccgccacgtccgctccgtgatgggcgccgtccgcgccctgcgcaacatggacgaggacgaggtcttcagctacgccaagcagatcgccgccccgtacgacctggtgatgcagaccaagcagctgggccgcctcccggtggtgcagttcgccgccggcggcgtggccacccccgcggacgccgccctgatgatgcagctcgggtgcgacggggtgttcgtcggctccggcatcttcaagagcggcgacccggcgcgtcgcgcccgcgccatcgtgcaggccgtgacgcactacagcgacccggagatcctggccaacgtcagcgcggggctcggggaggccatggtggggatcaacctgtccgaccccaacgtggagcgcttcgccgcccgatcccagtagcttcataccttgttgccaagttggtgccatggatcgtcgtcgtaataacttgaatctggctttgcatcatgtgtcgttttgttcctctactctaggtgcatcatcatgtattatccagcagaactatcttgggtgttg

SEQ ID NO: 14599 - protein, 314 aa, Triticum aestivum
  peptide (1)..(314): Ceres Seq. ID no. 13656148
  misc_feature (27)..(233): Pfam Name: Pfam Description:  SOR/SNZ family
  misc_feature (1)..(314): NCBI GI NO: 34394152 NR Description: putative ethylene-inducible protein
  misc_feature (1)..(313): NCBI GI NO: 37530308 NR Description: putative pyridoxine/pyridoxal 5-phosphatebiosynthesis protein
  misc_feature (1)..(314): NCBI GI NO: 10719739 NR Description: putative pyridoxine biosynthetic enzyme
  misc_feature (1)..(314): NCBI GI NO: 15240972 NR Description: pyridoxine biosynthesis protein - like
  misc_feature (1)..(314): NCBI GI NO: 2501578 NR Description: ETHYLENE-INDUCIBLE PROTEIN HEVER
  misc_feature (1)..(314): NCBI GI NO: 21617922 NR Description: pyridoxine biosynthesis protein-like
  misc_feature (1)..(314): NCBI GI NO: 13310484 NR Description: Sor-like protein [Ginkgo biloba]
  misc_feature (1)..(314): NCBI GI NO: 15224470 NR Description: SOR1 from the fungus Cercospora nicotianae -related
  misc_feature (26)..(312): NCBI GI NO: 22970419 NR Description: hypothetical protein [Chloroflexus aurantiacus]
  misc_feature (20)..(312): NCBI GI NO: 19115894 NR Description: putative stress-induced protein
MASDGVVALYGNNKAVVEPSAKPAAATFSVKVGLAQMLRGGVIMDVVTAEQARLAEEAGACAVMALERVPADIRAQGGVARMSDPALIRDIKRAVTIPVMAKARIGHFVEAQILEAIGVDYVDESEVLTLADDAHHINKHNFRVPFVCGCRDLGEALRRIREGAAMIHTKGEAGTGNVVEAVRHVRSVMGAVRALRNMDEDEVFSYAKQIAAPYDLVMQTKQLGRLPVVQFAAGGVATPADAALMMQLGCDGVFVGSGIFKSGDPARRARAIVQAVTHYSDPEILANVSAGLGEAMVGINLSDPNVERFAARSQ

SEQ ID NO: 14600 - protein, 278 aa, Triticum aestivum
  peptide (1)..(278): Ceres Seq. ID no. 13656149
  misc_feature (1)..(197): Pfam Name: Pfam Description:  SOR/SNZ family
  misc_feature (1)..(278): NCBI GI NO: 34394152 NR Description: putative ethylene-inducible protein
  misc_feature (1)..(277): NCBI GI NO: 37530308 NR Description: putative pyridoxine/pyridoxal 5-phosphatebiosynthesis protein
  misc_feature (1)..(278): NCBI GI NO: 10719739 NR Description: putative pyridoxine biosynthetic enzyme
  misc_feature (1)..(278): NCBI GI NO: 15240972 NR Description: pyridoxine biosynthesis protein - like
  misc_feature (1)..(278): NCBI GI NO: 2501578 NR Description: ETHYLENE-INDUCIBLE PROTEIN HEVER
  misc_feature (1)..(278): NCBI GI NO: 21617922 NR Description: pyridoxine biosynthesis protein-like
  misc_feature (1)..(278): NCBI GI NO: 13310484 NR Description: Sor-like protein [Ginkgo biloba]
  misc_feature (1)..(278): NCBI GI NO: 15224470 NR Description: SOR1 from the fungus Cercospora nicotianae -related
  misc_feature (1)..(276): NCBI GI NO: 22970419 NR Description: hypothetical protein [Chloroflexus aurantiacus]
  misc_feature (1)..(276): NCBI GI NO: 19115894 NR Description: putative stress-induced protein
MLRGGVIMDVVTAEQARLAEEAGACAVMALERVPADIRAQGGVARMSDPALIRDIKRAVTIPVMAKARIGHFVEAQILEAIGVDYVDESEVLTLADDAHHINKHNFRVPFVCGCRDLGEALRRIREGAAMIHTKGEAGTGNVVEAVRHVRSVMGAVRALRNMDEDEVFSYAKQIAAPYDLVMQTKQLGRLPVVQFAAGGVATPADAALMMQLGCDGVFVGSGIFKSGDPARRARAIVQAVTHYSDPEILANVSAGLGEAMVGINLSDPNVERFAARSQ

SEQ ID NO: 14601 - protein, 271 aa, Triticum aestivum
  peptide (1)..(271): Ceres Seq. ID no. 13656150
  misc_feature (1)..(190): Pfam Name: Pfam Description:  SOR/SNZ family
  misc_feature (1)..(271): NCBI GI NO: 34394152 NR Description: putative ethylene-inducible protein
  misc_feature (1)..(270): NCBI GI NO: 37530308 NR Description: putative pyridoxine/pyridoxal 5-phosphatebiosynthesis protein
  misc_feature (1)..(271): NCBI GI NO: 10719739 NR Description: putative pyridoxine biosynthetic enzyme
  misc_feature (1)..(271): NCBI GI NO: 15240972 NR Description: pyridoxine biosynthesis protein - like
  misc_feature (1)..(271): NCBI GI NO: 2501578 NR Description: ETHYLENE-INDUCIBLE PROTEIN HEVER
  misc_feature (1)..(271): NCBI GI NO: 21617922 NR Description: pyridoxine biosynthesis protein-like
  misc_feature (1)..(271): NCBI GI NO: 13310484 NR Description: Sor-like protein [Ginkgo biloba]
  misc_feature (1)..(271): NCBI GI NO: 15224470 NR Description: SOR1 from the fungus Cercospora nicotianae -related
  misc_feature (1)..(269): NCBI GI NO: 22970419 NR Description: hypothetical protein [Chloroflexus aurantiacus]
  misc_feature (1)..(269): NCBI GI NO: 19115894 NR Description: putative stress-induced protein
MDVVTAEQARLAEEAGACAVMALERVPADIRAQGGVARMSDPALIRDIKRAVTIPVMAKARIGHFVEAQILEAIGVDYVDESEVLTLADDAHHINKHNFRVPFVCGCRDLGEALRRIREGAAMIHTKGEAGTGNVVEAVRHVRSVMGAVRALRNMDEDEVFSYAKQIAAPYDLVMQTKQLGRLPVVQFAAGGVATPADAALMMQLGCDGVFVGSGIFKSGDPARRARAIVQAVTHYSDPEILANVSAGLGEAMVGINLSDPNVERFAARSQ

SEQ ID NO: 14602 - DNA, 1367 bp, Triticum aestivum
  misc_feature (1)..(1367): Ceres Seq. ID no. 13655881
gctctctcgcatcccgatctcccctgctgctttcttctcctcctcatcccaaaccctagcccccctccgcctcggccaccgcttcgtcgccatggccgccgccgccgcggaggagttcgtgaagggtcgcgtcttccccaacggcgtcgcggtcatcaccctcgaccgccccaaggccctcaacgccatgaacctcgaaatggaccttaggtacaagacatttcttgatgactgggaaacaaatccaaacgtgaagtgcattcttgtggaaagcagttctccgcgtgccttctcagctgggatggatattaagggcgttgcagcggaaattcaaaaggacaagagcacatcacttgtgcaaaaggtcttcacagctgagtactctttgatttgcaagatacatgagtatgcaaaaccttatatatgcttgatggatggtgtgaccatggggtttggaattggattgtctggacatgggcgctaccgcattattacggagagaacactgctggccatgccggaaaatggtattggcttgttcccagatgttggctttgcttacatcggtgcaaaagcgccaggagggggtgcagtcggagcttaccttgggatgacaggaaaaagaatatcttcacctgctgatgctctattcattggtctcggaacccattatgtaccttccggggacttgggttcactcaaggaatccctcctgagtgctaacttcrctgctgatcctcacaaagatgttgagtcactcctgactgggtacaagaaggagcctgagtcggtgccccaattagaaaagcttttaccggatatcgtttcttcttttggtcctgataaatcagctactgaatctgtggaagagctaaagaagcgtactcaaaatggtgatgccacagtgtcagaatgggccaatgatgctttagcaggacttaagaaaggtgctccgttttctctttgtttaacacagaaacatttctctcgagttgcatcatcatatgggaacaatgaaaattatctatctaagttggctggtgttatgaaattggagtaccgtattgccttgagatcgtcggttcgaaatgattttgctgaaggcgtacgcgctgtcttagttgacaaggaccagaatccaaaatggagtccagcaactctggaagaggtaaacatggatgaggtcgaatcagtgtttgaaccattagctgccgatgctgagttgaatgtgtgattttctgtagcagcccagaatgctgtgaccacctgaacaccctttgtccttccgatgatgtaataggaaattactacaaacctacacacggctatccattgagccaataaatttgcctggagtgcatcgtctg

SEQ ID NO: 14603 - protein, 410 aa, Triticum aestivum
  peptide (1)..(410): Ceres Seq. ID no. 15219778
  misc_feature (50)..(226): Pfam Name: Pfam Description:  Enoyl-CoA hydratase/isomerase family
  misc_feature (31)..(407): NCBI GI NO: 15235689 NR Description: 3-hydroxyisobutyryl-coenzyme A hydrolase
  misc_feature (7)..(410): NCBI GI NO: 11994698 NR Description: 3-hydroxyisobutyryl-coenzyme A hydrolase-like
  misc_feature (33)..(410): NCBI GI NO: 15230101 NR Description: 3-hydroxyisobutyryl-coenzyme A hydrolase
  misc_feature (51)..(326): NCBI GI NO: 31208011 NR Description: ENSANGP00000024573 [Anopheles gambiae]
  misc_feature (303)..(408): NCBI GI NO: 31208011 NR Description: ENSANGP00000024573 [Anopheles gambiae]
  misc_feature (31)..(326): NCBI GI NO: 23013936 NR Description: hypothetical protein
  misc_feature (304)..(405): NCBI GI NO: 23013936 NR Description: hypothetical protein
  misc_feature (52)..(333): NCBI GI NO: 23016278 NR Description: hypothetical protein
  misc_feature (349)..(385): NCBI GI NO: 23016278 NR Description: hypothetical protein
  misc_feature (48)..(303): NCBI GI NO: 15608211 NR Description: echA9 [Mycobacterium tuberculosis H37Rv]
  misc_feature (243)..(243): Xaa is any aa, unknown or other
LSRIPISPAAFFSSSSQTLAPLRLGHRFVAMAAAAAEEFVKGRVFPNGVAVITLDRPKALNAMNLEMDLRYKTFLDDWETNPNVKCILVESSSPRAFSAGMDIKGVAAEIQKDKSTSLVQKVFTAEYSLICKIHEYAKPYICLMDGVTMGFGIGLSGHGRYRIITERTLLAMPENGIGLFPDVGFAYIGAKAPGGGAVGAYLGMTGKRISSPADALFIGLGTHYVPSGDLGSLKESLLSANFXADPHKDVESLLTGYKKEPESVPQLEKLLPDIVSSFGPDKSATESVEELKKRTQNGDATVSEWANDALAGLKKGAPFSLCLTQKHFSRVASSYGNNENYLSKLAGVMKLEYRIALRSSVRNDFAEGVRAVLVDKDQNPKWSPATLEEVNMDEVESVFEPLAADAELNV

SEQ ID NO: 14604 - protein, 380 aa, Triticum aestivum
  peptide (1)..(380): Ceres Seq. ID no. 15219779
  misc_feature (20)..(196): Pfam Name: Pfam Description:  Enoyl-CoA hydratase/isomerase family
  misc_feature (1)..(377): NCBI GI NO: 15235689 NR Description: 3-hydroxyisobutyryl-coenzyme A hydrolase
  misc_feature (1)..(380): NCBI GI NO: 11994698 NR Description: 3-hydroxyisobutyryl-coenzyme A hydrolase-like
  misc_feature (3)..(380): NCBI GI NO: 15230101 NR Description: 3-hydroxyisobutyryl-coenzyme A hydrolase
  misc_feature (21)..(296): NCBI GI NO: 31208011 NR Description: ENSANGP00000024573 [Anopheles gambiae]
  misc_feature (273)..(378): NCBI GI NO: 31208011 NR Description: ENSANGP00000024573 [Anopheles gambiae]
  misc_feature (1)..(296): NCBI GI NO: 23013936 NR Description: hypothetical protein
  misc_feature (274)..(375): NCBI GI NO: 23013936 NR Description: hypothetical protein
  misc_feature (22)..(303): NCBI GI NO: 23016278 NR Description: hypothetical protein
  misc_feature (319)..(355): NCBI GI NO: 23016278 NR Description: hypothetical protein
  misc_feature (18)..(273): NCBI GI NO: 15608211 NR Description: echA9 [Mycobacterium tuberculosis H37Rv]
  misc_feature (213)..(213): Xaa is any aa, unknown or other
MAAAAAEEFVKGRVFPNGVAVITLDRPKALNAMNLEMDLRYKTFLDDWETNPNVKCILVESSSPRAFSAGMDIKGVAAEIQKDKSTSLVQKVFTAEYSLICKIHEYAKPYICLMDGVTMGFGIGLSGHGRYRIITERTLLAMPENGIGLFPDVGFAYIGAKAPGGGAVGAYLGMTGKRISSPADALFIGLGTHYVPSGDLGSLKESLLSANFXADPHKDVESLLTGYKKEPESVPQLEKLLPDIVSSFGPDKSATESVEELKKRTQNGDATVSEWANDALAGLKKGAPFSLCLTQKHFSRVASSYGNNENYLSKLAGVMKLEYRIALRSSVRNDFAEGVRAVLVDKDQNPKWSPATLEEVNMDEVESVFEPLAADAELNV

SEQ ID NO: 14605 - protein, 348 aa, Triticum aestivum
  peptide (1)..(348): Ceres Seq. ID no. 15219780
  misc_feature (1)..(164): Pfam Name: Pfam Description:  Enoyl-CoA hydratase/isomerase family
  misc_feature (1)..(345): NCBI GI NO: 15235689 NR Description: 3-hydroxyisobutyryl-coenzyme A hydrolase
  misc_feature (1)..(348): NCBI GI NO: 11994698 NR Description: 3-hydroxyisobutyryl-coenzyme A hydrolase-like
  misc_feature (1)..(348): NCBI GI NO: 15230101 NR Description: 3-hydroxyisobutyryl-coenzyme A hydrolase
  misc_feature (1)..(264): NCBI GI NO: 31208011 NR Description: ENSANGP00000024573 [Anopheles gambiae]
  misc_feature (241)..(346): NCBI GI NO: 31208011 NR Description: ENSANGP00000024573 [Anopheles gambiae]
  misc_feature (1)..(264): NCBI GI NO: 23013936 NR Description: hypothetical protein
  misc_feature (242)..(343): NCBI GI NO: 23013936 NR Description: hypothetical protein
  misc_feature (1)..(271): NCBI GI NO: 23016278 NR Description: hypothetical protein
  misc_feature (287)..(323): NCBI GI NO: 23016278 NR Description: hypothetical protein
  misc_feature (1)..(241): NCBI GI NO: 15608211 NR Description: echA9 [Mycobacterium tuberculosis H37Rv]
  misc_feature (181)..(181): Xaa is any aa, unknown or other
MNLEMDLRYKTFLDDWETNPNVKCILVESSSPRAFSAGMDIKGVAAEIQKDKSTSLVQKVFTAEYSLICKIHEYAKPYICLMDGVTMGFGIGLSGHGRYRIITERTLLAMPENGIGLFPDVGFAYIGAKAPGGGAVGAYLGMTGKRISSPADALFIGLGTHYVPSGDLGSLKESLLSANFXADPHKDVESLLTGYKKEPESVPQLEKLLPDIVSSFGPDKSATESVEELKKRTQNGDATVSEWANDALAGLKKGAPFSLCLTQKHFSRVASSYGNNENYLSKLAGVMKLEYRIALRSSVRNDFAEGVRAVLVDKDQNPKWSPATLEEVNMDEVESVFEPLAADAELNV

SEQ ID NO: 14606 - DNA, 1137 bp, Triticum aestivum
  misc_feature (1)..(1137): Ceres Seq. ID no. 15174190
aagtgtttcccggctcggaaggcgctttcttacagctgctctgccctcagctaaaccagcgcacaccaaaaagaaatggaggagaaaagaaaaatggcgggtttgctccggcacatcgccgccgctctccttttcctcgtcacggccgcttcgaccgccggtgcttccacttattacgcctcggatcccaacctcggatccgcccgcgtcatcttccagttaaatcatggtgacattgaattcggcttctttcctcgtgttgcacctaagacagttgaacacatttttaaacttgtgcagcttggatgctataatacaaatcacttcttccgggttgacaagggttttgttgcgcaagttgccgatgtcatgggaggtagaaaagcccctatgaataaagagcaggaacaacaggcagagaaatcaattgttggtgaatttagtactgtcaagcatgtcagaggaattctctcaatgggaaggtattctgacccagacagtgcctcctcttccttttctatcctccttggtgatgctccccaccttgatggccagtatgctgtatttgggagggtgactaagggtgacgatacattaagaaaactagagcgcctgccaacccataaagaaggcatttttgtaatgccaattgagcgcattgagattctgtcgacatactattatgatattgatgtagagagctgtgagccagagaagtctattcttaagaggagactttctgaatcagcatcagaagttgagagatggagacgaaaatgcttcgcatgatccagcgattgagtgccttttttttcctttcggcctcactgagaagacatgtgtttcaaaaggacatccatattacctcttccaggatttagagtgcatgtgcattccaaggagaggggtcagacttgtactatgtccaaatgcgttgtaccatgtaatttttccatgagtttgatgttactaggtctgcacgtttagcattgtttctctatggtgaccaaaattttgtcttgtacctatttggcatgcttagcacatgcagaacgtgaagcattgggaaggtcctaatgcaatccaatcgaccgatagtctaatggaaaaaaatcaatattacacatgtatgcttcc

SEQ ID NO: 14607 - protein, 237 aa, Triticum aestivum
  peptide (1)..(237): Ceres Seq. ID no. 15174191
  misc_feature (9)..(236): NCBI GI NO: 18396122 NR Description: expressed protein [Arabidopsis thaliana]
  misc_feature (45)..(230): NCBI GI NO: 25518514 NR Description: hypothetical protein T2P11
  misc_feature (5)..(214): NCBI GI NO: 18310549 NR Description: probable peptidyl-prolyl cis-trans isomerase B
  misc_feature (45)..(182): NCBI GI NO: 28210402 NR Description: peptidyl-prolyl cis-trans isomerase
  misc_feature (10)..(179): NCBI GI NO: 15888986 NR Description: AGR_C_3090p [Agrobacterium tumefaciens]
  misc_feature (11)..(179): NCBI GI NO: 23501972 NR Description: peptidyl-prolyl cis-trans isomerase
  misc_feature (11)..(195): NCBI GI NO: 22967403 NR Description: hypothetical protein [Rhodospirillum rubrum]
  misc_feature (18)..(186): NCBI GI NO: 22982921 NR Description: hypothetical protein [Burkholderia fungorum]
  misc_feature (32)..(179): NCBI GI NO: 17987170 NR Description: PEPTIDYL-PROLYL CIS-TRANS ISOMERASE
  misc_feature (45)..(193): NCBI GI NO: 15896024 NR Description: Peptidyl-prolyl cis-transisomerase
MEEKRKMAGLLRHIAAALLFLVTAASTAGASTYYASDPNLGSARVIFQLNHGDIEFGFFPRVAPKTVEHIFKLVQLGCYNTNHFFRVDKGFVAQVADVMGGRKAPMNKEQEQQAEKSIVGEFSTVKHVRGILSMGRYSDPDSASSSFSILLGDAPHLDGQYAVFGRVTKGDDTLRKLERLPTHKEGIFVMPIERIEILSTYYYDIDVESCEPEKSILKRRLSESASEVERWRRKCFA

SEQ ID NO: 14608 - protein, 231 aa, Triticum aestivum
  peptide (1)..(231): Ceres Seq. ID no. 15174192
  misc_feature (3)..(230): NCBI GI NO: 18396122 NR Description: expressed protein [Arabidopsis thaliana]
  misc_feature (39)..(224): NCBI GI NO: 25518514 NR Description: hypothetical protein T2P11
  misc_feature (1)..(208): NCBI GI NO: 18310549 NR Description: probable peptidyl-prolyl cis-trans isomerase B
  misc_feature (39)..(176): NCBI GI NO: 28210402 NR Description: peptidyl-prolyl cis-trans isomerase
  misc_feature (4)..(173): NCBI GI NO: 15888986 NR Description: AGR_C_3090p [Agrobacterium tumefaciens]
  misc_feature (5)..(173): NCBI GI NO: 23501972 NR Description: peptidyl-prolyl cis-trans isomerase
  misc_feature (5)..(189): NCBI GI NO: 22967403 NR Description: hypothetical protein [Rhodospirillum rubrum]
  misc_feature (12)..(180): NCBI GI NO: 22982921 NR Description: hypothetical protein [Burkholderia fungorum]
  misc_feature (26)..(173): NCBI GI NO: 17987170 NR Description: PEPTIDYL-PROLYL CIS-TRANS ISOMERASE
  misc_feature (39)..(187): NCBI GI NO: 15896024 NR Description: Peptidyl-prolyl cis-transisomerase
MAGLLRHIAAALLFLVTAASTAGASTYYASDPNLGSARVIFQLNHGDIEFGFFPRVAPKTVEHIFKLVQLGCYNTNHFFRVDKGFVAQVADVMGGRKAPMNKEQEQQAEKSIVGEFSTVKHVRGILSMGRYSDPDSASSSFSILLGDAPHLDGQYAVFGRVTKGDDTLRKLERLPTHKEGIFVMPIERIEILSTYYYDIDVESCEPEKSILKRRLSESASEVERWRRKCFA

SEQ ID NO: 14609 - protein, 139 aa, Triticum aestivum
  peptide (1)..(139): Ceres Seq. ID no. 15174193
  misc_feature (1)..(138): NCBI GI NO: 18396122 NR Description: expressed protein [Arabidopsis thaliana]
  misc_feature (1)..(132): NCBI GI NO: 25518514 NR Description: hypothetical protein T2P11
  misc_feature (1)..(116): NCBI GI NO: 18310549 NR Description: probable peptidyl-prolyl cis-trans isomerase B
  misc_feature (1)..(84): NCBI GI NO: 28210402 NR Description: peptidyl-prolyl cis-trans isomerase
  misc_feature (1)..(81): NCBI GI NO: 15888986 NR Description: AGR_C_3090p [Agrobacterium tumefaciens]
  misc_feature (1)..(81): NCBI GI NO: 23501972 NR Description: peptidyl-prolyl cis-trans isomerase
  misc_feature (1)..(97): NCBI GI NO: 22967403 NR Description: hypothetical protein [Rhodospirillum rubrum]
  misc_feature (1)..(88): NCBI GI NO: 22982921 NR Description: hypothetical protein [Burkholderia fungorum]
  misc_feature (1)..(81): NCBI GI NO: 17987170 NR Description: PEPTIDYL-PROLYL CIS-TRANS ISOMERASE
  misc_feature (1)..(95): NCBI GI NO: 15896024 NR Description: Peptidyl-prolyl cis-transisomerase
MGGRKAPMNKEQEQQAEKSIVGEFSTVKHVRGILSMGRYSDPDSASSSFSILLGDAPHLDGQYAVFGRVTKGDDTLRKLERLPTHKEGIFVMPIERIEILSTYYYDIDVESCEPEKSILKRRLSESASEVERWRRKCFA

SEQ ID NO: 14610 - DNA, 752 bp, Triticum aestivum
  misc_feature (1)..(752): Ceres Seq. ID no. 15173164
gaaacacagcgagcaagagcaagagcaagagcaagagcaagagcagcctttctccgtgaggtccattgcaatccagaaaccttcaagtatgggcagatctgcaatttctcaggccctcccggtgcaccaggaggacgaagacctgttcgagacctcgtcatccttctcctgcgactccgacgacgaggcccagttctcggacggcgaggaccagtttgtgccggcttccccgccggtgcggagactcaactctgacagcgtctacgatctgtcgtccatcaaggctgagctctccgccaagaaaggagggttgtccaagtactacgacgggaagtcccagtcgttcgcgtgcatgtccgaggtgaggtgcctggaggatctacccaagaagagcccctacaagaagatcaagtcatgcaggagcaacatcaatctagacggaaaccagagagattgccccgtaactggttctaacaacagcaaaggaatcgccaagcagagctctgcgagttcctgcgcgaatctgatgatggcgcggaccagcagcgccaacatgctctacaggcctccggcgatccctgttaacaagagcgcgtgccaccagtagggctcgcagctgcctggaaatgtccgtccatggctggcctcgcgcctcttctttgttccttgatgaggatttttcttggcgggcgtattagcctgtcaaatgtaaagaggcttttgattctctcatgttcaggaagatattgatg

SEQ ID NO: 14611 - protein, 201 aa, Triticum aestivum
  peptide (1)..(201): Ceres Seq. ID no. 15173165
  misc_feature (30)..(201): NCBI GI NO: 20159729 NR Description: unknown cold induced protein
  misc_feature (30)..(201): NCBI GI NO: 34909358 NR Description: P0638D12.11
KHSEQEQEQEQEQEQPFSVRSIAIQKPSSMGRSAISQALPVHQEDEDLFETSSSFSCDSDDEAQFSDGEDQFVPASPPVRRLNSDSVYDLSSIKAELSAKKGGLSKYYDGKSQSFACMSEVRCLEDLPKKSPYKKIKSCRSNINLDGNQRDCPVTGSNNSKGIAKQSSASSCANLMMARTSSANMLYRPPAIPVNKSACHQ

SEQ ID NO: 14612 - protein, 172 aa, Triticum aestivum
  peptide (1)..(172): Ceres Seq. ID no. 15173166
  misc_feature (1)..(172): NCBI GI NO: 20159729 NR Description: unknown cold induced protein
  misc_feature (1)..(172): NCBI GI NO: 34909358 NR Description: P0638D12.11
MGRSAISQALPVHQEDEDLFETSSSFSCDSDDEAQFSDGEDQFVPASPPVRRLNSDSVYDLSSIKAELSAKKGGLSKYYDGKSQSFACMSEVRCLEDLPKKSPYKKIKSCRSNINLDGNQRDCPVTGSNNSKGIAKQSSASSCANLMMARTSSANMLYRPPAIPVNKSACHQ

SEQ ID NO: 14613 - DNA, 1133 bp, Triticum aestivum
  misc_feature (1)..(1133): Ceres Seq. ID no. 13597027
tgcttcgtccagcataacccccaaaaccacctcacccgacagaacaggcggcggcggcggcggaatcgggcgagatgatcaagaggcgctacttcaggcaagaccacggcgacaatagcgcctcctcgtcctcctcctcttcgggttctgattcggaccgcgaccccgcggaagaagaggtctcggaggaggaagtagaaggggagcaagaaaaagaagaagaagatgatgatgaagaagcggaggtggagtcgggggaagaacaggaaaaggaagtagatgagcaggccgaagatgagggttcaggataccaaagtgaggacagctctggacatcatgttgatagtccttgtgcaggtttactttcagatgagaacagcagtctggtgtatgaacaataccaagcaatcaggttgcctgctaagaaagcatcaagtggtgatgctgattctgccgaaggtgctgttaacaaggatgacactgttgaggtcgatttcaataactacattctgaagtgcaaatctgtgtataagtgcaagctttgtcccagaatcatgtgcttaagtgaggagatggtcagggtacatcttgaatcaaagagacatgctcgatcaaagaaactactgggagaaggtaggcttaagatggtgctcaacagtgatggtgagctggaggaagaggcagagacacatgctgaacgacatgcccgaactatagctcttgctcagcaagtacaaaagcccaagaaggattcaggcaggcagcgacaaaatcggagaagacagaagaggtcgcagaatcgtctcaaggacaaagatcagagacacagctctggaaaggaaggtgcaaggccgaacaatggaactgctgataagaaaatgccgaatgttgaaactgctgctaagaaaatgccgaatcttgaaactgctgctaagaaaaggcgcaagactgaaaaataagtcggtgctgcagaaatatttcttgcgtgtcatttcttcctatattgttgtaatttttaggagctttctgcggttttactgtttctggtttgcttctttaagtgtagttcatgaaagctgagagattaaattgaaaggaaagacgacaactagaaagtggacatttaatcgtgc

SEQ ID NO: 14614 - protein, 294 aa, Triticum aestivum
  peptide (1)..(294): Ceres Seq. ID no. 13597028
  misc_feature (3)..(91): Pfam Name: Pfam Description:  Prothymosin/parathymosin family
  misc_feature (1)..(251): NCBI GI NO: 13359054 NR Description: P0436D06.15
  misc_feature (46)..(268): NCBI GI NO: 25404282 NR Description: hypothetical protein F8A5.16
  misc_feature (46)..(294): NCBI GI NO: 15219776 NR Description: hypothetical protein [Arabidopsis thaliana]
  misc_feature (1)..(86): NCBI GI NO: 29251343 NR Description: GLP_574_57226_57648 [Giardia lamblia ATCC 50803]
  misc_feature (200)..(294): NCBI GI NO: 33086446 NR Description: Ab1-042 [Rattus norvegicus]
  misc_feature (2)..(83): NCBI GI NO: 33086446 NR Description: Ab1-042 [Rattus norvegicus]
  misc_feature (200)..(294): NCBI GI NO: 33086440 NR Description: Ab1-013 [Rattus norvegicus]
  misc_feature (2)..(83): NCBI GI NO: 33086440 NR Description: Ab1-013 [Rattus norvegicus]
  misc_feature (14)..(83): NCBI GI NO: 39586319 NR Description: Hypothetical protein CBG12079
  misc_feature (1)..(85): NCBI GI NO: 29251343 NR Description: GLP_574_57226_57648 [Giardia lamblia ATCC 50803]
MIKRRYFRQDHGDNSASSSSSSSGSDSDRDPAEEEVSEEEVEGEQEKEEEDDDEEAEVESGEEQEKEVDEQAEDEGSGYQSEDSSGHHVDSPCAGLLSDENSSLVYEQYQAIRLPAKKASSGDADSAEGAVNKDDTVEVDFNNYILKCKSVYKCKLCPRIMCLSEEMVRVHLESKRHARSKKLLGEGRLKMVLNSDGELEEEAETHAERHARTIALAQQVQKPKKDSGRQRQNRRRQKRSQNRLKDKDQRHSSGKEGARPNNGTADKKMPNVETAAKKMPNLETAAKKRRKTEK

SEQ ID NO: 14615 - DNA, 527 bp, Triticum aestivum
  misc_feature (1)..(527): Ceres Seq. ID no. 15224346
caaaaccatggatgaaattaatgacaatatggagaacatgaggcagatccaggatctactgtctgcgcctatgggagcagcaagtgatttcgatgaagatgagctggaagctgaacttgcggatttggagggcgaggagttggaggcacagctactagcaccaaccacaagtgctcctatgactgctccagcgcgtgtacctcagcagtcgagtcggcccactgctcagagtagtaaaaccgaagatgatgagctggcagctttacaagcagagatggctatgtaattagtttgcaggacttgggcgtgggcatgtttagagaccagattgtgcaaatatatttgggaccacggtattttcatggaggtcttcctgggaagacgtcagaagtgcacacagaaactagttgcatctcaccctgatgatctcttatgtatatcttatcatgttacttctgtaatcaaacatctaagatgcgctgttgagcgcattatcagctaataaagggcatctgccatcattgtat

SEQ ID NO: 14616 - protein, 94 aa, Triticum aestivum
  peptide (1)..(94): Ceres Seq. ID no. 15224347
  misc_feature (1)..(59): Pfam Name: Pfam Description:  SNF7
  misc_feature (1)..(94): NCBI GI NO: 15233464 NR Description: expressed protein [Arabidopsis thaliana]
  misc_feature (1)..(94): NCBI GI NO: 21594892 NR Description: copia-like retroelement pol polyprotein
  misc_feature (1)..(94): NCBI GI NO: 15224854 NR Description: copia-related retroelement pol polyprotein
  misc_feature (3)..(90): NCBI GI NO: 28277855 NR Description: Unknown (protein for MGC:56112) [Danio rerio]
  misc_feature (3)..(89): NCBI GI NO: 13905218 NR Description: 2010012F05Rik protein [Mus musculus]
  misc_feature (3)..(89): NCBI GI NO: 28077049 NR Description: RIKEN cDNA 2010012F05 [Mus musculus]
  misc_feature (3)..(89): NCBI GI NO: 28827795 NR Description: Snf7 homologue associated with Alix 1
  misc_feature (3)..(84): NCBI GI NO: 28278647 NR Description: Similar to RIKEN cDNA 2010012F05 gene
  misc_feature (3)..(93): NCBI GI NO: 29841209 NR Description: similar to GenBank Accession Number BC011429unknown
  misc_feature (3)..(89): NCBI GI NO: 13182765 NR Description: CDA04 [Homo sapiens]
KTMDEINDNMENMRQIQDLLSAPMGAASDFDEDELEAELADLEGEELEAQLLAPTTSAPMTAPARVPQQSSRPTAQSSKTEDDELAALQAEMAM

SEQ ID NO: 14617 - protein, 92 aa, Triticum aestivum
  peptide (1)..(92): Ceres Seq. ID no. 15224348
  misc_feature (1)..(57): Pfam Name: Pfam Description:  SNF7
  misc_feature (1)..(92): NCBI GI NO: 15233464 NR Description: expressed protein [Arabidopsis thaliana]
  misc_feature (1)..(92): NCBI GI NO: 21594892 NR Description: copia-like retroelement pol polyprotein
  misc_feature (1)..(92): NCBI GI NO: 15224854 NR Description: copia-related retroelement pol polyprotein
  misc_feature (1)..(88): NCBI GI NO: 28277855 NR Description: Unknown (protein for MGC:56112) [Danio rerio]
  misc_feature (1)..(87): NCBI GI NO: 13905218 NR Description: 2010012F05Rik protein [Mus musculus]
  misc_feature (1)..(87): NCBI GI NO: 28077049 NR Description: RIKEN cDNA 2010012F05 [Mus musculus]
  misc_feature (1)..(87): NCBI GI NO: 28827795 NR Description: Snf7 homologue associated with Alix 1
  misc_feature (1)..(82): NCBI GI NO: 28278647 NR Description: Similar to RIKEN cDNA 2010012F05 gene
  misc_feature (1)..(91): NCBI GI NO: 29841209 NR Description: similar to GenBank Accession Number BC011429unknown
  misc_feature (1)..(87): NCBI GI NO: 13182765 NR Description: CDA04 [Homo sapiens]
MDEINDNMENMRQIQDLLSAPMGAASDFDEDELEAELADLEGEELEAQLLAPTTSAPMTAPARVPQQSSRPTAQSSKTEDDELAALQAEMAM

SEQ ID NO: 14618 - protein, 85 aa, Triticum aestivum
  peptide (1)..(85): Ceres Seq. ID no. 15224349
  misc_feature (1)..(85): NCBI GI NO: 15233464 NR Description: expressed protein [Arabidopsis thaliana]
  misc_feature (1)..(85): NCBI GI NO: 21594892 NR Description: copia-like retroelement pol polyprotein
  misc_feature (1)..(85): NCBI GI NO: 15224854 NR Description: copia-related retroelement pol polyprotein
  misc_feature (1)..(81): NCBI GI NO: 28277855 NR Description: Unknown (protein for MGC:56112) [Danio rerio]
  misc_feature (1)..(80): NCBI GI NO: 13905218 NR Description: 2010012F05Rik protein [Mus musculus]
  misc_feature (1)..(80): NCBI GI NO: 28077049 NR Description: RIKEN cDNA 2010012F05 [Mus musculus]
  misc_feature (1)..(80): NCBI GI NO: 28827795 NR Description: Snf7 homologue associated with Alix 1
  misc_feature (1)..(75): NCBI GI NO: 28278647 NR Description: Similar to RIKEN cDNA 2010012F05 gene
  misc_feature (1)..(84): NCBI GI NO: 29841209 NR Description: similar to GenBank Accession Number BC011429unknown
  misc_feature (1)..(80): NCBI GI NO: 13182765 NR Description: CDA04 [Homo sapiens]
MENMRQIQDLLSAPMGAASDFDEDELEAELADLEGEELEAQLLAPTTSAPMTAPARVPQQSSRPTAQSSKTEDDELAALQAEMAM

SEQ ID NO: 14619 - DNA, 965 bp, Triticum aestivum
  misc_feature (1)..(965): Ceres Seq. ID no. 12599167
cttctccgttctcctagctagctcccacacatcctcgaatcacagcctcacacctcctcccctgatcgaccaccctgcagctagcttcgtgcccgcagccagcaccgatcacacgctagctgctgctgctgctggggcgaccgaccggccatccatggcggtgaaggactgcggcgggcacaagggcgggggctgcgagtgccaccgccggcggctctaccgcaagtgctgcggcgcgctgctcgccctcgtcctcctcgccctcttcatcatcctcatcgtctacctggtgctccgcccccacaagccccgcttctacctgcaggacctggcggtgctctgcctcaacgtcacgccgcccacctccgcctacctcttcaccaccatgcaggccacggtcgcggcgcgcaaccccaacgaccgcgtcggcgtctactacgacgaggcggacatgtacgcgcagtacaagggcgtcgccatcaccgtccccacccgcctccccgtcgcctaccagggccaccgcgaccagtccgtgtggtcgccgtatctgaggtccatggacagcgtcgtgctcccgccgcagctcgccgtggcgctggcgcaggacgagacggccgggtacgtgctggtggacgtgcgcgtggacggtcaggtgcgctggaaggtgggcacgtggatctccggccactaccacctccgggtcaactgcccggcgctcatcagggtgaacgagggcaagggcagctacggcgccaccaccggcggcggccccgactacttccgcttccagcaggccgccgcctgcgccgtcgacgtctgatcatgcatcatcggttcgacctccaccgatccatgcatgtgtccaaattcagtggaatcgattgattgcttctccttctagtctctttcttgcttctttttagtctctttttgacttgttgatcgattggttaaagaaatggatg

SEQ ID NO: 14620 - protein, 272 aa, Triticum aestivum
  peptide (1)..(272): Ceres Seq. ID no. 12599168
  misc_feature (54)..(272): NCBI GI NO: 32488715 NR Description: OSJNBa0088H09.16
  misc_feature (52)..(272): NCBI GI NO: 38637038 NR Description: harpin-induced protein 1 family (HIN1)-like
  misc_feature (68)..(272): NCBI GI NO: 38344036 NR Description: OJ991214_12.17
  misc_feature (65)..(272): NCBI GI NO: 15229906 NR Description: hairpin-induced protein, putative
  misc_feature (52)..(272): NCBI GI NO: 22326984 NR Description: similar to hairpin-induced protein, putative
  misc_feature (52)..(272): NCBI GI NO: 15227538 NR Description: hairpin-induced protein, putative
  misc_feature (55)..(272): NCBI GI NO: 15231227 NR Description: hairpin-induced protein, putative
  misc_feature (54)..(272): NCBI GI NO: 18399308 NR Description: VAMP protein SEC22; protein id: At3g11660
  misc_feature (54)..(272): NCBI GI NO: 28392929 NR Description: putative VAMP protein SEC22 [Arabidopsis thaliana]
  misc_feature (52)..(272): NCBI GI NO: 15240001 NR Description: hairpin-induced protein, putative
FSVLLASSHTSSNHSLTPPPLIDHPAASFVPAASTDHTLAAAAAGATDRPSMAVKDCGGHKGGGCECHRRRLYRKCCGALLALVLLALFIILIVYLVLRPHKPRFYLQDLAVLCLNVTPPTSAYLFTTMQATVAARNPNDRVGVYYDEADMYAQYKGVAITVPTRLPVAYQGHRDQSVWSPYLRSMDSVVLPPQLAVALAQDETAGYVLVDVRVDGQVRWKVGTWISGHYHLRVNCPALIRVNEGKGSYGATTGGGPDYFRFQQAAACAVDV

SEQ ID NO: 14621 - protein, 221 aa, Triticum aestivum
  peptide (1)..(221): Ceres Seq. ID no. 12599169
  misc_feature (3)..(221): NCBI GI NO: 32488715 NR Description: OSJNBa0088H09.16
  misc_feature (1)..(221): NCBI GI NO: 38637038 NR Description: harpin-induced protein 1 family (HIN1)-like
  misc_feature (17)..(221): NCBI GI NO: 38344036 NR Description: OJ991214_12.17
  misc_feature (14)..(221): NCBI GI NO: 15229906 NR Description: hairpin-induced protein, putative
  misc_feature (1)..(221): NCBI GI NO: 22326984 NR Description: similar to hairpin-induced protein, putative
  misc_feature (1)..(221): NCBI GI NO: 15227538 NR Description: hairpin-induced protein, putative
  misc_feature (4)..(221): NCBI GI NO: 15231227 NR Description: hairpin-induced protein, putative
  misc_feature (3)..(221): NCBI GI NO: 18399308 NR Description: VAMP protein SEC22; protein id: At3g11660
  misc_feature (3)..(221): NCBI GI NO: 28392929 NR Description: putative VAMP protein SEC22 [Arabidopsis thaliana]
  misc_feature (1)..(221): NCBI GI NO: 15240001 NR Description: hairpin-induced protein, putative
MAVKDCGGHKGGGCECHRRRLYRKCCGALLALVLLALFIILIVYLVLRPHKPRFYLQDLAVLCLNVTPPTSAYLFTTMQATVAARNPNDRVGVYYDEADMYAQYKGVAITVPTRLPVAYQGHRDQSVWSPYLRSMDSVVLPPQLAVALAQDETAGYVLVDVRVDGQVRWKVGTWISGHYHLRVNCPALIRVNEGKGSYGATTGGGPDYFRFQQAAACAVDV

SEQ ID NO: 14622 - protein, 144 aa, Triticum aestivum
  peptide (1)..(144): Ceres Seq. ID no. 12599170
  misc_feature (1)..(144): NCBI GI NO: 32488715 NR Description: OSJNBa0088H09.16
  misc_feature (1)..(144): NCBI GI NO: 38637038 NR Description: harpin-induced protein 1 family (HIN1)-like
  misc_feature (1)..(144): NCBI GI NO: 38344036 NR Description: OJ991214_12.17
  misc_feature (1)..(144): NCBI GI NO: 15229906 NR Description: hairpin-induced protein, putative
  misc_feature (1)..(144): NCBI GI NO: 22326984 NR Description: similar to hairpin-induced protein, putative
  misc_feature (1)..(144): NCBI GI NO: 15227538 NR Description: hairpin-induced protein, putative
  misc_feature (1)..(144): NCBI GI NO: 15231227 NR Description: hairpin-induced protein, putative
  misc_feature (1)..(144): NCBI GI NO: 18399308 NR Description: VAMP protein SEC22; protein id: At3g11660
  misc_feature (1)..(144): NCBI GI NO: 28392929 NR Description: putative VAMP protein SEC22 [Arabidopsis thaliana]
  misc_feature (1)..(144): NCBI GI NO: 15240001 NR Description: hairpin-induced protein, putative
MQATVAARNPNDRVGVYYDEADMYAQYKGVAITVPTRLPVAYQGHRDQSVWSPYLRSMDSVVLPPQLAVALAQDETAGYVLVDVRVDGQVRWKVGTWISGHYHLRVNCPALIRVNEGKGSYGATTGGGPDYFRFQQAAACAVDV

SEQ ID NO: 14623 - DNA, 913 bp, Triticum aestivum
  misc_feature (1)..(913): Ceres Seq. ID no. 12618524
gcaggcagctccactcccctctccccttgcagccgccgccgctcgccgtcgcgatggccgagacggtggacttcgcgagcggcgacggggaggcctggcgtgcggcgctgggcgcgtacgaccgccggctcgcggcgctggacaagcccgacctcctggacgccgactccttctaccgccacgacctccccctcctgctgcaccgccgcgacccggacccctacctcgccaagccggagctggtgcagctcatgcagtggaagctctcgcgcggcaagtggaggccgaggctgatggatttcgtcaaaagcttggatgacaaagttgtagagtcagcgtcacgcaaggcatttgcagcgctgcctgacctcagcaaggccatcaccgagctcaccgtgctcaagggtgttggccctgccactgcatctgcggtgctcgctgcctatgcacccgatgttgcacccttcatgtcagacgaagctatggtcgcagccttgggcaatgtaaaggaatacactctgaagcagtaccttgcgtttgcggagaagttgcaggctaaagcgaaggagttgagcgtaggaggagaaagcttcacgcctttggatgttgagagagctttgtggagctcggcaatcgcctccaagccaccgaaggcaccagcaggtgggaagagaaaacgatgacttgtgtcgccgcactgttgcgctagagctagaatggtctgctggtggtagatcgatctttgtagaatgtatatgtcatgtacttcttgcctttggatcccaaacatatttgtgaatggggaatggcgcacctcctgagcttggtatttggctatcggatgatgacctggtgtattccgtcaaaggactaaccgcctgtaaaattgtcatgaaatccatagaccaattcc

SEQ ID NO: 14624 - protein, 226 aa, Triticum aestivum
  peptide (1)..(226): Ceres Seq. ID no. 12618525
  misc_feature (22)..(226): NCBI GI NO: 15795142 NR Description: gb|AAF48080
  misc_feature (22)..(226): NCBI GI NO: 18399536 NR Description: expressed protein; protein id: At3g12210
  misc_feature (22)..(159): NCBI GI NO: 30682101 NR Description: expressed protein [Arabidopsis thaliana]
  misc_feature (48)..(213): NCBI GI NO: 20129011 NR Description: CG2446-PC [Drosophila melanogaster]
  misc_feature (50)..(207): NCBI GI NO: 40746364 NR Description: hypothetical protein AN1337.2
RQLHSPLPLQPPPLAVAMAETVDFASGDGEAWRAALGAYDRRLAALDKPDLLDADSFYRHDLPLLLHRRDPDPYLAKPELVQLMQWKLSRGKWRPRLMDFVKSLDDKVVESASRKAFAALPDLSKAITELTVLKGVGPATASAVLAAYAPDVAPFMSDEAMVAALGNVKEYTLKQYLAFAEKLQAKAKELSVGGESFTPLDVERALWSSAIASKPPKAPAGGKRKR

SEQ ID NO: 14625 - protein, 209 aa, Triticum aestivum
  peptide (1)..(209): Ceres Seq. ID no. 12618526
  misc_feature (5)..(209): NCBI GI NO: 15795142 NR Description: gb|AAF48080
  misc_feature (5)..(209): NCBI GI NO: 18399536 NR Description: expressed protein; protein id: At3g12210
  misc_feature (5)..(142): NCBI GI NO: 30682101 NR Description: expressed protein [Arabidopsis thaliana]
  misc_feature (31)..(196): NCBI GI NO: 20129011 NR Description: CG2446-PC [Drosophila melanogaster]
  misc_feature (33)..(190): NCBI GI NO: 40746364 NR Description: hypothetical protein AN1337.2
MAETVDFASGDGEAWRAALGAYDRRLAALDKPDLLDADSFYRHDLPLLLHRRDPDPYLAKPELVQLMQWKLSRGKWRPRLMDFVKSLDDKVVESASRKAFAALPDLSKAITELTVLKGVGPATASAVLAAYAPDVAPFMSDEAMVAALGNVKEYTLKQYLAFAEKLQAKAKELSVGGESFTPLDVERALWSSAIASKPPKAPAGGKRKR

SEQ ID NO: 14626 - protein, 143 aa, Triticum aestivum
  peptide (1)..(143): Ceres Seq. ID no. 12618527
  misc_feature (1)..(143): NCBI GI NO: 15795142 NR Description: gb|AAF48080
  misc_feature (1)..(143): NCBI GI NO: 18399536 NR Description: expressed protein; protein id: At3g12210
  misc_feature (1)..(76): NCBI GI NO: 30682101 NR Description: expressed protein [Arabidopsis thaliana]
  misc_feature (1)..(130): NCBI GI NO: 20129011 NR Description: CG2446-PC [Drosophila melanogaster]
  misc_feature (1)..(124): NCBI GI NO: 40746364 NR Description: hypothetical protein AN1337.2
MQWKLSRGKWRPRLMDFVKSLDDKVVESASRKAFAALPDLSKAITELTVLKGVGPATASAVLAAYAPDVAPFMSDEAMVAALGNVKEYTLKQYLAFAEKLQAKAKELSVGGESFTPLDVERALWSSAIASKPPKAPAGGKRKR

SEQ ID NO: 14627 - DNA, 1168 bp, Triticum aestivum
  misc_feature (1)..(1168): Ceres Seq. ID no. 12388947
attcaggaaactgccattgaccagacaaaacgaaaacgtgacggcaaacagttccgtaccacctccctccactggtcgatccccatcccctgttccgttcatacatctacctccgccgccgctgccatgccgccggccggcagcctcaccgccgagcagctcagcttcttcgagaagaacggctacctggtgctggagtcgttatccagcgtggaggaggttcaggcgatgcgcgaccgcatggccgagctcgtcgacggcttcgacggcgctgactccagtgtcttctccaccaaggatcatcggcagttgaaggacgactacttctttaagagtgcggagaatatatctttcttcttcgaggaaaaggcatttggagatgatggatgcttgagacagccaaaggaactttcaatcaataaagttggacatgcactacatgaacatgaccctgtgttcaaaaagtttgctttctcggagagtatttctagcctgttctcttctttagggtacaagagacctgcagttattcaatctatgtacatctttaagcaaccgggcattggtggcgaggtggtgccacaccaggataatacattcctttatacagagcccctatcatgcacaggattgtggcttgcacttgaagatgcaacagttaccaatggttgcctatgggcaattcccggatcacataaaaatggtctaaaaaggcgaatgatcagagatgaaaatggtactcattttgatcgcccctctccactttatgaccagaaagagtttgtaccactggaaatgaaatcaggtgactttgttgttattcacgacgatcttgtacatcagagctttgagaacctttctccagtgtcaagacatgcactgagcttacatgtagttgacatggaaggatgtaaatggtccaaggacaactggatacagaggaaaactgcgcctgaaccgctctatgtgtcttagttcagccagttactaataaacaagcagtttcagttgcttatcatcggtgcagtgaaatttgggaacgccgcggagcaatgctggtttctttgtcgtctttcacatgtgtacactgtaaatactgaatacttgctgctgtgttgtcatgatatcagttactatctgcaatcctgaaataaatccaatttcctcc

SEQ ID NO: 14628 - protein, 324 aa, Triticum aestivum
  peptide (1)..(324): Ceres Seq. ID no. 12388948
  misc_feature (56)..(293): Pfam Name: PhyH Pfam Description: Phytanoyl-CoA dioxygenase
  misc_feature (43)..(322): NCBI GI NO: 13937293 NR Description: putative LN1 protein [Oryza sativa]
  misc_feature (47)..(323): NCBI GI NO: 21593659 NR Description: unknown [Arabidopsis thaliana]
  misc_feature (47)..(323): NCBI GI NO: 18379234 NR Description: expressed protein; protein id: At2g01490
  misc_feature (47)..(234): NCBI GI NO: 25410910 NR Description: hypothetical protein At2g01490
  misc_feature (30)..(323): NCBI GI NO: 34853210 NR Description: similar to hypothetical protein MGC49146
  misc_feature (30)..(322): NCBI GI NO: 12837748 NR Description: unnamed protein product [Mus musculus]
  misc_feature (49)..(322): NCBI GI NO: 25058918 NR Description: Unknown (protein for MGC:49146) [Mus musculus]
  misc_feature (59)..(321): NCBI GI NO: 24645709 NR Description: CG14688-PA [Drosophila melanogaster]
  misc_feature (57)..(313): NCBI GI NO: 17544346 NR Description: Factor of activated T-cells cytoplasmic like
  misc_feature (49)..(320): NCBI GI NO: 30802141 NR Description: Similar to hypothetical protein MGC16638
IQETAIDQTKRKRDGKQFRTTSLHWSIPIPCSVHTSTSAAAAMPPAGSLTAEQLSFFEKNGYLVLESLSSVEEVQAMRDRMAELVDGFDGADSSVFSTKDHRQLKDDYFFKSAENISFFFEEKAFGDDGCLRQPKELSINKVGHALHEHDPVFKKFAFSESISSLFSSLGYKRPAVIQSMYIFKQPGIGGEVVPHQDNTFLYTEPLSCTGLWLALEDATVTNGCLWAIPGSHKNGLKRRMIRDENGTHFDRPSPLYDQKEFVPLEMKSGDFVVIHDDLVHQSFENLSPVSRHALSLHVVDMEGCKWSKDNWIQRKTAPEPLYVS

SEQ ID NO: 14629 - protein, 282 aa, Triticum aestivum
  peptide (1)..(282): Ceres Seq. ID no. 12388949
  misc_feature (14)..(251): Pfam Name: PhyH Pfam Description: Phytanoyl-CoA dioxygenase
  misc_feature (1)..(280): NCBI GI NO: 13937293 NR Description: putative LN1 protein [Oryza sativa]
  misc_feature (5)..(281): NCBI GI NO: 21593659 NR Description: unknown [Arabidopsis thaliana]
  misc_feature (5)..(281): NCBI GI NO: 18379234 NR Description: expressed protein; protein id: At2g01490
  misc_feature (5)..(192): NCBI GI NO: 25410910 NR Description: hypothetical protein At2g01490
  misc_feature (1)..(281): NCBI GI NO: 34853210 NR Description: similar to hypothetical protein MGC49146
  misc_feature (1)..(280): NCBI GI NO: 12837748 NR Description: unnamed protein product [Mus musculus]
  misc_feature (7)..(280): NCBI GI NO: 25058918 NR Description: Unknown (protein for MGC:49146) [Mus musculus]
  misc_feature (17)..(279): NCBI GI NO: 24645709 NR Description: CG14688-PA [Drosophila melanogaster]
  misc_feature (15)..(271): NCBI GI NO: 17544346 NR Description: Factor of activated T-cells cytoplasmic like
  misc_feature (7)..(278): NCBI GI NO: 30802141 NR Description: Similar to hypothetical protein MGC16638
MPPAGSLTAEQLSFFEKNGYLVLESLSSVEEVQAMRDRMAELVDGFDGADSSVFSTKDHRQLKDDYFFKSAENISFFFEEKAFGDDGCLRQPKELSINKVGHALHEHDPVFKKFAFSESISSLFSSLGYKRPAVIQSMYIFKQPGIGGEVVPHQDNTFLYTEPLSCTGLWLALEDATVTNGCLWAIPGSHKNGLKRRMIRDENGTHFDRPSPLYDQKEFVPLEMKSGDFVVIHDDLVHQSFENLSPVSRHALSLHVVDMEGCKWSKDNWIQRKTAPEPLYVS

SEQ ID NO: 14630 - protein, 248 aa, Triticum aestivum
  peptide (1)..(248): Ceres Seq. ID no. 12388950
  misc_feature (1)..(217): Pfam Name: PhyH Pfam Description: Phytanoyl-CoA dioxygenase
  misc_feature (1)..(246): NCBI GI NO: 13937293 NR Description: putative LN1 protein [Oryza sativa]
  misc_feature (1)..(247): NCBI GI NO: 21593659 NR Description: unknown [Arabidopsis thaliana]
  misc_feature (1)..(247): NCBI GI NO: 18379234 NR Description: expressed protein; protein id: At2g01490
  misc_feature (1)..(158): NCBI GI NO: 25410910 NR Description: hypothetical protein At2g01490
  misc_feature (1)..(247): NCBI GI NO: 34853210 NR Description: similar to hypothetical protein MGC49146
  misc_feature (1)..(246): NCBI GI NO: 12837748 NR Description: unnamed protein product [Mus musculus]
  misc_feature (1)..(246): NCBI GI NO: 25058918 NR Description: Unknown (protein for MGC:49146) [Mus musculus]
  misc_feature (1)..(245): NCBI GI NO: 24645709 NR Description: CG14688-PA [Drosophila melanogaster]
  misc_feature (1)..(237): NCBI GI NO: 17544346 NR Description: Factor of activated T-cells cytoplasmic like
  misc_feature (1)..(244): NCBI GI NO: 30802141 NR Description: Similar to hypothetical protein MGC16638
MRDRMAELVDGFDGADSSVFSTKDHRQLKDDYFFKSAENISFFFEEKAFGDDGCLRQPKELSINKVGHALHEHDPVFKKFAFSESISSLFSSLGYKRPAVIQSMYIFKQPGIGGEVVPHQDNTFLYTEPLSCTGLWLALEDATVTNGCLWAIPGSHKNGLKRRMIRDENGTHFDRPSPLYDQKEFVPLEMKSGDFVVIHDDLVHQSFENLSPVSRHALSLHVVDMEGCKWSKDNWIQRKTAPEPLYVS

SEQ ID NO: 14631 - DNA, 983 bp, Triticum aestivum
  misc_feature (1)..(983): Ceres Seq. ID no. 13585554
aggaataggattcaggcccgggcggccgcgtcaaaatcgtctctttgctcctcctcctgtccgtccgtctccgtccgtccgcccgcccgccccgaagcgtctcgccgccccctccaccggagaaccccctcgaaggcgagcacccgccctccccttcctcccggattcttgtctgccatgggtgactacacaatccggataagcaccagcttgatcgagcagctcgcgcgcgatgacgagaagcagatgaagaggaggaccaggaaacccaagccgaggaaggtcgtggagcaaccagaggagcctcaggacaatggcagggaacttccaactgaacccaagagcagccctgctcctgttttgccttttccgccacccatgtacctgccagtgacccccgctcctccaccgcccccgcccgtgatccaggaggtggaagccatacgcgccgtggttgtggagagcgagaaggtgctggagaagctgcagaagaaggaggcgacgatgcgcgaggagctcaccaagagggccaaggagctgcacgacaaggagttcaagctgccctaccagaacccctcgccgtgcaccgacgagagggcaggctgcgctgagtgctacaggagcaacgtgcaggacccgctcaagtgcgccgaggcggtcaagaggttcgaggcgtgcgttcgcatggcgattcggggcggtaccaccatgggagctgctcagtaggcagtggcgctgggagtcggggctgagtgagcgaggtgtcgagcacacgattttgcttctgtcgggatgattgattgaataacctgcctggatttttgtttggtgagacctgaaacaccatcagttgtagattaattctggtaacgggttgctactggtgttggcaacaagaggccatgagtgtccttgaatttaggggagtggctccatgctacttgcatacatattacaaaatgagacatgaaatttgcagggtc

SEQ ID NO: 14632 - protein, 241 aa, Triticum aestivum
  peptide (1)..(241): Ceres Seq. ID no. 13585555
  misc_feature (90)..(140): Pfam Name: Pfam Description:  Extensin-like region
  misc_feature (60)..(228): NCBI GI NO: 18413789 NR Description: expressed protein [Arabidopsis thaliana]
RNRIQARAAASKSSLCSSSCPSVSVRPPARPEASRRPLHRRTPSKASTRPPLPPGFLSAMGDYTIRISTSLIEQLARDDEKQMKRRTRKPKPRKVVEQPEEPQDNGRELPTEPKSSPAPVLPFPPPMYLPVTPAPPPPPPVIQEVEAIRAVVVESEKVLEKLQKKEATMREELTKRAKELHDKEFKLPYQNPSPCTDERAGCAECYRSNVQDPLKCAEAVKRFEACVRMAIRGGTTMGAAQ

SEQ ID NO: 14633 - protein, 182 aa, Triticum aestivum
  peptide (1)..(182): Ceres Seq. ID no. 13585556
  misc_feature (31)..(81): Pfam Name: Pfam Description:  Extensin-like region
  misc_feature (1)..(169): NCBI GI NO: 18413789 NR Description: expressed protein [Arabidopsis thaliana]
MGDYTIRISTSLIEQLARDDEKQMKRRTRKPKPRKVVEQPEEPQDNGRELPTEPKSSPAPVLPFPPPMYLPVTPAPPPPPPVIQEVEAIRAVVVESEKVLEKLQKKEATMREELTKRAKELHDKEFKLPYQNPSPCTDERAGCAECYRSNVQDPLKCAEAVKRFEACVRMAIRGGTTMGAAQ

SEQ ID NO: 14634 - protein, 159 aa, Triticum aestivum
  peptide (1)..(159): Ceres Seq. ID no. 13585557
  misc_feature (8)..(58): Pfam Name: Pfam Description:  Extensin-like region
  misc_feature (1)..(146): NCBI GI NO: 18413789 NR Description: expressed protein [Arabidopsis thaliana]
MKRRTRKPKPRKVVEQPEEPQDNGRELPTEPKSSPAPVLPFPPPMYLPVTPAPPPPPPVIQEVEAIRAVVVESEKVLEKLQKKEATMREELTKRAKELHDKEFKLPYQNPSPCTDERAGCAECYRSNVQDPLKCAEAVKRFEACVRMAIRGGTTMGAAQ

SEQ ID NO: 14635 - DNA, 1101 bp, Triticum aestivum
  misc_feature (1)..(1101): Ceres Seq. ID no. 14313511
gtcctgtactagtagagtacatctctgtcccaatcgccgtgatccagctagcttactacacaggcaagggcgattcgatcgaggccgccgccgccgccgccggagacgaccccgccgccttcagttagttaagatacaaaaatggcctcattggacaccgtcacaggagatcttggcctggttgttttgtacctaagcaaggctgaggcaagagataagatctgcagagctatacaatatggatccaagttcctgagcaacggacaaccaggacctgcacagaatgtcgacaaatcaactagtcttgctcggaaagttttccggctgtttaagtttgttaatgatctccaagctctgattagcccccctgccaaaggaactccacttccgctgatcttacttggaaagtcgaagaacgcgatgctgtcaactttcctctttctggaccaaattgtttgggctgggagaacaggagtatacaagaacaaggagcgagcagaattccttggcaggattgccttttattgctttcttggatctaatacatgtactaccatcatcgagctagcggagcttcagcggctttccaaatcgatgaagaagttagagaaggacctcaagcaccaagagctgtacaagaacgagcagtatcggatgaagctgaagaagtccaatgagaggctgcttgctctcatcaaatcgagccttgacatagttgttgcagtggggctgctgcaactggccccgaaaaaggtcactcctcgcgtcactggggcctttgggttcgctagctcgctcatcgcctgttaccagttgcttccagccccagccaaatccaagtgatctgcctgcccacctcgggccaggcagctggtgcatcgattggtgaaacggcggttgctgtcgctgatacttgataagaaataaatctggaccaaattgtccgtcctgtaggatataaccgaggattattgttgtggaagtcggcattgcccagggccatctcatagcctggttgatctgccttgccttatgacttgattatgtagcacgcttgtatttgtatggtctggtgtgccactatcatactataactgttgc

SEQ ID NO: 14636 - protein, 233 aa, Triticum aestivum
  peptide (1)..(233): Ceres Seq. ID no. 14313512
  misc_feature (11)..(226): Pfam Name: PEX11 Pfam Description: Peroxisomal biogenesis factor 11
  misc_feature (1)..(233): NCBI GI NO: 25553559 NR Description: OSJNBa0038F22.7
  misc_feature (1)..(229): NCBI GI NO: 34898026 NR Description: ESTs AU064537
  misc_feature (1)..(233): NCBI GI NO: 18378887 NR Description: expressed protein [Arabidopsis thaliana]
  misc_feature (1)..(233): NCBI GI NO: 8489788 NR Description: unknown [Lycopersicon esculentum]
  misc_feature (3)..(233): NCBI GI NO: 18406877 NR Description: expressed protein [Arabidopsis thaliana]
  misc_feature (3)..(225): NCBI GI NO: 7486466 NR Description: hypothetical protein At2g45740
  misc_feature (1)..(233): NCBI GI NO: 30695340 NR Description: expressed protein [Arabidopsis thaliana]
  misc_feature (1)..(233): NCBI GI NO: 11358250 NR Description: hypothetical protein T27I15_160 - Arabidopsisthaliana
  misc_feature (131)..(233): NCBI GI NO: 14335058 NR Description: At2g45740/F4I18.28 [Arabidopsis thaliana]
MASLDTVTGDLGLVVLYLSKAEARDKICRAIQYGSKFLSNGQPGPAQNVDKSTSLARKVFRLFKFVNDLQALISPPAKGTPLPLILLGKSKNAMLSTFLFLDQIVWAGRTGVYKNKERAEFLGRIAFYCFLGSNTCTTIIELAELQRLSKSMKKLEKDLKHQELYKNEQYRMKLKKSNERLLALIKSSLDIVVAVGLLQLAPKKVTPRVTGAFGFASSLIACYQLLPAPAKSK

SEQ ID NO: 14637 - protein, 140 aa, Triticum aestivum
  peptide (1)..(140): Ceres Seq. ID no. 14313513
  misc_feature (1)..(133): Pfam Name: PEX11 Pfam Description: Peroxisomal biogenesis factor 11
  misc_feature (1)..(140): NCBI GI NO: 25553559 NR Description: OSJNBa0038F22.7
  misc_feature (1)..(136): NCBI GI NO: 34898026 NR Description: ESTs AU064537
  misc_feature (1)..(140): NCBI GI NO: 18378887 NR Description: expressed protein [Arabidopsis thaliana]
  misc_feature (1)..(140): NCBI GI NO: 8489788 NR Description: unknown [Lycopersicon esculentum]
  misc_feature (1)..(140): NCBI GI NO: 18406877 NR Description: expressed protein [Arabidopsis thaliana]
  misc_feature (1)..(132): NCBI GI NO: 7486466 NR Description: hypothetical protein At2g45740
  misc_feature (1)..(140): NCBI GI NO: 30695340 NR Description: expressed protein [Arabidopsis thaliana]
  misc_feature (1)..(140): NCBI GI NO: 11358250 NR Description: hypothetical protein T27I15_160 - Arabidopsisthaliana
  misc_feature (38)..(140): NCBI GI NO: 14335058 NR Description: At2g45740/F4I18.28 [Arabidopsis thaliana]
MLSTFLFLDQIVWAGRTGVYKNKERAEFLGRIAFYCFLGSNTCTTIIELAELQRLSKSMKKLEKDLKHQELYKNEQYRMKLKKSNERLLALIKSSLDIVVAVGLLQLAPKKVTPRVTGAFGFASSLIACYQLLPAPAKSK

SEQ ID NO: 14638 - DNA, 1205 bp, Triticum aestivum
  misc_feature (1)..(1205): Ceres Seq. ID no. 13597821
gagccggcgagccgcgcaaccttcgactccgaggggaaccgctcaccggagcaccaccgacccgcggacatggccgacgaggggaagcacctggagacgggccgggccgaccgctccgtctggctcatgaagtgcccgaccatcgtctcgcgcgcctggcaggaggccgccgccgcccaccgccgccgccgatgcgggaggccccaaccctaaccctaaccccgtcgtcgccaaggtcatcctctccttcgacccgctcagcaccgacgaggacccgaaccagttcaagatggagatggctcaaactaataatggcaacacaccgaagaattactctttaaatatgttcaaggattttgtgccaatgtgtgttttctcagagtctaaccaaggggtaagactaggttcctataatccctccccagaccccaccttgtgtgggagcttctatgcactgggtaagcttgcatgcgaaggaaaagtcgagcacaaatttgacatggaaccgcacaaagaaaacctttcagactatgcaaaattatgccgtgagaggactaaaaattctatgattaaaacaagaaaagtgcatgtacttgacaaggagcatgtgaacgtgcgcacaatgattagcatgattggtggcgggcctcattctggtccaaaggacaagaagaagccggcgccaaccagaactcctgaagtgaaaagaacacgcagggatcgtggggacattgaaaacatcctattcaagttatttgagaggcagccgaattggtcactgaggcatctaatgcaggaaactgatcaaccagagcaattcctgaaggagataatgaacgatctttgtgtctacaacaagagaggaccgaatcaagggacacatgagctcaagcctgaatacaagaagtctgttgaggacactagcgcgacctgaagtctatatcatctcttatgatatgctatacctgagagctagaagcccgtatgctctgataagttgaatgtgggtcatcgacagattctgactccagcctgttagttgctgatgaatcgcgtatgcttcatctggttgttctttgcaaaagtaatttttacgctgtataagcctcgagatatcttgttataccacggtttgccgtatcaaagatcctgagttttcagcatccttgtgtcccgaaggaaaagttgttcatgtttctgtgtat

SEQ ID NO: 14639 - protein, 214 aa, Triticum aestivum
  peptide (1)..(214): Ceres Seq. ID no. 15222203
  misc_feature (57)..(210): Pfam Name: Pfam Description:  Transcription initiation factor IIF
  misc_feature (57)..(214): NCBI GI NO: 34909946 NR Description: putative transcription initiation factor
  misc_feature (1)..(35): NCBI GI NO: 34909946 NR Description: putative transcription initiation factor
  misc_feature (57)..(210): NCBI GI NO: 15222264 NR Description: transcription initiation factor -related
  misc_feature (1)..(35): NCBI GI NO: 15222264 NR Description: transcription initiation factor -related
  misc_feature (1)..(210): NCBI GI NO: 15231173 NR Description: transcription initiation factor IIF
  misc_feature (1)..(210): NCBI GI NO: 11285686 NR Description: hypothetical protein T25B15
  misc_feature (56)..(212): NCBI GI NO: 38174399 NR Description: Unknown (protein for MGC:75790)
  misc_feature (60)..(212): NCBI GI NO: 19111874 NR Description: transcription initiation factor iif, beta subunit
  misc_feature (56)..(212): NCBI GI NO: 464520 NR Description: TRANSCRIPTION INITIATION FACTOR IIF, BETA SUBUNIT
  misc_feature (58)..(205): NCBI GI NO: 450771 NR Description: dTFIIF30
MEMAQTNNGNTPKNYSLNMFKDFVPMCVFSESNQGVRLGSYNPSPDPTLCGSFYALGKLACEGKVEHKFDMEPHKENLSDYAKLCRERTKNSMIKTRKVHVLDKEHVNVRTMISMIGGGPHSGPKDKKKPAPTRTPEVKRTRRDRGDIENILFKLFERQPNWSLRHLMQETDQPEQFLKEIMNDLCVYNKRGPNQGTHELKPEYKKSVEDTSAT

SEQ ID NO: 14640 - protein, 212 aa, Triticum aestivum
  peptide (1)..(212): Ceres Seq. ID no. 15222204
  misc_feature (55)..(208): Pfam Name: Pfam Description:  Transcription initiation factor IIF
  misc_feature (55)..(212): NCBI GI NO: 34909946 NR Description: putative transcription initiation factor
  misc_feature (1)..(33): NCBI GI NO: 34909946 NR Description: putative transcription initiation factor
  misc_feature (55)..(208): NCBI GI NO: 15222264 NR Description: transcription initiation factor -related
  misc_feature (1)..(33): NCBI GI NO: 15222264 NR Description: transcription initiation factor -related
  misc_feature (1)..(208): NCBI GI NO: 15231173 NR Description: transcription initiation factor IIF
  misc_feature (1)..(208): NCBI GI NO: 11285686 NR Description: hypothetical protein T25B15
  misc_feature (54)..(210): NCBI GI NO: 38174399 NR Description: Unknown (protein for MGC:75790)
  misc_feature (58)..(210): NCBI GI NO: 19111874 NR Description: transcription initiation factor iif, beta subunit
  misc_feature (54)..(210): NCBI GI NO: 464520 NR Description: TRANSCRIPTION INITIATION FACTOR IIF, BETA SUBUNIT
  misc_feature (56)..(203): NCBI GI NO: 450771 NR Description: dTFIIF30
MAQTNNGNTPKNYSLNMFKDFVPMCVFSESNQGVRLGSYNPSPDPTLCGSFYALGKLACEGKVEHKFDMEPHKENLSDYAKLCRERTKNSMIKTRKVHVLDKEHVNVRTMISMIGGGPHSGPKDKKKPAPTRTPEVKRTRRDRGDIENILFKLFERQPNWSLRHLMQETDQPEQFLKEIMNDLCVYNKRGPNQGTHELKPEYKKSVEDTSAT

SEQ ID NO: 14641 - protein, 196 aa, Triticum aestivum
  peptide (1)..(196): Ceres Seq. ID no. 15222205
  misc_feature (39)..(192): Pfam Name: Pfam Description:  Transcription initiation factor IIF
  misc_feature (39)..(196): NCBI GI NO: 34909946 NR Description: putative transcription initiation factor
  misc_feature (1)..(17): NCBI GI NO: 34909946 NR Description: putative transcription initiation factor
  misc_feature (39)..(192): NCBI GI NO: 15222264 NR Description: transcription initiation factor -related
  misc_feature (1)..(17): NCBI GI NO: 15222264 NR Description: transcription initiation factor -related
  misc_feature (1)..(192): NCBI GI NO: 15231173 NR Description: transcription initiation factor IIF
  misc_feature (1)..(192): NCBI GI NO: 11285686 NR Description: hypothetical protein T25B15
  misc_feature (38)..(194): NCBI GI NO: 38174399 NR Description: Unknown (protein for MGC:75790)
  misc_feature (42)..(194): NCBI GI NO: 19111874 NR Description: transcription initiation factor iif, beta subunit
  misc_feature (38)..(194): NCBI GI NO: 464520 NR Description: TRANSCRIPTION INITIATION FACTOR IIF, BETA SUBUNIT
  misc_feature (40)..(187): NCBI GI NO: 450771 NR Description: dTFIIF30
MFKDFVPMCVFSESNQGVRLGSYNPSPDPTLCGSFYALGKLACEGKVEHKFDMEPHKENLSDYAKLCRERTKNSMIKTRKVHVLDKEHVNVRTMISMIGGGPHSGPKDKKKPAPTRTPEVKRTRRDRGDIENILFKLFERQPNWSLRHLMQETDQPEQFLKEIMNDLCVYNKRGPNQGTHELKPEYKKSVEDTSAT

SEQ ID NO: 14642 - DNA, 648 bp, Triticum aestivum
  misc_feature (1)..(648): Ceres Seq. ID no. 12587729
cacaagtgggaaatcatggttgatctgttcttctacagggacccagaggaagctaaggagcttgaggaagatgaggctttgggtgctcctgagtacgctgcagttgcagagtacactgccccagcgggagatacctggggtgctgaatggccaggagctgcagctccagctgctgccgtcgaagccccggctggtgctgagtggactggtgctccagctcctgcggccgatggatgggatgccgttgcagcacctgcccctactggctgggaacagggcagtgctccggcacctgcagcagcaccagctgctactcagaactgggagtgaaggacttgacccaaggtttatgctactcggcactctggagtgaaggagttcggccgtggtttattggtgaaggctgtgttatttgccccgtcagtactctgttggtagacgctggttaagtagatttaatttttacagtactgagttatgttagatggaaatcgatttttgtcttcttggctttgcaggggttgggagttatcaccccagccttctgttgcctctcatcgaatagctttatttgaagttccattttgccagcaagtgtatggtcagattctcttgaaatgttataaaagcccggatcatgtgataccg

SEQ ID NO: 14643 - protein, 123 aa, Triticum aestivum
  peptide (1)..(123): Ceres Seq. ID no. 12587730
TSGKSWLICSSTGTQRKLRSLRKMRLWVLLSTLQLQSTLPQREIPGVLNGQELQLQLLPSKPRLVLSGLVLQLLRPMDGMPLQHLPLLAGNRAVLRHLQQHQLLLRTGSEGLDPRFMLLGTLE

SEQ ID NO: 14644 - protein, 109 aa, Triticum aestivum
  peptide (1)..(109): Ceres Seq. ID no. 12587731
  misc_feature (1)..(108): NCBI GI NO: 33146943 NR Description: putative 40S ribosomal protein
  misc_feature (1)..(108): NCBI GI NO: 34906686 NR Description: putative 40S ribosomal protein
  misc_feature (1)..(109): NCBI GI NO: 15217294 NR Description: Putative 40S Ribosomal protein [Oryza sativa]
  misc_feature (2)..(109): NCBI GI NO: 15218458 NR Description: putative 40S ribosomal protein SA
  misc_feature (1)..(91): NCBI GI NO: 8928330 NR Description: 40S ribosomal protein SA (p40)
  misc_feature (2)..(109): NCBI GI NO: 16380 NR Description: laminin receptor homologue [Arabidopsis thaliana]
  misc_feature (2)..(109): NCBI GI NO: 11467967 NR Description: 40S ribosomal protein SA
  misc_feature (2)..(91): NCBI GI NO: 15214300 NR Description: 40S ribosomal protein SA
  misc_feature (3)..(108): NCBI GI NO: 730683 NR Description: 40S RIBOSOMAL PROTEIN SA
  misc_feature (1)..(108): NCBI GI NO: 27882337 NR Description: Similar to laminin receptor 1
HKWEIMVDLFFYRDPEEAKELEEDEALGAPEYAAVAEYTAPAGDTWGAEWPGAAAPAAAVEAPAGAEWTGAPAPAADGWDAVAAPAPTGWEQGSAPAPAAAPAATQNWE

SEQ ID NO: 14645 - protein, 104 aa, Triticum aestivum
  peptide (1)..(104): Ceres Seq. ID no. 12587732
  misc_feature (1)..(103): NCBI GI NO: 33146943 NR Description: putative 40S ribosomal protein
  misc_feature (1)..(103): NCBI GI NO: 34906686 NR Description: putative 40S ribosomal protein
  misc_feature (1)..(104): NCBI GI NO: 15217294 NR Description: Putative 40S Ribosomal protein [Oryza sativa]
  misc_feature (1)..(104): NCBI GI NO: 15218458 NR Description: putative 40S ribosomal protein SA
  misc_feature (1)..(86): NCBI GI NO: 8928330 NR Description: 40S ribosomal protein SA (p40)
  misc_feature (1)..(104): NCBI GI NO: 16380 NR Description: laminin receptor homologue [Arabidopsis thaliana]
  misc_feature (1)..(104): NCBI GI NO: 11467967 NR Description: 40S ribosomal protein SA
  misc_feature (1)..(86): NCBI GI NO: 15214300 NR Description: 40S ribosomal protein SA
  misc_feature (1)..(103): NCBI GI NO: 730683 NR Description: 40S RIBOSOMAL PROTEIN SA
  misc_feature (1)..(103): NCBI GI NO: 27882337 NR Description: Similar to laminin receptor 1
MVDLFFYRDPEEAKELEEDEALGAPEYAAVAEYTAPAGDTWGAEWPGAAAPAAAVEAPAGAEWTGAPAPAADGWDAVAAPAPTGWEQGSAPAPAAAPAATQNWE

SEQ ID NO: 14646 - DNA, 909 bp, Triticum aestivum
  misc_feature (1)..(909): Ceres Seq. ID no. 13585560
ctcctaccccgccgcctcattgattttcctcctcttcccctccaccgcccgcccttgccgccgccgcgtaacccaacaacgccggggcaagagaaggagcagctatccaagcttacaagggctcggagagccatgtcgtcgtcgtcggcggcgccgatcggcctgtcgtgggcgccccagctgccatcccttgcggcggccggcggcagcaagaagggctcggcgccgacatcgagcattgacgcgcaggagtccctctggaagcccagcaacgagctcgtggacgggctctacgtgcccccgagggaccccaggaaggtcaacaagatggcgaggaagaacgtcaaggacaccaccggcaagggctggttcgacatgccggcgccgagcatcactcccgagttgaagaaagaccttgagattttgcagctgaggcatgtaatggaccctaaaaggcatttcaagaggtctggtaaatccaaggctcttccgaagtatttccaagttggaacggttattgagcctgcatctgagttctactcaagtaggttgacaaagcatgaacggaagcagaccttggttgatgagctgttatctgaccaaaaactcaagaactacaggatgcgtaaggtaagggaaattcaggtggcccggacacccggaggcaaccagaagtggaagaacaagggcaagcaaacgttcaaaagggccaaggacaggcggaaataggatcaatgtaaaacaaggaagaacagaagaacggagccaaggagaaatgggcgagcacggctataggttgtgcactccactgtaatgtgttgaattcatgtaactgaacgtatggaacttttctccccgcacttagagagatgagatcagtgtttgaggggatgatggtcaaagcattgt

SEQ ID NO: 14647 - protein, 242 aa, Triticum aestivum
  peptide (1)..(242): Ceres Seq. ID no. 13585561
  misc_feature (53)..(241): NCBI GI NO: 30692242 NR Description: expressed protein [Arabidopsis thaliana]
  misc_feature (45)..(241): NCBI GI NO: 15221891 NR Description: expressed protein [Arabidopsis thaliana]
  misc_feature (45)..(222): NCBI GI NO: 25405768 NR Description: T22H22.18 [imported] - Arabidopsis thaliana
  misc_feature (112)..(242): NCBI GI NO: 19114999 NR Description: hypothetical protein [Schizosaccharomyces pombe]
  misc_feature (99)..(235): NCBI GI NO: 24418931 NR Description: expressed sequence AA408582 [Mus musculus]
  misc_feature (99)..(235): NCBI GI NO: 34859943 NR Description: similar to expressed sequence AA408582
  misc_feature (99)..(231): NCBI GI NO: 8218113 NR Description: dJ561L24.2 (acidic 82 kDa protein) [Homo sapiens]
  misc_feature (109)..(242): NCBI GI NO: 17537287 NR Description: Acidic protein mRNA (29.6 kD)
  misc_feature (108)..(242): NCBI GI NO: 39580393 NR Description: Hypothetical protein CBG17763
  misc_feature (107)..(219): NCBI GI NO: 21358313 NR Description: CG1142 gene product [Drosophila melanogaster]
LLPRRLIDFPPLPLHRPPLPPPRNPTTPGQEKEQLSKLTRARRAMSSSSAAPIGLSWAPQLPSLAAAGGSKKGSAPTSSIDAQESLWKPSNELVDGLYVPPRDPRKVNKMARKNVKDTTGKGWFDMPAPSITPELKKDLEILQLRHVMDPKRHFKRSGKSKALPKYFQVGTVIEPASEFYSSRLTKHERKQTLVDELLSDQKLKNYRMRKVREIQVARTPGGNQKWKNKGKQTFKRAKDRRK

SEQ ID NO: 14648 - protein, 198 aa, Triticum aestivum
  peptide (1)..(198): Ceres Seq. ID no. 13585562
  misc_feature (9)..(197): NCBI GI NO: 30692242 NR Description: expressed protein [Arabidopsis thaliana]
  misc_feature (1)..(197): NCBI GI NO: 15221891 NR Description: expressed protein [Arabidopsis thaliana]
  misc_feature (1)..(178): NCBI GI NO: 25405768 NR Description: T22H22.18 [imported] - Arabidopsis thaliana
  misc_feature (68)..(198): NCBI GI NO: 19114999 NR Description: hypothetical protein [Schizosaccharomyces pombe]
  misc_feature (55)..(191): NCBI GI NO: 24418931 NR Description: expressed sequence AA408582 [Mus musculus]
  misc_feature (55)..(191): NCBI GI NO: 34859943 NR Description: similar to expressed sequence AA408582
  misc_feature (55)..(187): NCBI GI NO: 8218113 NR Description: dJ561L24.2 (acidic 82 kDa protein) [Homo sapiens]
  misc_feature (65)..(198): NCBI GI NO: 17537287 NR Description: Acidic protein mRNA (29.6 kD)
  misc_feature (64)..(198): NCBI GI NO: 39580393 NR Description: Hypothetical protein CBG17763
  misc_feature (63)..(175): NCBI GI NO: 21358313 NR Description: CG1142 gene product [Drosophila melanogaster]
MSSSSAAPIGLSWAPQLPSLAAAGGSKKGSAPTSSIDAQESLWKPSNELVDGLYVPPRDPRKVNKMARKNVKDTTGKGWFDMPAPSITPELKKDLEILQLRHVMDPKRHFKRSGKSKALPKYFQVGTVIEPASEFYSSRLTKHERKQTLVDELLSDQKLKNYRMRKVREIQVARTPGGNQKWKNKGKQTFKRAKDRRK

SEQ ID NO: 14649 - protein, 134 aa, Triticum aestivum
  peptide (1)..(134): Ceres Seq. ID no. 13585563
SYPAASLIFLLFPSTARPCRRRVTQQRRGKRRSSYPSLQGLGEPCRRRRRRRSACRGRPSCHPLRRPAAARRARRRHRALTRRSPSGSPATSSWTGSTCPRGTPGRSTRWRGRTSRTPPARAGSTCRRRASLPS

SEQ ID NO: 14650 - DNA, 963 bp, Triticum aestivum
  misc_feature (1)..(963): Ceres Seq. ID no. 12618538
gcaaccaccgcagagcacgccatcgatcgaatcgagcgaaccgaagccaagaagagtttcctcgttgctagcgccgctaagtagacgtcgacggcgatgggcaagatgaagatgccggccctgttccgccgccgctcctcctccaagtcgcgctccgcgtcgccgccgacgactcctccccgggaggagcagcaggaggagagccggcaggccatcgggtccccggcgcggtcggcggaggaggagatggagcgggtcttccgcaagttcgacgccaacggcgacggccggatctcgcggccggagctggccgccctcttcgagagcctgggccacgcggccaccgaggacgagctgacccgcatgatgttcgaggcggacgcggacggcgacggcttcatcagcctggaggagttcgcggcgctcaacgccacggcgcccggcgacgacgaggaggacctgcggctcgccttcaaggtgttcgacgcggacggcagcggcgacatctcggccgcggagctggcgcacgtgctccacggcctcggcgagaaggccacggtccagcagtgccggcgcatgatcgagggcgtcgacaagaacggcgacggcctcatctccttcgacgagttcaaggtcatgatggccgccggcttcgctgccaagatggcctgatccgtcctccctcttcttggattcaatccgttgtcgtccgcggacagattgatttcgtccacgccttcctcgctccttcctctcgcgtgcggtgcagattaagtgggaattaagtgtacataattcaaggattaaagggcgggcattagagcgtacgtgcgttagtagattctttgtttctttgtcttcttggtggtgccgagtacgtaataaccagaaatctctcgcgaataattgtctcgcgattatctaaagatctgagatataatggaattggtgaggttgccggtt

SEQ ID NO: 14651 - protein, 191 aa, Triticum aestivum
  peptide (1)..(191): Ceres Seq. ID no. 12618539
  misc_feature (157)..(185): Pfam Name: Pfam Description:  EF hand
  misc_feature (1)..(191): NCBI GI NO: 19386815 NR Description: B1147A04.10
  misc_feature (44)..(185): NCBI GI NO: 15221781 NR Description: putative calmodulin; protein id: At1g24620.1
  misc_feature (50)..(189): NCBI GI NO: 14423843 NR Description: Polcalcin Jun o 2
  misc_feature (22)..(188): NCBI GI NO: 34895640 NR Description: OSJNBa0083M16.33
  misc_feature (21)..(182): NCBI GI NO: 14589311 NR Description: calcium binding protein [Sesbania rostrata]
  misc_feature (36)..(188): NCBI GI NO: 15240340 NR Description: CALMODULIN-RELATED PROTEIN 2, TOUCH-INDUCED
  misc_feature (48)..(183): NCBI GI NO: 13397927 NR Description: putative calmodulin-related protein
  misc_feature (50)..(188): NCBI GI NO: 15235516 NR Description: putative calmodulin; protein id: At4g12860.1
  misc_feature (48)..(188): NCBI GI NO: 15231470 NR Description: putative calmodulin; protein id: At3g07490.1
  misc_feature (50)..(184): NCBI GI NO: 2392137 NR Description: Calmodulin Mutant With A Two Residue Deletion InThe Central Helix
MGKMKMPALFRRRSSSKSRSASPPTTPPREEQQEESRQAIGSPARSAEEEMERVFRKFDANGDGRISRPELAALFESLGHAATEDELTRMMFEADADGDGFISLEEFAALNATAPGDDEEDLRLAFKVFDADGSGDISAAELAHVLHGLGEKATVQQCRRMIEGVDKNGDGLISFDEFKVMMAAGFAAKMA

SEQ ID NO: 14652 - protein, 188 aa, Triticum aestivum
  peptide (1)..(188): Ceres Seq. ID no. 12618540
  misc_feature (154)..(182): Pfam Name: Pfam Description:  EF hand
  misc_feature (1)..(188): NCBI GI NO: 19386815 NR Description: B1147A04.10
  misc_feature (41)..(182): NCBI GI NO: 15221781 NR Description: putative calmodulin; protein id: At1g24620.1
  misc_feature (47)..(186): NCBI GI NO: 14423843 NR Description: Polcalcin Jun o 2
  misc_feature (19)..(185): NCBI GI NO: 34895640 NR Description: OSJNBa0083M16.33
  misc_feature (18)..(179): NCBI GI NO: 14589311 NR Description: calcium binding protein [Sesbania rostrata]
  misc_feature (33)..(185): NCBI GI NO: 15240340 NR Description: CALMODULIN-RELATED PROTEIN 2, TOUCH-INDUCED
  misc_feature (45)..(180): NCBI GI NO: 13397927 NR Description: putative calmodulin-related protein
  misc_feature (47)..(185): NCBI GI NO: 15235516 NR Description: putative calmodulin; protein id: At4g12860.1
  misc_feature (45)..(185): NCBI GI NO: 15231470 NR Description: putative calmodulin; protein id: At3g07490.1
  misc_feature (47)..(181): NCBI GI NO: 2392137 NR Description: Calmodulin Mutant With A Two Residue Deletion InThe Central Helix
MKMPALFRRRSSSKSRSASPPTTPPREEQQEESRQAIGSPARSAEEEMERVFRKFDANGDGRISRPELAALFESLGHAATEDELTRMMFEADADGDGFISLEEFAALNATAPGDDEEDLRLAFKVFDADGSGDISAAELAHVLHGLGEKATVQQCRRMIEGVDKNGDGLISFDEFKVMMAAGFAAKMA

SEQ ID NO: 14653 - protein, 186 aa, Triticum aestivum
  peptide (1)..(186): Ceres Seq. ID no. 12618541
  misc_feature (152)..(180): Pfam Name: Pfam Description:  EF hand
  misc_feature (1)..(186): NCBI GI NO: 19386815 NR Description: B1147A04.10
  misc_feature (39)..(180): NCBI GI NO: 15221781 NR Description: putative calmodulin; protein id: At1g24620.1
  misc_feature (45)..(184): NCBI GI NO: 14423843 NR Description: Polcalcin Jun o 2
  misc_feature (17)..(183): NCBI GI NO: 34895640 NR Description: OSJNBa0083M16.33
  misc_feature (16)..(177): NCBI GI NO: 14589311 NR Description: calcium binding protein [Sesbania rostrata]
  misc_feature (31)..(183): NCBI GI NO: 15240340 NR Description: CALMODULIN-RELATED PROTEIN 2, TOUCH-INDUCED
  misc_feature (43)..(178): NCBI GI NO: 13397927 NR Description: putative calmodulin-related protein
  misc_feature (45)..(183): NCBI GI NO: 15235516 NR Description: putative calmodulin; protein id: At4g12860.1
  misc_feature (43)..(183): NCBI GI NO: 15231470 NR Description: putative calmodulin; protein id: At3g07490.1
  misc_feature (45)..(179): NCBI GI NO: 2392137 NR Description: Calmodulin Mutant With A Two Residue Deletion InThe Central Helix
MPALFRRRSSSKSRSASPPTTPPREEQQEESRQAIGSPARSAEEEMERVFRKFDANGDGRISRPELAALFESLGHAATEDELTRMMFEADADGDGFISLEEFAALNATAPGDDEEDLRLAFKVFDADGSGDISAAELAHVLHGLGEKATVQQCRRMIEGVDKNGDGLISFDEFKVMMAAGFAAKMA

SEQ ID NO: 14654 - DNA, 1451 bp, Triticum aestivum
  misc_feature (1)..(1451): Ceres Seq. ID no. 12618197
aaaaagaaaaaatcaagctcccgtcgaaaagaagaaaggaaaaaacacagctctcacaccccgcctcggccgcgtctaaaaccctagcccccgccgccggcgagcgacgagatgatggaccagcggtggcgcccgacggtgaacgagcgggagttcatcgagcaggccctccagtcggacctccgcgtcgacggccgccgccccttcgacttccaccccttcgacttccgcaagctcacaatctccttcggcagggaggacggctccgcggaggtgctgctcggcgagacgtgcgtgatgggctatgtgaccgcccaattggtcccgccgtacaaggacaggccgaacgagggcacgctcgccatattcaccgagttctcgcccatggctgatcccgcctttgagccggggcggcccggggaagcggcgattgagctgggtcgtgtcatcgatcgtggcctaagggagagcagagccgtggatatggaatccttgtgtgttgttgcggggaagcatgtctgggcggtgcgcgttgaccttcacattctggacaatggggggaatctcatcgatgcagctaacatcgctgcattggcagctttgtctacattccggaggcctgaatgcacggttggtggggatgatggtcagcaagtcacagtacatgaccctgaggtcatggatccacttcccctaacaattcatcatctccccatagctgtaacctttgcatattttggtgacggtaatatcatggttatcgatccaacatacaaggaagaagctgttatgggaggaaggatgacagctacggttaactcgaatggtgatgtctgtgccattcagaaagctggtggagagggtgtcatgtcaagtgttatcatgcagtgtttaaggattgcttcggttaaagctgctgatatcacaagcaaaataaagaccaaggtcgataagtacactactgataaggcattgcagaaagtaaagcgtactccagcaatagttgctaaagaagttaacgttcctgatgtcgctatgaaggagagcatgcatagtgcaatggaaaaccaaacctcgaaggcacccaatgatgatcagcagataagtgaagattcaccagctgtagcaaatgacaaaaagcatgaggatgtcgagccagtgttgattgaatctaatccagaggtgaaaagtgtgtcaaattctggaagtgctggagagtcagatgaggtcaaggaaagcagatcaccggagagtctagtagatgctgtcaaaccaaaacataaaaggaagaagaaacaacatggcaagagttagattgactgtagccttaaagtcttaactgcatgatggttgcagacacagttagttagctttcttattctcttgatgtgcacatgctacagtggtacattattaaattttaagcaacgagtaatagtgctatcctttgc

SEQ ID NO: 14655 - protein, 400 aa, Triticum aestivum
  peptide (1)..(400): Ceres Seq. ID no. 12618198
  misc_feature (38)..(170): Pfam Name: Pfam Description:  3' exoribonuclease family, domain 1
  misc_feature (6)..(398): NCBI GI NO: 15232342 NR Description: nucleolar autoantigen - like protein
  misc_feature (2)..(309): NCBI GI NO: 18399822 NR Description: expressed protein; protein id: At3g12990
  misc_feature (2)..(309): NCBI GI NO: 21536581 NR Description: nucleolar autoantigen-like protein
  misc_feature (8)..(387): NCBI GI NO: 28172864 NR Description: polymyositis/scleroderma autoantigen 1
  misc_feature (8)..(387): NCBI GI NO: 28172868 NR Description: polymyositis/scleroderma autoantigen 1
  misc_feature (8)..(375): NCBI GI NO: 34856829 NR Description: similar to polymyositis scleroderma overlapsyndrome
  misc_feature (8)..(384): NCBI GI NO: 9506981 NR Description: polymyositis/scleroderma autoantigen 1
  misc_feature (8)..(384): NCBI GI NO: 12847890 NR Description: unnamed protein product [Mus musculus]
  misc_feature (25)..(387): NCBI GI NO: 14285675 NR Description: Exosome complex exonuclease RRP45
  misc_feature (2)..(289): NCBI GI NO: 19075183 NR Description: putative exosome 3'-5' exoribonuclease complex
MMDQRWRPTVNEREFIEQALQSDLRVDGRRPFDFHPFDFRKLTISFGREDGSAEVLLGETCVMGYVTAQLVPPYKDRPNEGTLAIFTEFSPMADPAFEPGRPGEAAIELGRVIDRGLRESRAVDMESLCVVAGKHVWAVRVDLHILDNGGNLIDAANIAALAALSTFRRPECTVGGDDGQQVTVHDPEVMDPLPLTIHHLPIAVTFAYFGDGNIMVIDPTYKEEAVMGGRMTATVNSNGDVCAIQKAGGEGVMSSVIMQCLRIASVKAADITSKIKTKVDKYTTDKALQKVKRTPAIVAKEVNVPDVAMKESMHSAMENQTSKAPNDDQQISEDSPAVANDKKHEDVEPVLIESNPEVKSVSNSGSAGESDEVKESRSPESLVDAVKPKHKRKKKQHGKS

SEQ ID NO: 14656 - protein, 399 aa, Triticum aestivum
  peptide (1)..(399): Ceres Seq. ID no. 12618199
  misc_feature (37)..(169): Pfam Name: Pfam Description:  3' exoribonuclease family, domain 1
  misc_feature (5)..(397): NCBI GI NO: 15232342 NR Description: nucleolar autoantigen - like protein
  misc_feature (1)..(308): NCBI GI NO: 18399822 NR Description: expressed protein; protein id: At3g12990
  misc_feature (1)..(308): NCBI GI NO: 21536581 NR Description: nucleolar autoantigen-like protein
  misc_feature (7)..(386): NCBI GI NO: 28172864 NR Description: polymyositis/scleroderma autoantigen 1
  misc_feature (7)..(386): NCBI GI NO: 28172868 NR Description: polymyositis/scleroderma autoantigen 1
  misc_feature (7)..(374): NCBI GI NO: 34856829 NR Description: similar to polymyositis scleroderma overlapsyndrome
  misc_feature (7)..(383): NCBI GI NO: 9506981 NR Description: polymyositis/scleroderma autoantigen 1
  misc_feature (7)..(383): NCBI GI NO: 12847890 NR Description: unnamed protein product [Mus musculus]
  misc_feature (24)..(386): NCBI GI NO: 14285675 NR Description: Exosome complex exonuclease RRP45
  misc_feature (1)..(288): NCBI GI NO: 19075183 NR Description: putative exosome 3'-5' exoribonuclease complex
MDQRWRPTVNEREFIEQALQSDLRVDGRRPFDFHPFDFRKLTISFGREDGSAEVLLGETCVMGYVTAQLVPPYKDRPNEGTLAIFTEFSPMADPAFEPGRPGEAAIELGRVIDRGLRESRAVDMESLCVVAGKHVWAVRVDLHILDNGGNLIDAANIAALAALSTFRRPECTVGGDDGQQVTVHDPEVMDPLPLTIHHLPIAVTFAYFGDGNIMVIDPTYKEEAVMGGRMTATVNSNGDVCAIQKAGGEGVMSSVIMQCLRIASVKAADITSKIKTKVDKYTTDKALQKVKRTPAIVAKEVNVPDVAMKESMHSAMENQTSKAPNDDQQISEDSPAVANDKKHEDVEPVLIESNPEVKSVSNSGSAGESDEVKESRSPESLVDAVKPKHKRKKKQHGKS

SEQ ID NO: 14657 - protein, 338 aa, Triticum aestivum
  peptide (1)..(338): Ceres Seq. ID no. 12618200
  misc_feature (1)..(108): Pfam Name: Pfam Description:  3' exoribonuclease family, domain 1
  misc_feature (1)..(336): NCBI GI NO: 15232342 NR Description: nucleolar autoantigen - like protein
  misc_feature (1)..(247): NCBI GI NO: 18399822 NR Description: expressed protein; protein id: At3g12990
  misc_feature (1)..(247): NCBI GI NO: 21536581 NR Description: nucleolar autoantigen-like protein
  misc_feature (1)..(325): NCBI GI NO: 28172864 NR Description: polymyositis/scleroderma autoantigen 1
  misc_feature (1)..(325): NCBI GI NO: 28172868 NR Description: polymyositis/scleroderma autoantigen 1
  misc_feature (1)..(313): NCBI GI NO: 34856829 NR Description: similar to polymyositis scleroderma overlapsyndrome
  misc_feature (1)..(322): NCBI GI NO: 9506981 NR Description: polymyositis/scleroderma autoantigen 1
  misc_feature (1)..(322): NCBI GI NO: 12847890 NR Description: unnamed protein product [Mus musculus]
  misc_feature (1)..(325): NCBI GI NO: 14285675 NR Description: Exosome complex exonuclease RRP45
  misc_feature (1)..(227): NCBI GI NO: 19075183 NR Description: putative exosome 3'-5' exoribonuclease complex
MGYVTAQLVPPYKDRPNEGTLAIFTEFSPMADPAFEPGRPGEAAIELGRVIDRGLRESRAVDMESLCVVAGKHVWAVRVDLHILDNGGNLIDAANIAALAALSTFRRPECTVGGDDGQQVTVHDPEVMDPLPLTIHHLPIAVTFAYFGDGNIMVIDPTYKEEAVMGGRMTATVNSNGDVCAIQKAGGEGVMSSVIMQCLRIASVKAADITSKIKTKVDKYTTDKALQKVKRTPAIVAKEVNVPDVAMKESMHSAMENQTSKAPNDDQQISEDSPAVANDKKHEDVEPVLIESNPEVKSVSNSGSAGESDEVKESRSPESLVDAVKPKHKRKKKQHGKS

SEQ ID NO: 14658 - DNA, 1459 bp, Triticum aestivum
  misc_feature (1)..(1459): Ceres Seq. ID no. 13597740
  misc_feature (1343)..(1343): n is a, c, t, g, unknown, or other
  misc_feature (1344)..(1344): n is a, c, t, g, unknown, or other
  misc_feature (1342)..(1342): n is a, c, t, g, unknown, or other
attttctctcgttgtccatttttccccaaacacgcggacgaaggaatcacccctaaaccctcctctccccgccgccgaagccgacatggccgtccaccacctcctccgccgcgggatctctggtgggtctcccctccaccctctgcgcggcctcctcctcgtatcgcaggagctcgggtggcgtcaggcgagctcggcggcggcgggggacgcagtggctgagctgaggggcgcgcgggaggacgtcaagcagctgctgaaggagaagtcctgccatcccatcctggttcgcttgggttggcatgatgctggtacttacgacaagaacattagtgagtggccccagtgtggtggagctaatggtagcttgaggtttgaaattgagttaaaacatgcggctaatgctggtcttgtgaatgctttgaagcttattcaagccatcaaggacaaatatgcaggtgttacttatgcggatctgtttcagcttgccagtgctacagctgtcgaggaagctggtggccccaaaatccccatgatctatggaagggttgatgtttctgcccctgatcaatgcccaccagaggggagactccctgctgctggtccgccttcacctgctgaacatttgcgagaagtattctacagaatgggcctgaatgacaaggaaattgttgcattgtcaggagcacacacacttggacgatcaagaccagagcgcagcggctggggtaaacctgaaacgaaatacactaaaaatggacctggtgcacctggggggcaatcttggacatcacagtggctcaagtttgataacagctatttcaaggatgtcaaagaacgacgagacgaggaccttctagttctgcctactgatgctgtgctctttgaggattcatcattcaagatttatgctgaaaagtatgctgaggaccaggatacattttttgaagactatgctgaagctcatgctaaattgagcaatcttgggtctaagtttgaccctcctaagggtgtatcactagactagctgatatttgctgctgatgaactgcattttggtgagtgaagatgacaaggctctgtttcttcaaactatttttgaggtgtaacaaattcggatccactgaagcagtattttgagttgtgtgctccattaccagaaataaaagcagcattggacagttcccggaccgaacatttatgatacttacatgttgtatcttcaaggtgatcaaatataaaacaatactaccaggctgttgcccctttgcgatatgtctgaaacagaacggtgcctagcaagcacactatgggatattttatttatctttttgtttgatcnnnaaaaaaaaaaaaaaaaaaaaaaaaaaaaaaaaaaaaaaaaaaaaaaaaaaaaaaaaaaaggaaaaaaaaaaaaaaaaaggtttttcaatcccgccaacctcgagggggggcccgg

SEQ ID NO: 14659 - protein, 341 aa, Triticum aestivum
  peptide (1)..(341): Ceres Seq. ID no. 13597741
  misc_feature (78)..(310): Pfam Name: Pfam Description:  Peroxidase
  misc_feature (65)..(341): NCBI GI NO: 24496465 NR Description: stromal ascorbate peroxidase [Retama raetam]
  misc_feature (8)..(341): NCBI GI NO: 4996602 NR Description: thylakoid-bound ascorbate peroxidase
  misc_feature (8)..(341): NCBI GI NO: 4996604 NR Description: stromal ascorbate peroxidase [Nicotiana tabacum]
  misc_feature (2)..(341): NCBI GI NO: 3202026 NR Description: stromal L-ascorbate peroxidase precursor
  misc_feature (2)..(341): NCBI GI NO: 7484621 NR Description: L-ascorbate peroxidase (EC 1
  misc_feature (6)..(341): NCBI GI NO: 32879781 NR Description: stromal ascorbate peroxidase
  misc_feature (67)..(341): NCBI GI NO: 34809902 NR Description: Chain A
  misc_feature (63)..(341): NCBI GI NO: 32879783 NR Description: thylakoid-bound ascorbate peroxidase
  misc_feature (63)..(341): NCBI GI NO: 21039134 NR Description: ascorbate peroxidase [Lycopersicon esculentum]
  misc_feature (67)..(341): NCBI GI NO: 25992557 NR Description: thylakoid-bound ascorbate peroxidase
FSLVVHFSPNTRTKESPLNPPLPAAEADMAVHHLLRRGISGGSPLHPLRGLLLVSQELGWRQASSAAAGDAVAELRGAREDVKQLLKEKSCHPILVRLGWHDAGTYDKNISEWPQCGGANGSLRFEIELKHAANAGLVNALKLIQAIKDKYAGVTYADLFQLASATAVEEAGGPKIPMIYGRVDVSAPDQCPPEGRLPAAGPPSPAEHLREVFYRMGLNDKEIVALSGAHTLGRSRPERSGWGKPETKYTKNGPGAPGGQSWTSQWLKFDNSYFKDVKERRDEDLLVLPTDAVLFEDSSFKIYAEKYAEDQDTFFEDYAEAHAKLSNLGSKFDPPKGVSLD

SEQ ID NO: 14660 - protein, 313 aa, Triticum aestivum
  peptide (1)..(313): Ceres Seq. ID no. 13597742
  misc_feature (50)..(282): Pfam Name: Pfam Description:  Peroxidase
  misc_feature (37)..(313): NCBI GI NO: 24496465 NR Description: stromal ascorbate peroxidase [Retama raetam]
  misc_feature (1)..(313): NCBI GI NO: 4996602 NR Description: thylakoid-bound ascorbate peroxidase
  misc_feature (1)..(313): NCBI GI NO: 4996604 NR Description: stromal ascorbate peroxidase [Nicotiana tabacum]
  misc_feature (1)..(313): NCBI GI NO: 3202026 NR Description: stromal L-ascorbate peroxidase precursor
  misc_feature (1)..(313): NCBI GI NO: 7484621 NR Description: L-ascorbate peroxidase (EC 1
  misc_feature (1)..(313): NCBI GI NO: 32879781 NR Description: stromal ascorbate peroxidase
  misc_feature (39)..(313): NCBI GI NO: 34809902 NR Description: Chain A
  misc_feature (35)..(313): NCBI GI NO: 32879783 NR Description: thylakoid-bound ascorbate peroxidase
  misc_feature (35)..(313): NCBI GI NO: 21039134 NR Description: ascorbate peroxidase [Lycopersicon esculentum]
  misc_feature (39)..(313): NCBI GI NO: 25992557 NR Description: thylakoid-bound ascorbate peroxidase
MAVHHLLRRGISGGSPLHPLRGLLLVSQELGWRQASSAAAGDAVAELRGAREDVKQLLKEKSCHPILVRLGWHDAGTYDKNISEWPQCGGANGSLRFEIELKHAANAGLVNALKLIQAIKDKYAGVTYADLFQLASATAVEEAGGPKIPMIYGRVDVSAPDQCPPEGRLPAAGPPSPAEHLREVFYRMGLNDKEIVALSGAHTLGRSRPERSGWGKPETKYTKNGPGAPGGQSWTSQWLKFDNSYFKDVKERRDEDLLVLPTDAVLFEDSSFKIYAEKYAEDQDTFFEDYAEAHAKLSNLGSKFDPPKGVSLD

SEQ ID NO: 14661 - DNA, 816 bp, Triticum aestivum
  misc_feature (1)..(816): Ceres Seq. ID no. 13597931
accaaaccccaaacccttctccccttttcttccccaacccttccggcggcggcggcggcgcgttggctctcgctccctccccaccgtctccgatggccctcgtcgccggctcctacgagcgcttcatctggggcttctccctcaaggccctcgccgcctccgccgccgaggaggcccagcccctcgcgccgctcttctcctacccggcccacgcggggcccatccgctgcgtggcggccgcgccgcgggcggggctcgcggcctccggcggcgccgacgactccatccgcctctacgacctgcgcgccgccgccgacctcggcccgcttctcgacccctccgccgccgtctccgcgctcgccttccactccatcggccccgtcccgcgcaacctcctcgccgcctccgacgacggcctgctccacctctacgacgccgacggctttgcgctcctcacctcgctccgcgtcttcccgcggggccgcgaggccgccgacgccctcgccgtgcacccctcgggccgggtcgcgctcgccgtcggccgcgccgggggcctctccatggtcaacctcctccgcggccgccgcagcttcacctgccgcctcgagcgcgccgcctccaccgtcgcctacgccgaggacgccgccggcggtgascgttttktkwtkkyykyykwgkwkwaggtywyyktkcatgactccgaggacgccaggatcatattcmatkwgatgccctkmgacataagagggttctcrccttagcwccatcacwagaactsraawttctgggtactgaactgaaaatcattatccatgt

SEQ ID NO: 14662 - protein, 252 aa, Triticum aestivum
  peptide (1)..(252): Ceres Seq. ID no. 15222233
  misc_feature (31)..(239): NCBI GI NO: 15217832 NR Description: transducin / WD-40 repeat protein family
  misc_feature (31)..(239): NCBI GI NO: 23306444 NR Description: Unknown protein [Arabidopsis thaliana]
  misc_feature (31)..(239): NCBI GI NO: 25404514 NR Description: hypothetical protein F16G16.2
  misc_feature (218)..(218): Xaa is any aa, unknown or other
  misc_feature (221)..(221): Xaa is any aa, unknown or other
  misc_feature (222)..(222): Xaa is any aa, unknown or other
  misc_feature (223)..(223): Xaa is any aa, unknown or other
  misc_feature (224)..(224): Xaa is any aa, unknown or other
  misc_feature (225)..(225): Xaa is any aa, unknown or other
  misc_feature (226)..(226): Xaa is any aa, unknown or other
  misc_feature (227)..(227): Xaa is any aa, unknown or other
  misc_feature (228)..(228): Xaa is any aa, unknown or other
  misc_feature (229)..(229): Xaa is any aa, unknown or other
  misc_feature (230)..(230): Xaa is any aa, unknown or other
  misc_feature (241)..(241): Xaa is any aa, unknown or other
  misc_feature (242)..(242): Xaa is any aa, unknown or other
  misc_feature (245)..(245): Xaa is any aa, unknown or other
  misc_feature (251)..(251): Xaa is any aa, unknown or other
QTPNPSPLFFPNPSGGGGGALALAPSPPSPMALVAGSYERFIWGFSLKALAASAAEEAQPLAPLFSYPAHAGPIRCVAAAPRAGLAASGGADDSIRLYDLRAAADLGPLLDPSAAVSALAFHSIGPVPRNLLAASDDGLLHLYDADGFALLTSLRVFPRGREAADALAVHPSGRVALAVGRAGGLSMVNLLRGRRSFTCRLERAASTVAYAEDAAGGXRFXXXXXXXXXXHDSEDARIIFXXMPXDIRGFXP

SEQ ID NO: 14663 - protein, 247 aa, Triticum aestivum
  peptide (1)..(247): Ceres Seq. ID no. 15222234
  misc_feature (26)..(216): Pfam Name: Pfam Description:  Extensin-like region
  misc_feature (3)..(241): NCBI GI NO: 20138131 NR Description: Vegetative cell wall protein gp1 precursor
  misc_feature (8)..(245): NCBI GI NO: 23017082 NR Description: hypothetical protein [Thermobifida fusca]
  misc_feature (3)..(215): NCBI GI NO: 20138131 NR Description: Vegetative cell wall protein gp1 precursor
  misc_feature (3)..(217): NCBI GI NO: 27375632 NR Description: blr0521 [Bradyrhizobium japonicum]
  misc_feature (1)..(247): NCBI GI NO: 188864 NR Description: mucin
  misc_feature (3)..(216): NCBI GI NO: 20138131 NR Description: Vegetative cell wall protein gp1 precursor
  misc_feature (14)..(217): NCBI GI NO: 20138131 NR Description: Vegetative cell wall protein gp1 precursor
  misc_feature (9)..(215): NCBI GI NO: 20138131 NR Description: Vegetative cell wall protein gp1 precursor
  misc_feature (1)..(216): NCBI GI NO: 15233976 NR Description: leucine-rich repeat extensin family
  misc_feature (1)..(247): NCBI GI NO: 186396 NR Description: mucin
  misc_feature (219)..(219): Xaa is any aa, unknown or other
  misc_feature (221)..(221): Xaa is any aa, unknown or other
  misc_feature (222)..(222): Xaa is any aa, unknown or other
  misc_feature (223)..(223): Xaa is any aa, unknown or other
  misc_feature (224)..(224): Xaa is any aa, unknown or other
  misc_feature (225)..(225): Xaa is any aa, unknown or other
  misc_feature (226)..(226): Xaa is any aa, unknown or other
  misc_feature (227)..(227): Xaa is any aa, unknown or other
  misc_feature (229)..(229): Xaa is any aa, unknown or other
  misc_feature (230)..(230): Xaa is any aa, unknown or other
  misc_feature (231)..(231): Xaa is any aa, unknown or other
  misc_feature (241)..(241): Xaa is any aa, unknown or other
  misc_feature (242)..(242): Xaa is any aa, unknown or other
  misc_feature (243)..(243): Xaa is any aa, unknown or other
  misc_feature (246)..(246): Xaa is any aa, unknown or other
TKPQTLLPFSSPTLPAAAAARWLSLPPHRLRWPSSPAPTSASSGASPSRPSPPPPPRRPSPSRRSSPTRPTRGPSAAWRPRRGRGSRPPAAPTTPSASTTCAPPPTSARFSTPPPPSPRSPSTPSAPSRATSSPPPTTACSTSTTPTALRSSPRSASSRGAARPPTPSPCTPRAGSRSPSAAPGASPWSTSSAAAAASPAASSAPPPPSPTPRTPPAVXVXXXXXXXRXXXMTPRTPGSYXXXCPXT

SEQ ID NO: 14664 - protein, 222 aa, Triticum aestivum
  peptide (1)..(222): Ceres Seq. ID no. 15222235
  misc_feature (1)..(209): NCBI GI NO: 15217832 NR Description: transducin / WD-40 repeat protein family
  misc_feature (1)..(209): NCBI GI NO: 25404514 NR Description: hypothetical protein F16G16.2
  misc_feature (1)..(209): NCBI GI NO: 23306444 NR Description: Unknown protein [Arabidopsis thaliana]
  misc_feature (188)..(188): Xaa is any aa, unknown or other
  misc_feature (191)..(191): Xaa is any aa, unknown or other
  misc_feature (192)..(192): Xaa is any aa, unknown or other
  misc_feature (193)..(193): Xaa is any aa, unknown or other
  misc_feature (194)..(194): Xaa is any aa, unknown or other
  misc_feature (195)..(195): Xaa is any aa, unknown or other
  misc_feature (196)..(196): Xaa is any aa, unknown or other
  misc_feature (197)..(197): Xaa is any aa, unknown or other
  misc_feature (198)..(198): Xaa is any aa, unknown or other
  misc_feature (199)..(199): Xaa is any aa, unknown or other
  misc_feature (200)..(200): Xaa is any aa, unknown or other
  misc_feature (211)..(211): Xaa is any aa, unknown or other
  misc_feature (212)..(212): Xaa is any aa, unknown or other
  misc_feature (215)..(215): Xaa is any aa, unknown or other
  misc_feature (221)..(221): Xaa is any aa, unknown or other
MALVAGSYERFIWGFSLKALAASAAEEAQPLAPLFSYPAHAGPIRCVAAAPRAGLAASGGADDSIRLYDLRAAADLGPLLDPSAAVSALAFHSIGPVPRNLLAASDDGLLHLYDADGFALLTSLRVFPRGREAADALAVHPSGRVALAVGRAGGLSMVNLLRGRRSFTCRLERAASTVAYAEDAAGGXRFXXXXXXXXXXHDSEDARIIFXXMPXDIRGFXP

SEQ ID NO: 14665 - DNA, 1034 bp, Triticum aestivum
  misc_feature (1)..(1034): Ceres Seq. ID no. 12618176
atagaacatcctaatcgaaaaaatcacccaaccaaccgcctctacaagcgcagcccagatctcggctccttcccttcctcgaaccaagcatcagcaatggcgaccacggcagccgacgccacggccgcggttcccaaggagcagcagcccgccaacggttccgcggccgccaccaccggcggcgagcaggtcacgcgccactccgaggtcggacacaagagcctgctccagagcgacgccctctaccagtacatcctggagacgagcgtgtacccgcgcgagcacgagtgcatgaaggagctccgcgagatcaccgccaaccacccatggaacctgatgacgacgtcggcggacgagggccagttcctcaacatgctgctcaagctcatcggcgccaagaagaccatggagatcggcgtctacaccggctactccctgctcgccaccgcgctcgccatccccgacgacggcaccatcttggccatggacatcaaccgcgagaactacgagctggggctgccgtgcatcgagaaggccggcgtggcgcacaagatcgacttccgcgagggcccggcgctgcccgtcctggacgcgctgctggaggacgaggccaaccacgggaccttcgacttcgtcttcgtggacgccgacaaggacaactacctcaactaccacgagcgcctcatgaagctcgtcaaggtcggcggcctcctcggctacgacaacaccctctggaacggctccgtcgtgctccccgccgacgcccccatgcgcaagtacatccgctactaccgcgacttcgtcctcgagctcaacaaggccctcgccgccgaccagcgcgtcgagatctgccagctccccgtcggcgacggcatcaccctctgccgccgcgccaagtgaaccagagaacccatctccgccgctccgccatagatgccaagaacaagaattaattaattactccccattttgtctttcctgctcgccttctgtactctacatctatcttctgcaattcgtataaagatttctcc

SEQ ID NO: 14666 - protein, 299 aa, Triticum aestivum
  peptide (1)..(299): Ceres Seq. ID no. 12618177
  misc_feature (86)..(297): Pfam Name: Pfam Description:  O-methyltransferase
  misc_feature (37)..(299): NCBI GI NO: 5091498 NR Description: ESTs AU058067
  misc_feature (33)..(299): NCBI GI NO: 37221545 NR Description: caffeoyl-CoA 3-O-methyltransferase 1 [Zea mays]
  misc_feature (33)..(299): NCBI GI NO: 30580385 NR Description: Caffeoyl-CoA O-methyltransferase 1
  misc_feature (33)..(299): NCBI GI NO: 30580384 NR Description: Caffeoyl-CoA O-methyltransferase 2
  misc_feature (57)..(297): NCBI GI NO: 3023436 NR Description: Caffeoyl-CoA O-methyltransferase
  misc_feature (57)..(297): NCBI GI NO: 30580333 NR Description: Caffeoyl-CoA O-methyltransferase 1
  misc_feature (62)..(297): NCBI GI NO: 2511737 NR Description: caffeoyl-CoA 3-O-methyltransferase 5
  misc_feature (33)..(299): NCBI GI NO: 37221603 NR Description: caffeoyl-CoA 3-O-methyltransferase 1 [Zea mays]
  misc_feature (33)..(299): NCBI GI NO: 37221609 NR Description: caffeoyl-CoA 3-O-methyltransferase 1 [Zea mays]
  misc_feature (57)..(297): NCBI GI NO: 40795556 NR Description: caffeoyl-CoA-O-methyltransferase
IEHPNRKNHPTNRLYKRSPDLGSFPSSNQASAMATTAADATAAVPKEQQPANGSAAATTGGEQVTRHSEVGHKSLLQSDALYQYILETSVYPREHECMKELREITANHPWNLMTTSADEGQFLNMLLKLIGAKKTMEIGVYTGYSLLATALAIPDDGTILAMDINRENYELGLPCIEKAGVAHKIDFREGPALPVLDALLEDEANHGTFDFVFVDADKDNYLNYHERLMKLVKVGGLLGYDNTLWNGSVVLPADAPMRKYIRYYRDFVLELNKALAADQRVEICQLPVGDGITLCRRAK

SEQ ID NO: 14667 - protein, 267 aa, Triticum aestivum
  peptide (1)..(267): Ceres Seq. ID no. 12618178
  misc_feature (54)..(265): Pfam Name: Pfam Description:  O-methyltransferase
  misc_feature (5)..(267): NCBI GI NO: 5091498 NR Description: ESTs AU058067
  misc_feature (1)..(267): NCBI GI NO: 37221545 NR Description: caffeoyl-CoA 3-O-methyltransferase 1 [Zea mays]
  misc_feature (1)..(267): NCBI GI NO: 30580385 NR Description: Caffeoyl-CoA O-methyltransferase 1
  misc_feature (1)..(267): NCBI GI NO: 30580384 NR Description: Caffeoyl-CoA O-methyltransferase 2
  misc_feature (25)..(265): NCBI GI NO: 3023436 NR Description: Caffeoyl-CoA O-methyltransferase
  misc_feature (25)..(265): NCBI GI NO: 30580333 NR Description: Caffeoyl-CoA O-methyltransferase 1
  misc_feature (30)..(265): NCBI GI NO: 2511737 NR Description: caffeoyl-CoA 3-O-methyltransferase 5
  misc_feature (1)..(267): NCBI GI NO: 37221603 NR Description: caffeoyl-CoA 3-O-methyltransferase 1 [Zea mays]
  misc_feature (1)..(267): NCBI GI NO: 37221609 NR Description: caffeoyl-CoA 3-O-methyltransferase 1 [Zea mays]
  misc_feature (25)..(265): NCBI GI NO: 40795556 NR Description: caffeoyl-CoA-O-methyltransferase
MATTAADATAAVPKEQQPANGSAAATTGGEQVTRHSEVGHKSLLQSDALYQYILETSVYPREHECMKELREITANHPWNLMTTSADEGQFLNMLLKLIGAKKTMEIGVYTGYSLLATALAIPDDGTILAMDINRENYELGLPCIEKAGVAHKIDFREGPALPVLDALLEDEANHGTFDFVFVDADKDNYLNYHERLMKLVKVGGLLGYDNTLWNGSVVLPADAPMRKYIRYYRDFVLELNKALAADQRVEICQLPVGDGITLCRRAK

SEQ ID NO: 14668 - protein, 208 aa, Triticum aestivum
  peptide (1)..(208): Ceres Seq. ID no. 12618179
  misc_feature (1)..(193): Pfam Name: Pfam Description:  High molecular weight glutenin subunit
MEPDDDVGGRGPVPQHAAQAHRRQEDHGDRRLHRLLPARHRARHPRRRHHLGHGHQPRELRAGAAVHREGRRGAQDRLPRGPGAARPGRAAGGRGQPRDLRLRLRGRRQGQLPQLPRAPHEARQGRRPPRLRQHPLERLRRAPRRRPHAQVHPLLPRLRPRAQQGPRRRPARRDLPAPRRRRHHPLPPRQVNQRTHLRRSAIDAKNKN

SEQ ID NO: 14669 - DNA, 1612 bp, Triticum aestivum
  misc_feature (1)..(1612): Ceres Seq. ID no. 13655506
agaacatcctaatcgaaaattttccgcaagcaagcaagccgtatatgcacgcattatctcttcttcttcttcttcttcttcttcttcttctacctcttcttctccttctccttgtaggtggcagcgcctaccaagctcttttccgccggtgaccattccagtagtccatcacatgggtcaagacgagcgccagcatccagagctgccggacatggagaaggagctctctgccgacgcggtagcctgcgaccactgcagcggcccacaggcggtggtgtactgccgggccgacagcgccaggctctgcctgccgtgcgaccgccacgtgcacgccgccaacgcggtctgctcccgccacctgcgcgccccgctctgcgccgcatgccgcgcaaccggggccgtcttccgccacgccggtcccgaattcctctgctccaactgcgacttcgggaggagccgggacgccgagctgccgctgcacgaccgctgcacagtccaggggtacacgggacgaccctccgcgcacgacctcgccgctcttctcggggtccccgacttcgacaagccctcggccggcaaagccgacgactgttggtgggccatttgggaggagccccaggtgttcagcctggaggatctcatcgtgcccaccacttctagccatggcttccagcccctcgtcacgccgtcctcgcccaagatccacaactcacccgatggaaagaccaacgatgaggtcatacggcagttacgtgagctcgccgaggtcgacatgggcggcggtcagataacacctcgtgaggaggcagagcaagctgctcatctgttgccttccaggacagagtcacagcacaccactggaaatggcgatttcggcacagataacagccatgaggttgcaaccatgccamcccctagttatgagaacggcggatggaacaataacgattatcatgccctaaatggtgcctgcaagaccgagcacgaacaagagcaggctccagcaagctcagctgaagcatgcttgtcatcgtttgttcagatgtcagaactttgccccagcatgagcaatggtagcatgatggacgatggccagcaggcaaatcctggtactggcatgccaatgcaagctttccccaaaagaagtggctttgatgttgttgctggccctgaccgcgacattgtcatttcccgctataaagaaaagaggaggacaagaagattcgacaaacaggtgcgatatgagtcccgcaaagctcgtgcagacagcaggttgaggatcaaggggcgttttgcaaaggcaaatcagagttaagccttgactttgcagtatattttgcatcttggacagaaggaataacactaattaggagtgagtgcagatgatacataaggcgtgaacattttgtttgccttcagttcggcagatggtagttcatgtacaatctgaataatgtatgttgccaacatatgggctatattaatgttttgaggggagttgttcttagtccaacccttgtatatagtttccatctatgaactctgtaaaagtactacaggcaagtgagagtgacagtatgccatttttgcatggtttagtgaattttgtctc

SEQ ID NO: 14670 - protein, 437 aa, Triticum aestivum
  peptide (1)..(437): Ceres Seq. ID no. 15219746
  misc_feature (79)..(124): Pfam Name: Pfam Description:  B-box zinc finger
  misc_feature (62)..(436): NCBI GI NO: 7522220 NR Description: zinc-finger protein C60910 [imported] - rice
  misc_feature (58)..(435): NCBI GI NO: 34899270 NR Description: putative zinc-finger protein
  misc_feature (82)..(276): NCBI GI NO: 15227152 NR Description: CONSTANS B-box zinc finger family protein
  misc_feature (391)..(434): NCBI GI NO: 15227152 NR Description: CONSTANS B-box zinc finger family protein
  misc_feature (82)..(216): NCBI GI NO: 38175538 NR Description: zinc-finger protein C60910-like
  misc_feature (391)..(435): NCBI GI NO: 38175538 NR Description: zinc-finger protein C60910-like
  misc_feature (82)..(437): NCBI GI NO: 15238918 NR Description: CONSTANS B-box zinc finger family protein
  misc_feature (71)..(196): NCBI GI NO: 30685731 NR Description: CONSTANS B-box zinc finger family protein
  misc_feature (391)..(434): NCBI GI NO: 30685731 NR Description: CONSTANS B-box zinc finger family protein
  misc_feature (76)..(261): NCBI GI NO: 15217814 NR Description: CONSTANS B-box zinc finger family protein
  misc_feature (304)..(304): Xaa is any aa, unknown or other
EHPNRKFSASKQAVYARIISSSSSSSSSSSTSSSPSPCRWQRLPSSFPPVTIPVVHHMGQDERQHPELPDMEKELSADAVACDHCSGPQAVVYCRADSARLCLPCDRHVHAANAVCSRHLRAPLCAACRATGAVFRHAGPEFLCSNCDFGRSRDAELPLHDRCTVQGYTGRPSAHDLAALLGVPDFDKPSAGKADDCWWAIWEEPQVFSLEDLIVPTTSSHGFQPLVTPSSPKIHNSPDGKTNDEVIRQLRELAEVDMGGGQITPREEAEQAAHLLPSRTESQHTTGNGDFGTDNSHEVATMPXPSYENGGWNNNDYHALNGACKTEHEQEQAPASSAEACLSSFVQMSELCPSMSNGSMMDDGQQANPGTGMPMQAFPKRSGFDVVAGPDRDIVISRYKEKRRTRRFDKQVRYESRKARADSRLRIKGRFAKANQS

SEQ ID NO: 14671 - protein, 380 aa, Triticum aestivum
  peptide (1)..(380): Ceres Seq. ID no. 15219747
  misc_feature (22)..(67): Pfam Name: Pfam Description:  B-box zinc finger
  misc_feature (5)..(379): NCBI GI NO: 7522220 NR Description: zinc-finger protein C60910 [imported] - rice
  misc_feature (1)..(378): NCBI GI NO: 34899270 NR Description: putative zinc-finger protein
  misc_feature (25)..(219): NCBI GI NO: 15227152 NR Description: CONSTANS B-box zinc finger family protein
  misc_feature (334)..(377): NCBI GI NO: 15227152 NR Description: CONSTANS B-box zinc finger family protein
  misc_feature (25)..(159): NCBI GI NO: 38175538 NR Description: zinc-finger protein C60910-like
  misc_feature (334)..(378): NCBI GI NO: 38175538 NR Description: zinc-finger protein C60910-like
  misc_feature (25)..(380): NCBI GI NO: 15238918 NR Description: CONSTANS B-box zinc finger family protein
  misc_feature (14)..(139): NCBI GI NO: 30685731 NR Description: CONSTANS B-box zinc finger family protein
  misc_feature (334)..(377): NCBI GI NO: 30685731 NR Description: CONSTANS B-box zinc finger family protein
  misc_feature (19)..(204): NCBI GI NO: 15217814 NR Description: CONSTANS B-box zinc finger family protein
  misc_feature (247)..(247): Xaa is any aa, unknown or other
MGQDERQHPELPDMEKELSADAVACDHCSGPQAVVYCRADSARLCLPCDRHVHAANAVCSRHLRAPLCAACRATGAVFRHAGPEFLCSNCDFGRSRDAELPLHDRCTVQGYTGRPSAHDLAALLGVPDFDKPSAGKADDCWWAIWEEPQVFSLEDLIVPTTSSHGFQPLVTPSSPKIHNSPDGKTNDEVIRQLRELAEVDMGGGQITPREEAEQAAHLLPSRTESQHTTGNGDFGTDNSHEVATMPXPSYENGGWNNNDYHALNGACKTEHEQEQAPASSAEACLSSFVQMSELCPSMSNGSMMDDGQQANPGTGMPMQAFPKRSGFDVVAGPDRDIVISRYKEKRRTRRFDKQVRYESRKARADSRLRIKGRFAKANQS

SEQ ID NO: 14672 - protein, 367 aa, Triticum aestivum
  peptide (1)..(367): Ceres Seq. ID no. 15219748
  misc_feature (9)..(54): Pfam Name: Pfam Description:  B-box zinc finger
  misc_feature (1)..(366): NCBI GI NO: 7522220 NR Description: zinc-finger protein C60910 [imported] - rice
  misc_feature (1)..(365): NCBI GI NO: 34899270 NR Description: putative zinc-finger protein
  misc_feature (12)..(206): NCBI GI NO: 15227152 NR Description: CONSTANS B-box zinc finger family protein
  misc_feature (321)..(364): NCBI GI NO: 15227152 NR Description: CONSTANS B-box zinc finger family protein
  misc_feature (12)..(146): NCBI GI NO: 38175538 NR Description: zinc-finger protein C60910-like
  misc_feature (321)..(365): NCBI GI NO: 38175538 NR Description: zinc-finger protein C60910-like
  misc_feature (12)..(367): NCBI GI NO: 15238918 NR Description: CONSTANS B-box zinc finger family protein
  misc_feature (1)..(126): NCBI GI NO: 30685731 NR Description: CONSTANS B-box zinc finger family protein
  misc_feature (321)..(364): NCBI GI NO: 30685731 NR Description: CONSTANS B-box zinc finger family protein
  misc_feature (6)..(191): NCBI GI NO: 15217814 NR Description: CONSTANS B-box zinc finger family protein
  misc_feature (234)..(234): Xaa is any aa, unknown or other
MEKELSADAVACDHCSGPQAVVYCRADSARLCLPCDRHVHAANAVCSRHLRAPLCAACRATGAVFRHAGPEFLCSNCDFGRSRDAELPLHDRCTVQGYTGRPSAHDLAALLGVPDFDKPSAGKADDCWWAIWEEPQVFSLEDLIVPTTSSHGFQPLVTPSSPKIHNSPDGKTNDEVIRQLRELAEVDMGGGQITPREEAEQAAHLLPSRTESQHTTGNGDFGTDNSHEVATMPXPSYENGGWNNNDYHALNGACKTEHEQEQAPASSAEACLSSFVQMSELCPSMSNGSMMDDGQQANPGTGMPMQAFPKRSGFDVVAGPDRDIVISRYKEKRRTRRFDKQVRYESRKARADSRLRIKGRFAKANQS

SEQ ID NO: 14673 - DNA, 1025 bp, Triticum aestivum
  misc_feature (1)..(1025): Ceres Seq. ID no. 13598648
acccatcccaccacattcaagtcgaagaagctcctcgatctccatcactgcaaccagccacttgagctctgaatctttgaagctcagccagttcgccgcgaccaccgagagcctcaagtttcgccatgtcgagcgccggccagaagcagcagcagcagcagcaggcgaagaagccggcggcggcggaggacgtcgagatcaagaaggtcttctcccgcttcgacacggacggcgacggccggatctcgccgtccgagctggcggccgtgtcgcgcgccatcgcgccgccggccaccgagtccgcgcagggccgcgaggtggcgtccatgatggacgagctcgacaccgaccgcgacggctacgtggacctcggcgagttcgccgccttccacggccgcggccgcgaggagcgcgagctcgacgccgagctgcgcgacgccttcgacgtctacgacatcaacggcgacggccgcatctccgtcgccgagctcagcaaggtcctgagccgcatcggcgagggatgcagcaccgaggagtgcgagaagatgatcgcctccgtcgacgtcgacggcgacggctgcgtcggattcgaggagttcaagaagatgatgaccgccggtgacgccggcgcaccacctcaacccgaagcgatcgccgtgcctgacagcaacaaacccaagaaggagtgatacatgtgcttttgcttgtaaaaaaattgtaatccgagggagcgaattagttgtcagtccctgttggccatagtcttctggtctgaaaaaaaatgggaataaggatcaatgtgcaattgccattgtcgtgctgtacctctacgataacggttgtgtgtgcacggtagcagtactagtactagatattttctccgagtatggtcatcttgctacttcattttcacatgaaaatgaagtgccatgttgatgttgaagggtgataagcatccattatcaatgttacttgtaatcgcattcggcaataaatgtattgtcatcttatgatgtttgctattc

SEQ ID NO: 14674 - protein, 206 aa, Triticum aestivum
  peptide (1)..(206): Ceres Seq. ID no. 13598649
PIPPHSSRRSSSISITATSHLSSESLKLSQFAATTESLKFRHVERRPEAAAAAAGEEAGGGGGRRDQEGLLPLRHGRRRPDLAVRAGGRVARHRAAGHRVRAGPRGGVHDGRARHRPRRLRGPRRVRRLPRPRPRGARARRRAARRLRRLRHQRRRPHLRRRAQQGPEPHRRGMQHRGVREDDRLRRRRRRRLRRIRGVQEDDDRR

SEQ ID NO: 14675 - protein, 187 aa, Triticum aestivum; identical to SEQ ID NO: 6930
  peptide (1)..(187): Ceres Seq. ID no. 13598650
  misc_feature (64)..(92): Pfam Name: Pfam Description:  EF hand
  misc_feature (1)..(169): NCBI GI NO: 34895640 NR Description: OSJNBa0083M16.33
  misc_feature (24)..(169): NCBI GI NO: 15240340 NR Description: calmodulin-related protein 2, touch-induced (TCH2)
  misc_feature (8)..(163): NCBI GI NO: 14589311 NR Description: calcium binding protein [Sesbania rostrata]
  misc_feature (1)..(164): NCBI GI NO: 15221030 NR Description: calcium-binding protein, putative
  misc_feature (24)..(162): NCBI GI NO: 21618074 NR Description: calmodulin-related protein [Arabidopsis thaliana]
  misc_feature (24)..(162): NCBI GI NO: 18408502 NR Description: calmodulin-related protein, putative
  misc_feature (17)..(169): NCBI GI NO: 19386815 NR Description: B1147A04.10
  misc_feature (15)..(164): NCBI GI NO: 15219514 NR Description: calcium-binding protein, putative
  misc_feature (16)..(174): NCBI GI NO: 6901654 NR Description: calcium-binding protein [Olea europaea]
  misc_feature (13)..(165): NCBI GI NO: 15221781 NR Description: polcalcin

SEQ ID NO: 14676 - protein, 120 aa, Triticum aestivum; identical to SEQ ID NO: 6931
  peptide (1)..(120): Ceres Seq. ID no. 13598651
  misc_feature (1)..(25): Pfam Name: Pfam Description:  EF hand
  misc_feature (1)..(102): NCBI GI NO: 34895640 NR Description: OSJNBa0083M16.33
  misc_feature (1)..(102): NCBI GI NO: 15240340 NR Description: calmodulin-related protein 2, touch-induced (TCH2)
  misc_feature (1)..(96): NCBI GI NO: 14589311 NR Description: calcium binding protein [Sesbania rostrata]
  misc_feature (1)..(97): NCBI GI NO: 15221030 NR Description: calcium-binding protein, putative
  misc_feature (1)..(95): NCBI GI NO: 21618074 NR Description: calmodulin-related protein [Arabidopsis thaliana]
  misc_feature (1)..(95): NCBI GI NO: 18408502 NR Description: calmodulin-related protein, putative
  misc_feature (1)..(102): NCBI GI NO: 19386815 NR Description: B1147A04.10
  misc_feature (1)..(97): NCBI GI NO: 15219514 NR Description: calcium-binding protein, putative
  misc_feature (1)..(107): NCBI GI NO: 6901654 NR Description: calcium-binding protein [Olea europaea]
  misc_feature (1)..(98): NCBI GI NO: 15221781 NR Description: polcalcin

SEQ ID NO: 14677 - DNA, 1248 bp, Triticum aestivum
  misc_feature (1)..(1248): Ceres Seq. ID no. 13597134
acgagaccattacctagaacgtcctaatcgaaaaccatttctcgcatatatttttcttcccgtttcccgattcaagtcagcggttagggttcggagatctcggcgtcgcatcgcggccatggcgacaagcacgcttagcacagtcatggtgagcaatttgtcgctgaaagcagcactaagagatgtaaaggaattcttttccttttctggtgaccttgtgcatgttgaaatgcaaagtggtgacgagctgtctcaagttgcctacattgcttttaaagataagcaaggagctgagacagccatgcttctgacgggtgccacgatagtcgatatggctgtcatcgtaacaccagccactgattatgagctaccagctgatgttttagctgctctagagcccaaagatgcaaagtcctctgctcttgagaaggcagaggacatcgttgggaccatgctggccaaggggttcattcttggtagggatgcgctcgacaaagcaaaagctttagacgagaagcatcagctcacatcaactgcgactgctcgagtatcttcctttgacaagagaatcggtctgagtgagaagatcagcgttggtacttcagttgtaaatgataaagtaaaggaaatggatcagaaatatctagtttccgagaagactaggtcagcacttgcagctgctgaacagggcgtctctactgctggatctgccatcatgaagaacaggtatgtccttactggagcagcatgggtaactggtgccttcagtaaggttgcaaataccgcgaatgatgtcggggcaaaggcgaaggagaaaatagcggctgagcaggagggcaagaccgtagcggccgggcatgcacaagctgacatgtcggacgctcgtgaaaagcccagggatttggatggtgaagtcacaaagatacatgtctctgaaaaccctgaagatatccccatatctaccgctgcagttttccccattacagtagatgattccagcgatgcgtctccaccaccgcctgctactgctcttcccaagaaaccggaacctgcgcagggattgatactatgatgatctggctgatacatgaatgtaaatagacatatgaggtgggttgtttaattcaggctgtagcgttgtggctgctgtattgtgattcacctgtttgaaggttgaaatttatcaggaccgaaagagtttgggatttgtagcagccattttaattgatcaaacaatattatcatgct

SEQ ID NO: 14678 - protein, 356 aa, Triticum aestivum
  peptide (1)..(356): Ceres Seq. ID no. 13597135
  misc_feature (48)..(115): Pfam Name: a.k.a. RRM, RBD, or RNP domain Pfam Description: RNA recognition motif.
  misc_feature (40)..(356): NCBI GI NO: 38347069 NR Description: OSJNBa0006A01.10
  misc_feature (96)..(324): NCBI GI NO: 18542166 NR Description: putative aldose reductase-related protein
  misc_feature (45)..(315): NCBI GI NO: 38344181 NR Description: OSJNBa0053K19.20
  misc_feature (44)..(352): NCBI GI NO: 18414951 NR Description: RNA recognition motif (RRM)-containing protein
  misc_feature (45)..(352): NCBI GI NO: 7485085 NR Description: hypothetical protein - Arabidopsis thaliana
  misc_feature (44)..(302): NCBI GI NO: 30695063 NR Description: RNA recognition motif (RRM)-containing protein
  misc_feature (47)..(302): NCBI GI NO: 8809670 NR Description: gene_id:MSD23
  misc_feature (40)..(287): NCBI GI NO: 34897896 NR Description: ESTs D15336
  misc_feature (47)..(282): NCBI GI NO: 18071362 NR Description: putative splicing regulatory protein
  misc_feature (43)..(277): NCBI GI NO: 15237419 NR Description: RNA recognition motif (RRM)-containing protein
RDHYLERPNRKPFLAYIFLPVSRFKSAVRVRRSRRRIAAMATSTLSTVMVSNLSLKAALRDVKEFFSFSGDLVHVEMQSGDELSQVAYIAFKDKQGAETAMLLTGATIVDMAVIVTPATDYELPADVLAALEPKDAKSSALEKAEDIVGTMLAKGFILGRDALDKAKALDEKHQLTSTATARVSSFDKRIGLSEKISVGTSVVNDKVKEMDQKYLVSEKTRSALAAAEQGVSTAGSAIMKNRYVLTGAAWVTGAFSKVANTANDVGAKAKEKIAAEQEGKTVAAGHAQADMSDAREKPRDLDGEVTKIHVSENPEDIPISTAAVFPITVDDSSDASPPPPATALPKKPEPAQGLIL

SEQ ID NO: 14679 - protein, 317 aa, Triticum aestivum
  peptide (1)..(317): Ceres Seq. ID no. 13597136
  misc_feature (9)..(76): Pfam Name: a.k.a. RRM, RBD, or RNP domain Pfam Description: RNA recognition motif.
  misc_feature (1)..(317): NCBI GI NO: 38347069 NR Description: OSJNBa0006A01.10
  misc_feature (57)..(285): NCBI GI NO: 18542166 NR Description: putative aldose reductase-related protein
  misc_feature (6)..(276): NCBI GI NO: 38344181 NR Description: OSJNBa0053K19.20
  misc_feature (5)..(313): NCBI GI NO: 18414951 NR Description: RNA recognition motif (RRM)-containing protein
  misc_feature (6)..(313): NCBI GI NO: 7485085 NR Description: hypothetical protein - Arabidopsis thaliana
  misc_feature (5)..(263): NCBI GI NO: 30695063 NR Description: RNA recognition motif (RRM)-containing protein
  misc_feature (8)..(263): NCBI GI NO: 8809670 NR Description: gene_id:MSD23
  misc_feature (1)..(248): NCBI GI NO: 34897896 NR Description: ESTs D15336
  misc_feature (8)..(243): NCBI GI NO: 18071362 NR Description: putative splicing regulatory protein
  misc_feature (4)..(238): NCBI GI NO: 15237419 NR Description: RNA recognition motif (RRM)-containing protein
MATSTLSTVMVSNLSLKAALRDVKEFFSFSGDLVHVEMQSGDELSQVAYIAFKDKQGAETAMLLTGATIVDMAVIVTPATDYELPADVLAALEPKDAKSSALEKAEDIVGTMLAKGFILGRDALDKAKALDEKHQLTSTATARVSSFDKRIGLSEKISVGTSVVNDKVKEMDQKYLVSEKTRSALAAAEQGVSTAGSAIMKNRYVLTGAAWVTGAFSKVANTANDVGAKAKEKIAAEQEGKTVAAGHAQADMSDAREKPRDLDGEVTKIHVSENPEDIPISTAAVFPITVDDSSDASPPPPATALPKKPEPAQGLIL

SEQ ID NO: 14680 - protein, 308 aa, Triticum aestivum
  peptide (1)..(308): Ceres Seq. ID no. 13597137
  misc_feature (1)..(67): Pfam Name: a.k.a. RRM, RBD, or RNP domain Pfam Description: RNA recognition motif.
  misc_feature (1)..(308): NCBI GI NO: 38347069 NR Description: OSJNBa0006A01.10
  misc_feature (48)..(276): NCBI GI NO: 18542166 NR Description: putative aldose reductase-related protein
  misc_feature (1)..(267): NCBI GI NO: 38344181 NR Description: OSJNBa0053K19.20
  misc_feature (1)..(304): NCBI GI NO: 18414951 NR Description: RNA recognition motif (RRM)-containing protein
  misc_feature (1)..(304): NCBI GI NO: 7485085 NR Description: hypothetical protein - Arabidopsis thaliana
  misc_feature (1)..(254): NCBI GI NO: 30695063 NR Description: RNA recognition motif (RRM)-containing protein
  misc_feature (1)..(254): NCBI GI NO: 8809670 NR Description: gene_id:MSD23
  misc_feature (1)..(239): NCBI GI NO: 34897896 NR Description: ESTs D15336
  misc_feature (1)..(234): NCBI GI NO: 18071362 NR Description: putative splicing regulatory protein
  misc_feature (1)..(229): NCBI GI NO: 15237419 NR Description: RNA recognition motif (RRM)-containing protein
MVSNLSLKAALRDVKEFFSFSGDLVHVEMQSGDELSQVAYIAFKDKQGAETAMLLTGATIVDMAVIVTPATDYELPADVLAALEPKDAKSSALEKAEDIVGTMLAKGFILGRDALDKAKALDEKHQLTSTATARVSSFDKRIGLSEKISVGTSVVNDKVKEMDQKYLVSEKTRSALAAAEQGVSTAGSAIMKNRYVLTGAAWVTGAFSKVANTANDVGAKAKEKIAAEQEGKTVAAGHAQADMSDAREKPRDLDGEVTKIHVSENPEDIPISTAAVFPITVDDSSDASPPPPATALPKKPEPAQGLIL

SEQ ID NO: 14681 - DNA, 1766 bp, Triticum aestivum
  misc_feature (1)..(1766): Ceres Seq. ID no. 12626166
caactggtcgagccgagaacacctcgtccctgtcgtcgcctccctccctccccgtccgccgttcgttggctcgtctctcttcttacccacctcgctccctccctccctccctcccggaaatcgcaagattttcaccggcttcccgttgacgtttccgccactgcggcagcacaattcgaaaccctcccgcacactcccctggccctcccccttccgtgcctaggcggcaacgctccttctcgcctcccctcccatctcctttataaccgagcgggcggcccctcccgcgtgaggcaccgaggacgggggcagaaccgcagcgcagccgagccgagaccagaccagacgaaccgcgccgagccctaccctcctccaccaccgggtctccctgcgagggcggaggagcgacatggagccggccgagaagaagccgccggcggtgtccgacctcggcgcctgggggatgaacgtcgtcagctccgtcggcctcatcatggccaacaagcagctcatgtcctccgccggctacgccttctccttcgccaccacgttgaccgggttccacttcaccgtcacggcgctcgtcggatggatttccaaggccaccggctactccgcctccaagcacgtccccctctgggagctcgtctggttctcgctcgtcgccaacgcctccatcaccgggatgaacctcagcctcatgctcaactctgtcgggttctatcagatctccaaattgagcatgattccggtggtttgcttgatggaatgggtactcaacagcaagcactacacaaccaaggttatatcagcagtggttgtcgtcgcagcgggcgtcgggatttgcaccgtcaccgatgtggaggtcaatgctaagggcttcatttgtgcttgcgtggctgtgttctgcacgtcgctgcaacagattacaattggctcctttcagaagaagtacaacattgggtcatttgagctgctgagcaaaactgcaccaatacaggcagtgtcacttattatactgggtccctttgtggattactacctaaatgggcgttggctattgaactacagtttttcaacaggggcaactttcttcatactgctttcatgctccttggctgtcttctgcaacatgagccagtatctctgcatcgggcggttctctgcaacctctttccaggtcctgggccacatgaaaacggtgtgcgtgctgatcctcggctgggttctgttcgactcggctctcaccatcaagaacatactcgggatgctgctcgccatcatgggcatggtggtctatagctgggccatggagtctgagaagaaggccacctcggcgatcccgcggaacaagagcgacatgctggacggggaggacgtgcccctcaagtcgagaacgagcggcattccgctgtcctctgatgacctcgaggaaggcccgatgaagagctagcctgtcgctgttattcattcattcttcttggttcttttgtatgtgtttgatccacaatgtccgccagtccagtcctcgaagctatcgacagtcttgttaattttgcctcttgcttgctgggtggagttccatcataggtgatgacgaccccggccggccggcctcggcgtagatgaccaccacttaggaaatttgtcaaggccgatatgggccgagccatggtgattcgtgatggctgttgttatagacgacagcaaattatacttatataatggaatacaggtgttcccccgttgtaaaaaaacgacaagag

SEQ ID NO: 14682 - protein, 347 aa, Triticum aestivum
  peptide (1)..(347): Ceres Seq. ID no. 12626167
  misc_feature (40)..(347): NCBI GI NO: 33146838 NR Description: transporter-related-like
  misc_feature (1)..(46): NCBI GI NO: 33146838 NR Description: transporter-related-like
  misc_feature (1)..(347): NCBI GI NO: 18394949 NR Description: expressed protein; protein id: At1g21070
  misc_feature (1)..(347): NCBI GI NO: 21536703 NR Description: unknown [Arabidopsis thaliana]
  misc_feature (2)..(346): NCBI GI NO: 15238957 NR Description: putative protein; protein id: At5g42420.1
  misc_feature (2)..(346): NCBI GI NO: 18411172 NR Description: expressed protein; protein id: At1g76670
  misc_feature (35)..(347): NCBI GI NO: 26450366 NR Description: unknown protein [Arabidopsis thaliana]
  misc_feature (1)..(316): NCBI GI NO: 30313364 NR Description: putative transmembrane protein [Oryza sativa]
  misc_feature (1)..(319): NCBI GI NO: 15234794 NR Description: hypothetical protein; protein id: At4g09810.1
  misc_feature (10)..(319): NCBI GI NO: 18420440 NR Description: putative protein; protein id: At4g39390
MEPAEKKPPAVSDLGAWGMNVVSSVGLIMANKQLMSSAGYAFSFATTLTGFHFTVTALVGWISKATGYSASKHVPLWELVWFSLVANASITGMNLSLMLNSVGFYQISKLSMIPVVCLMEWVLNSKHYTTKVISAVVVVAAGVGICTVTDVEVNAKGFICACVAVFCTSLQQITIGSFQKKYNIGSFELLSKTAPIQAVSLIILGPFVDYYLNGRWLLNYSFSTGATFFILLSCSLAVFCNMSQYLCIGRFSATSFQVLGHMKTVCVLILGWVLFDSALTIKNILGMLLAIMGMVVYSWAMESEKKATSAIPRNKSDMLDGEDVPLKSRTSGIPLSSDDLEEGPMKS

SEQ ID NO: 14683 - protein, 329 aa, Triticum aestivum
  peptide (1)..(329): Ceres Seq. ID no. 12626168
  misc_feature (22)..(329): NCBI GI NO: 33146838 NR Description: transporter-related-like
  misc_feature (1)..(28): NCBI GI NO: 33146838 NR Description: transporter-related-like
  misc_feature (1)..(329): NCBI GI NO: 18394949 NR Description: expressed protein; protein id: At1g21070
  misc_feature (1)..(329): NCBI GI NO: 21536703 NR Description: unknown [Arabidopsis thaliana]
  misc_feature (1)..(328): NCBI GI NO: 15238957 NR Description: putative protein; protein id: At5g42420.1
  misc_feature (1)..(328): NCBI GI NO: 18411172 NR Description: expressed protein; protein id: At1g76670
  misc_feature (17)..(329): NCBI GI NO: 26450366 NR Description: unknown protein [Arabidopsis thaliana]
  misc_feature (1)..(298): NCBI GI NO: 30313364 NR Description: putative transmembrane protein [Oryza sativa]
  misc_feature (1)..(301): NCBI GI NO: 15234794 NR Description: hypothetical protein; protein id: At4g09810.1
  misc_feature (1)..(301): NCBI GI NO: 18420440 NR Description: putative protein; protein id: At4g39390
MNVVSSVGLIMANKQLMSSAGYAFSFATTLTGFHFTVTALVGWISKATGYSASKHVPLWELVWFSLVANASITGMNLSLMLNSVGFYQISKLSMIPVVCLMEWVLNSKHYTTKVISAVVVVAAGVGICTVTDVEVNAKGFICACVAVFCTSLQQITIGSFQKKYNIGSFELLSKTAPIQAVSLIILGPFVDYYLNGRWLLNYSFSTGATFFILLSCSLAVFCNMSQYLCIGRFSATSFQVLGHMKTVCVLILGWVLFDSALTIKNILGMLLAIMGMVVYSWAMESEKKATSAIPRNKSDMLDGEDVPLKSRTSGIPLSSDDLEEGPMKS

SEQ ID NO: 14684 - protein, 319 aa, Triticum aestivum
  peptide (1)..(319): Ceres Seq. ID no. 12626169
  misc_feature (12)..(319): NCBI GI NO: 33146838 NR Description: transporter-related-like
  misc_feature (1)..(18): NCBI GI NO: 33146838 NR Description: transporter-related-like
  misc_feature (1)..(319): NCBI GI NO: 18394949 NR Description: expressed protein; protein id: At1g21070
  misc_feature (1)..(319): NCBI GI NO: 21536703 NR Description: unknown [Arabidopsis thaliana]
  misc_feature (1)..(318): NCBI GI NO: 15238957 NR Description: putative protein; protein id: At5g42420.1
  misc_feature (1)..(318): NCBI GI NO: 18411172 NR Description: expressed protein; protein id: At1g76670
  misc_feature (7)..(319): NCBI GI NO: 26450366 NR Description: unknown protein [Arabidopsis thaliana]
  misc_feature (1)..(288): NCBI GI NO: 30313364 NR Description: putative transmembrane protein [Oryza sativa]
  misc_feature (1)..(291): NCBI GI NO: 15234794 NR Description: hypothetical protein; protein id: At4g09810.1
  misc_feature (1)..(291): NCBI GI NO: 18420440 NR Description: putative protein; protein id: At4g39390
MANKQLMSSAGYAFSFATTLTGFHFTVTALVGWISKATGYSASKHVPLWELVWFSLVANASITGMNLSLMLNSVGFYQISKLSMIPVVCLMEWVLNSKHYTTKVISAVVVVAAGVGICTVTDVEVNAKGFICACVAVFCTSLQQITIGSFQKKYNIGSFELLSKTAPIQAVSLIILGPFVDYYLNGRWLLNYSFSTGATFFILLSCSLAVFCNMSQYLCIGRFSATSFQVLGHMKTVCVLILGWVLFDSALTIKNILGMLLAIMGMVVYSWAMESEKKATSAIPRNKSDMLDGEDVPLKSRTSGIPLSSDDLEEGPMKS

SEQ ID NO: 14685 - DNA, 1512 bp, Triticum aestivum
  misc_feature (1)..(1512): Ceres Seq. ID no. 13597710
cagtccccgtcccagtcccaatcctaatcccgcccccaccagcggagcggcgtagccgccgcctcggccgccctcggcgcccgcgcctgagagccggcgacgatggcgaaccgcacggaccccctggcccggagcatccacggcaccaaccctcagaacctggtggagaagatcgtgcgggccaagatctaccagagcaactactggaaggagcagtgcttcggcctcacggcggagaccctggtcgacaaggccatggagctcgaccacaccggcggcacccacggcggcaaccgcaggccgacccccttcctctgcctcgccctcaagatgctccagatccagcccgacaaggaaatcgtcgtcgagttcatcaagaacgaggactacaagtatgtccgggttcttggggccttctacctgcgcctcactggcaccgtcgccgacgtttaccagtacctcgagccgctttacaacgactaccgcaagattaggcaaaagctcagcgatggaaaattcacgctgacacacgttgacgaattcattgacgagctcctgaccaaggactatagctgcgacactgccctcccccgcattcagaaaagatggatccttgaagcttctggaactctagaacctagaagaagtgcacttgaagacgattttgatgaagaggaggaagataaggaggatggacagcctatggacgtagacgagcctaacactcgtgaaaaggaccatcttcgtggaaggagccccaccaaagaacgggatagggaaagggagagggacagagacaggaaacacgaaaggcatcacagggaccgagatcatgacagagatcgggatcatgacagggactatggaagaggccgggaaagagatcgagacagagatagaggccgtgaaagagatagagagagggatagggaacgagaccgtcaccggacccgagatgacgattacaaccgagatcgagaccgggatggcagggaaagggaacgccgggacagagaccgtggcaggcacaggagttgctcaaggagcaggagccgggatcggcgtgaaagagaccgtgaagtgggagagctccgtaagaggcgtggccgtggtagtgccagtcctcctcgagggcgtgccgaggatggtccgagggaggagcctaataagaagagaaaggaaaagaaagagaagaagggcagcgggaacggtccagatcctaatgatccagagattatagagatgaacaagctgcgtgcatcgatagggttgggaccactgaagtagtggcacattgctgtaatgtattttgaagctccaagcttaaaaccaacaaaggattagctagcatttttcttttaacactgcaagcttgtcaaaataccctgtaatgtaactttggcggtttggcctgcttttctggctctaccttccgcggtcttttttgcatttttcttgagacacagtgaaggctgatgaaggaaagcatttgatttcaactgtattgtgttg

SEQ ID NO: 14686 - protein, 394 aa, Triticum aestivum
  peptide (1)..(394): Ceres Seq. ID no. 13597711
  misc_feature (1)..(177): Pfam Name: Pfam Description:  PRP38 family
  misc_feature (1)..(358): NCBI GI NO: 18405463 NR Description: expressed protein [Arabidopsis thaliana]
  misc_feature (1)..(358): NCBI GI NO: 25408716 NR Description: hypothetical protein At2g40650
  misc_feature (1)..(334): NCBI GI NO: 22024089 NR Description: CG30342-PA [Drosophila melanogaster]
  misc_feature (1)..(305): NCBI GI NO: 24762236 NR Description: hypothetical protein FLJ14936 [Homo sapiens]
  misc_feature (1)..(305): NCBI GI NO: 27370014 NR Description: RIKEN cDNA 2410002M20 [Mus musculus]
  misc_feature (1)..(308): NCBI GI NO: 39593428 NR Description: Hypothetical protein CBG09713
  misc_feature (1)..(308): NCBI GI NO: 17559118 NR Description: PRP38 family (38.2 kD) [Caenorhabditis elegans]
  misc_feature (10)..(375): NCBI GI NO: 28829361 NR Description: similar to Arabidopsis thaliana (Mouse-ear cress)
  misc_feature (1)..(394): NCBI GI NO: 23508527 NR Description: hypothetical protein, conserved
  misc_feature (1)..(326): NCBI GI NO: 23481949 NR Description: hypothetical protein [Plasmodium yoelii yoelii]
MANRTDPLARSIHGTNPQNLVEKIVRAKIYQSNYWKEQCFGLTAETLVDKAMELDHTGGTHGGNRRPTPFLCLALKMLQIQPDKEIVVEFIKNEDYKYVRVLGAFYLRLTGTVADVYQYLEPLYNDYRKIRQKLSDGKFTLTHVDEFIDELLTKDYSCDTALPRIQKRWILEASGTLEPRRSALEDDFDEEEEDKEDGQPMDVDEPNTREKDHLRGRSPTKERDRERERDRDRKHERHHRDRDHDRDRDHDRDYGRGRERDRDRDRGRERDRERDRERDRHRTRDDDYNRDRDRDGRERERRDRDRGRHRSCSRSRSRDRRERDREVGELRKRRGRGSASPPRGRAEDGPREEPNKKRKEKKEKKGSGNGPDPNDPEIIEMNKLRASIGLGPLK

SEQ ID NO: 14687 - protein, 343 aa, Triticum aestivum
  peptide (1)..(343): Ceres Seq. ID no. 13597712
  misc_feature (1)..(126): Pfam Name: Pfam Description:  PRP38 family
  misc_feature (1)..(307): NCBI GI NO: 18405463 NR Description: expressed protein [Arabidopsis thaliana]
  misc_feature (1)..(307): NCBI GI NO: 25408716 NR Description: hypothetical protein At2g40650
  misc_feature (1)..(283): NCBI GI NO: 22024089 NR Description: CG30342-PA [Drosophila melanogaster]
  misc_feature (1)..(254): NCBI GI NO: 24762236 NR Description: hypothetical protein FLJ14936 [Homo sapiens]
  misc_feature (1)..(254): NCBI GI NO: 27370014 NR Description: RIKEN cDNA 2410002M20 [Mus musculus]
  misc_feature (1)..(257): NCBI GI NO: 39593428 NR Description: Hypothetical protein CBG09713
  misc_feature (1)..(257): NCBI GI NO: 17559118 NR Description: PRP38 family (38.2 kD) [Caenorhabditis elegans]
  misc_feature (1)..(324): NCBI GI NO: 28829361 NR Description: similar to Arabidopsis thaliana (Mouse-ear cress)
  misc_feature (1)..(343): NCBI GI NO: 23508527 NR Description: hypothetical protein, conserved
  misc_feature (1)..(275): NCBI GI NO: 23481949 NR Description: hypothetical protein [Plasmodium yoelii yoelii]
MELDHTGGTHGGNRRPTPFLCLALKMLQIQPDKEIVVEFIKNEDYKYVRVLGAFYLRLTGTVADVYQYLEPLYNDYRKIRQKLSDGKFTLTHVDEFIDELLTKDYSCDTALPRIQKRWILEASGTLEPRRSALEDDFDEEEEDKEDGQPMDVDEPNTREKDHLRGRSPTKERDRERERDRDRKHERHHRDRDHDRDRDHDRDYGRGRERDRDRDRGRERDRERDRERDRHRTRDDDYNRDRDRDGRERERRDRDRGRHRSCSRSRSRDRRERDREVGELRKRRGRGSASPPRGRAEDGPREEPNKKRKEKKEKKGSGNGPDPNDPEIIEMNKLRASIGLGPLK

SEQ ID NO: 14688 - protein, 318 aa, Triticum aestivum
  peptide (1)..(318): Ceres Seq. ID no. 13597713
  misc_feature (1)..(101): Pfam Name: Pfam Description:  PRP38 family
  misc_feature (1)..(282): NCBI GI NO: 18405463 NR Description: expressed protein [Arabidopsis thaliana]
  misc_feature (1)..(282): NCBI GI NO: 25408716 NR Description: hypothetical protein At2g40650
  misc_feature (1)..(258): NCBI GI NO: 22024089 NR Description: CG30342-PA [Drosophila melanogaster]
  misc_feature (1)..(229): NCBI GI NO: 24762236 NR Description: hypothetical protein FLJ14936 [Homo sapiens]
  misc_feature (1)..(229): NCBI GI NO: 27370014 NR Description: RIKEN cDNA 2410002M20 [Mus musculus]
  misc_feature (1)..(232): NCBI GI NO: 39593428 NR Description: Hypothetical protein CBG09713
  misc_feature (1)..(232): NCBI GI NO: 17559118 NR Description: PRP38 family (38.2 kD) [Caenorhabditis elegans]
  misc_feature (1)..(299): NCBI GI NO: 28829361 NR Description: similar to Arabidopsis thaliana (Mouse-ear cress)
  misc_feature (1)..(318): NCBI GI NO: 23508527 NR Description: hypothetical protein, conserved
  misc_feature (1)..(250): NCBI GI NO: 23481949 NR Description: hypothetical protein [Plasmodium yoelii yoelii]
MLQIQPDKEIVVEFIKNEDYKYVRVLGAFYLRLTGTVADVYQYLEPLYNDYRKIRQKLSDGKFTLTHVDEFIDELLTKDYSCDTALPRIQKRWILEASGTLEPRRSALEDDFDEEEEDKEDGQPMDVDEPNTREKDHLRGRSPTKERDRERERDRDRKHERHHRDRDHDRDRDHDRDYGRGRERDRDRDRGRERDRERDRERDRHRTRDDDYNRDRDRDGRERERRDRDRGRHRSCSRSRSRDRRERDREVGELRKRRGRGSASPPRGRAEDGPREEPNKKRKEKKEKKGSGNGPDPNDPEIIEMNKLRASIGLGPLK

SEQ ID NO: 14689 - DNA, 1396 bp, Triticum aestivum
  misc_feature (1)..(1396): Ceres Seq. ID no. 14313471
atctagaagagcctgccagtctttgattcggctcaacaatggagatggtcctcgccgcagcagcaaactgtaccggtgccttgtcgtccaaccaccccaaaacgttcctcaaatcgcgtcgatcctcgctccaaatgcgggcctgcagatcgggccccgacgcgccgctcgccgtgtcgtccgccgccgcgccggaggagccgcgcccggtgcgcctgggcatcatgggctgcggctccatcgcgcgcaaggtcgcgcgctcaatgctgctcgtccccgccgccgacgtggccgccgtcgccagccgctccgagggcaaggcgcgcctcttcgccgccgacaacggccttcggagcggcacgcgcatccacggctcctacgaggcgctcctcgacgacccggacgtcgacgccgtctacatgccgctccccaccagcctccacgtcaagtgggcgaccgccgccgccgagcggggcaagcacctgctcctcgagaagcccaccgcgccctgcgccgccgacctcgagcccatcctcgccgcctgcgaggccaacggcgtccagttcatggactccaccatgtggatgcaccacccccgcactgccaagatgcgtcagctcgtcgccgatcaggacacaatcggagacgtcagatttataaacaccatggtcagctttctagcaaacgaagatttcctccagaatgacatccgggtaaagccagaccttgatggcctgggtgtgcttggtgacatcgggtggtactgcatccgtggaatcctgtgggctgttgactatgagctgcccaagaatgtggttgctctccatcaccctgtcaagaaccaagccggcgtgctccttgcttgcggcgcatcgctctactgggccgacggcaaggtcgccaccttccactgttctttccttaccaacctgaccatggacctcaccgtcgtcggcaccaacggtactattcatgtcaccgacttggtcatcccgtacgaagagaagtctgctccgttcagcgtcgcctccaagacgaacttcgccgaactctctaccggatgggatccacatccgagcaagcatgttgtcaccacggacctaccccaggaggggctcatggtccaggagttctgtaggctggtgcagggcatcagagatgccggtgtcaagcctgaggggaagtggccgggcatcacccgaaagacacagattgtcgtggatgcagtgaaggcttctattgacaatggatttgagtccgtcgatgttgccagctaaatacaacacataactggtgttcccacgttgtatcttcaccatgataaatctatttactgaaataatttgaacgattcttgtcatattgaggacaatattgcaatgatcaagtaagagct

SEQ ID NO: 14690 - protein, 412 aa, Triticum aestivum
  peptide (1)..(412): Ceres Seq. ID no. 14313472
  misc_feature (192)..(305): Pfam Name: Pfam Description:  Oxidoreductase family
  misc_feature (50)..(365): NCBI GI NO: 37534168 NR Description: putative oxidoreductase
  misc_feature (58)..(411): NCBI GI NO: 15233990 NR Description: AX110P -related protein [Arabidopsis thaliana]
  misc_feature (78)..(411): NCBI GI NO: 21954073 NR Description: putative AX110P protein [Arabidopsis thaliana]
  misc_feature (57)..(406): NCBI GI NO: 7488933 NR Description: protein AX110P - carrot
  misc_feature (58)..(408): NCBI GI NO: 18399170 NR Description: expressed protein [Arabidopsis thaliana]
  misc_feature (58)..(408): NCBI GI NO: 25518452 NR Description: hypothetical protein F23M19.12
  misc_feature (54)..(408): NCBI GI NO: 15218937 NR Description: oxidoreductase -related [Arabidopsis thaliana]
  misc_feature (53)..(404): NCBI GI NO: 17549134 NR Description: CONSERVED HYPOTHETICAL PROTEIN
  misc_feature (59)..(400): NCBI GI NO: 32474689 NR Description: putative oxidoreductase [Pirellula sp.]
  misc_feature (58)..(330): NCBI GI NO: 22971184 NR Description: hypothetical protein [Chloroflexus aurantiacus]
MEMVLAAAANCTGALSSNHPKTFLKSRRSSLQMRACRSGPDAPLAVSSAAAPEEPRPVRLGIMGCGSIARKVARSMLLVPAADVAAVASRSEGKARLFAADNGLRSGTRIHGSYEALLDDPDVDAVYMPLPTSLHVKWATAAAERGKHLLLEKPTAPCAADLEPILAACEANGVQFMDSTMWMHHPRTAKMRQLVADQDTIGDVRFINTMVSFLANEDFLQNDIRVKPDLDGLGVLGDIGWYCIRGILWAVDYELPKNVVALHHPVKNQAGVLLACGASLYWADGKVATFHCSFLTNLTMDLTVVGTNGTIHVTDLVIPYEEKSAPFSVASKTNFAELSTGWDPHPSKHVVTTDLPQEGLMVQEFCRLVQGIRDAGVKPEGKWPGITRKTQIVVDAVKASIDNGFESVDVAS

SEQ ID NO: 14691 - protein, 410 aa, Triticum aestivum
  peptide (1)..(410): Ceres Seq. ID no. 14313473
  misc_feature (190)..(303): Pfam Name: Pfam Description:  Oxidoreductase family
  misc_feature (48)..(363): NCBI GI NO: 37534168 NR Description: putative oxidoreductase
  misc_feature (56)..(409): NCBI GI NO: 15233990 NR Description: AX110P -related protein [Arabidopsis thaliana]
  misc_feature (76)..(409): NCBI GI NO: 21954073 NR Description: putative AX110P protein [Arabidopsis thaliana]
  misc_feature (55)..(404): NCBI GI NO: 7488933 NR Description: protein AX110P - carrot
  misc_feature (56)..(406): NCBI GI NO: 18399170 NR Description: expressed protein [Arabidopsis thaliana]
  misc_feature (56)..(406): NCBI GI NO: 25518452 NR Description: hypothetical protein F23M19.12
  misc_feature (52)..(406): NCBI GI NO: 15218937 NR Description: oxidoreductase -related [Arabidopsis thaliana]
  misc_feature (51)..(402): NCBI GI NO: 17549134 NR Description: CONSERVED HYPOTHETICAL PROTEIN
  misc_feature (57)..(398): NCBI GI NO: 32474689 NR Description: putative oxidoreductase [Pirellula sp.]
  misc_feature (56)..(328): NCBI GI NO: 22971184 NR Description: hypothetical protein [Chloroflexus aurantiacus]
MVLAAAANCTGALSSNHPKTFLKSRRSSLQMRACRSGPDAPLAVSSAAAPEEPRPVRLGIMGCGSIARKVARSMLLVPAADVAAVASRSEGKARLFAADNGLRSGTRIHGSYEALLDDPDVDAVYMPLPTSLHVKWATAAAERGKHLLLEKPTAPCAADLEPILAACEANGVQFMDSTMWMHHPRTAKMRQLVADQDTIGDVRFINTMVSFLANEDFLQNDIRVKPDLDGLGVLGDIGWYCIRGILWAVDYELPKNVVALHHPVKNQAGVLLACGASLYWADGKVATFHCSFLTNLTMDLTVVGTNGTIHVTDLVIPYEEKSAPFSVASKTNFAELSTGWDPHPSKHVVTTDLPQEGLMVQEFCRLVQGIRDAGVKPEGKWPGITRKTQIVVDAVKASIDNGFESVDVAS

SEQ ID NO: 14692 - protein, 380 aa, Triticum aestivum
  peptide (1)..(380): Ceres Seq. ID no. 14313474
  misc_feature (160)..(273): Pfam Name: Pfam Description:  Oxidoreductase family
  misc_feature (18)..(333): NCBI GI NO: 37534168 NR Description: putative oxidoreductase
  misc_feature (26)..(379): NCBI GI NO: 15233990 NR Description: AX110P -related protein [Arabidopsis thaliana]
  misc_feature (46)..(379): NCBI GI NO: 21954073 NR Description: putative AX110P protein [Arabidopsis thaliana]
  misc_feature (25)..(374): NCBI GI NO: 7488933 NR Description: protein AX110P - carrot
  misc_feature (26)..(376): NCBI GI NO: 18399170 NR Description: expressed protein [Arabidopsis thaliana]
  misc_feature (26)..(376): NCBI GI NO: 25518452 NR Description: hypothetical protein F23M19.12
  misc_feature (22)..(376): NCBI GI NO: 15218937 NR Description: oxidoreductase -related [Arabidopsis thaliana]
  misc_feature (21)..(372): NCBI GI NO: 17549134 NR Description: CONSERVED HYPOTHETICAL PROTEIN
  misc_feature (27)..(368): NCBI GI NO: 32474689 NR Description: putative oxidoreductase [Pirellula sp.]
  misc_feature (26)..(298): NCBI GI NO: 22971184 NR Description: hypothetical protein [Chloroflexus aurantiacus]
MRACRSGPDAPLAVSSAAAPEEPRPVRLGIMGCGSIARKVARSMLLVPAADVAAVASRSEGKARLFAADNGLRSGTRIHGSYEALLDDPDVDAVYMPLPTSLHVKWATAAAERGKHLLLEKPTAPCAADLEPILAACEANGVQFMDSTMWMHHPRTAKMRQLVADQDTIGDVRFINTMVSFLANEDFLQNDIRVKPDLDGLGVLGDIGWYCIRGILWAVDYELPKNVVALHHPVKNQAGVLLACGASLYWADGKVATFHCSFLTNLTMDLTVVGTNGTIHVTDLVIPYEEKSAPFSVASKTNFAELSTGWDPHPSKHVVTTDLPQEGLMVQEFCRLVQGIRDAGVKPEGKWPGITRKTQIVVDAVKASIDNGFESVDVAS

SEQ ID NO: 14693 - DNA, 1720 bp, Triticum aestivum
  misc_feature (1)..(1720): Ceres Seq. ID no. 15169627
cgaaaacatctcagccccccgcatccattccaccagcgaacagagagcagaagagcaccacacgctcgccatggacacgtggcacatcttcctcggctcgatcctcctcgccatcccgctgatcctactcctccgcggccgcaagggcggccggctccgcgtcccgcccggcccgccgtccttgccggtgctgggcagcgtcgtgtggctgaccaactcgctcgccgacgttgagcccctgctccggcgcctcttcaagcgctacggccccatcgtgtccctgcgcgtggggtcccgcctctccatcttcgtcgccgaccgccgcctggcccacgcggcgctcgttgagcgcggcgccacgctcgcggaccgccccgcgctcccttcgctcaagctgctgggcgagaacaacaacaccatcacgcgcgccagctacgggcctgtctggcgcctcctccgccgcaacctcgtctccgagacgctgcacccgtcccgcgtccgcctcttcgcgcccgcgcgctcctgggtgcgccgcgtgctggccgagaagctgcgtgatgagtcgtcgtccggcggcgcggccgtcgtggagacgttccagtacgccatgttctgcctcctcgtgctcatgtgcttcggtgagcggctcgacgaggccacggtccgcgcgatcgccgccgcccagcgcgaacttctcatctacaggtcgaggaagatggccatcttctccttcctgccgtcggtgaccaagcatctctaccgcgaccgcctccagaccgtgcacgccatgcagcggaggaagaaggacctgttcgtgccgctgatcaacgctcggcgggagtacagaaaactcggcggcgagcccaagaaagagagcgcgttcgagcactcctacgtcgacgccctgctcgacataaagctccccgaggagggaaaccgcccgctcaccgacgacgagatgatcaacctctgttccgagttcctcgacgccgggaccgacaccacctccaccgggctgcagtggatcatggccgagctggtgaagaacccggccatccaggagaagctctacaaagagatcagcgccacgaagggggacgaccaggacgaggtctcggaggaggacgtccacaagatgccgtacctcaaggcggtggtcctcgagggcctccggaagcacccaccggcgcacttcgtgctgccgcacaaggcggcggcggacatggagatcggcggatacctgattcccaagggggcgacgatgaacttcatggtggccgagatgagcagggacgagcgggagtgggagaagccaacggagttcgtgccagagcggttcctgccaggcggcgcgggcgaagcggtggacgtgaccggcaaccgggagatcaagatgatgccgttcggcgtgggccggaggatctgcgccgggctgggcatcgccatgctccacctggagtacttcgtggccaacatggtgagggagttcgagtggcaggaggtcgccggcgaggaggtggacttcgccgagaagaacgagttcaccgtcgtcatgaagaagccgctgcgcccacgcctcgtgccacgaagggcctgagacaaaatccatctccatcagcaagtagtcaaaatcgaccagtagtccactcctatcgcttcggtcgttcttgtttttagtttactccatgttgataatggttaattagttgctgtacgatag

SEQ ID NO: 14694 - protein, 531 aa, Triticum aestivum
  peptide (1)..(531): Ceres Seq. ID no. 15169628
  misc_feature (55)..(528): Pfam Name: Pfam Description:  Cytochrome P450
  misc_feature (24)..(531): NCBI GI NO: 37536044 NR Description: putative cytochrome P450
  misc_feature (24)..(530): NCBI GI NO: 37536054 NR Description: putative cytochrome P450
  misc_feature (24)..(523): NCBI GI NO: 37536046 NR Description: putative cytochrome P450
  misc_feature (22)..(529): NCBI GI NO: 37536020 NR Description: putative cytochrome P450
  misc_feature (27)..(530): NCBI GI NO: 37536034 NR Description: putative cytochrome P450
  misc_feature (24)..(359): NCBI GI NO: 15240223 NR Description: cytochrome P450, putative [Arabidopsis thaliana]
  misc_feature (366)..(531): NCBI GI NO: 15240223 NR Description: cytochrome P450, putative [Arabidopsis thaliana]
  misc_feature (29)..(531): NCBI GI NO: 5915857 NR Description: Cytochrome P450 98A1
  misc_feature (21)..(531): NCBI GI NO: 14488353 NR Description: putative cytochrome P450
  misc_feature (35)..(531): NCBI GI NO: 27650337 NR Description: putative cytochrome P450
ENISAPRIHSTSEQRAEEHHTLAMDTWHIFLGSILLAIPLILLLRGRKGGRLRVPPGPPSLPVLGSVVWLTNSLADVEPLLRRLFKRYGPIVSLRVGSRLSIFVADRRLAHAALVERGATLADRPALPSLKLLGENNNTITRASYGPVWRLLRRNLVSETLHPSRVRLFAPARSWVRRVLAEKLRDESSSGGAAVVETFQYAMFCLLVLMCFGERLDEATVRAIAAAQRELLIYRSRKMAIFSFLPSVTKHLYRDRLQTVHAMQRRKKDLFVPLINARREYRKLGGEPKKESAFEHSYVDALLDIKLPEEGNRPLTDDEMINLCSEFLDAGTDTTSTGLQWIMAELVKNPAIQEKLYKEISATKGDDQDEVSEEDVHKMPYLKAVVLEGLRKHPPAHFVLPHKAAADMEIGGYLIPKGATMNFMVAEMSRDEREWEKPTEFVPERFLPGGAGEAVDVTGNREIKMMPFGVGRRICAGLGIAMLHLEYFVANMVREFEWQEVAGEEVDFAEKNEFTVVMKKPLRPRLVPRRA

SEQ ID NO: 14695 - protein, 508 aa, Triticum aestivum
  peptide (1)..(508): Ceres Seq. ID no. 15169629
  misc_feature (32)..(505): Pfam Name: Pfam Description:  Cytochrome P450
  misc_feature (1)..(508): NCBI GI NO: 37536044 NR Description: putative cytochrome P450
  misc_feature (1)..(507): NCBI GI NO: 37536054 NR Description: putative cytochrome P450
  misc_feature (1)..(500): NCBI GI NO: 37536046 NR Description: putative cytochrome P450
  misc_feature (1)..(506): NCBI GI NO: 37536020 NR Description: putative cytochrome P450
  misc_feature (4)..(507): NCBI GI NO: 37536034 NR Description: putative cytochrome P450
  misc_feature (1)..(336): NCBI GI NO: 15240223 NR Description: cytochrome P450, putative [Arabidopsis thaliana]
  misc_feature (343)..(508): NCBI GI NO: 15240223 NR Description: cytochrome P450, putative [Arabidopsis thaliana]
  misc_feature (6)..(508): NCBI GI NO: 5915857 NR Description: Cytochrome P450 98A1
  misc_feature (1)..(508): NCBI GI NO: 14488353 NR Description: putative cytochrome P450
  misc_feature (12)..(508): NCBI GI NO: 27650337 NR Description: putative cytochrome P450
MDTWHIFLGSILLAIPLILLLRGRKGGRLRVPPGPPSLPVLGSVVWLTNSLADVEPLLRRLFKRYGPIVSLRVGSRLSIFVADRRLAHAALVERGATLADRPALPSLKLLGENNNTITRASYGPVWRLLRRNLVSETLHPSRVRLFAPARSWVRRVLAEKLRDESSSGGAAVVETFQYAMFCLLVLMCFGERLDEATVRAIAAAQRELLIYRSRKMAIFSFLPSVTKHLYRDRLQTVHAMQRRKKDLFVPLINARREYRKLGGEPKKESAFEHSYVDALLDIKLPEEGNRPLTDDEMINLCSEFLDAGTDTTSTGLQWIMAELVKNPAIQEKLYKEISATKGDDQDEVSEEDVHKMPYLKAVVLEGLRKHPPAHFVLPHKAAADMEIGGYLIPKGATMNFMVAEMSRDEREWEKPTEFVPERFLPGGAGEAVDVTGNREIKMMPFGVGRRICAGLGIAMLHLEYFVANMVREFEWQEVAGEEVDFAEKNEFTVVMKKPLRPRLVPRRA

SEQ ID NO: 14696 - protein, 329 aa, Triticum aestivum
  peptide (1)..(329): Ceres Seq. ID no. 15169630
  misc_feature (1)..(326): Pfam Name: Pfam Description:  Cytochrome P450
  misc_feature (1)..(329): NCBI GI NO: 37536044 NR Description: putative cytochrome P450
  misc_feature (1)..(328): NCBI GI NO: 37536054 NR Description: putative cytochrome P450
  misc_feature (1)..(321): NCBI GI NO: 37536046 NR Description: putative cytochrome P450
  misc_feature (1)..(327): NCBI GI NO: 37536020 NR Description: putative cytochrome P450
  misc_feature (1)..(328): NCBI GI NO: 37536034 NR Description: putative cytochrome P450
  misc_feature (1)..(157): NCBI GI NO: 15240223 NR Description: cytochrome P450, putative [Arabidopsis thaliana]
  misc_feature (164)..(329): NCBI GI NO: 15240223 NR Description: cytochrome P450, putative [Arabidopsis thaliana]
  misc_feature (1)..(329): NCBI GI NO: 5915857 NR Description: Cytochrome P450 98A1
  misc_feature (1)..(329): NCBI GI NO: 14488353 NR Description: putative cytochrome P450
  misc_feature (1)..(329): NCBI GI NO: 27650337 NR Description: putative cytochrome P450
MFCLLVLMCFGERLDEATVRAIAAAQRELLIYRSRKMAIFSFLPSVTKHLYRDRLQTVHAMQRRKKDLFVPLINARREYRKLGGEPKKESAFEHSYVDALLDIKLPEEGNRPLTDDEMINLCSEFLDAGTDTTSTGLQWIMAELVKNPAIQEKLYKEISATKGDDQDEVSEEDVHKMPYLKAVVLEGLRKHPPAHFVLPHKAAADMEIGGYLIPKGATMNFMVAEMSRDEREWEKPTEFVPERFLPGGAGEAVDVTGNREIKMMPFGVGRRICAGLGIAMLHLEYFVANMVREFEWQEVAGEEVDFAEKNEFTVVMKKPLRPRLVPRRA

SEQ ID NO: 14697 - DNA, 675 bp, Triticum aestivum
  misc_feature (1)..(675): Ceres Seq. ID no. 12585873
aaaaaatttcacttttcccgtctccatctcactcagcggcggctgtgggcaacagaaccctagcgagtgaggcgggggcgcggtgcagcgccgcctcctccctccctcccaatctcctccctcgtctccctccctcccagtctcttttccgtccatggacagtggccgtgccgactaggtgagtggtggcagcgccatggagcgcggccgcacaacttcgatgtcggggaggagatgaggaggttcgtgatccctacggagtacctcgggcactgggcgttcgaggagctgctcagggaggccgaggaggagttcgggttccggcacgagggcgccctgcggattccctgtgacgtggaggtgttcgaaggcatcctgaggcttgtgggcgggaagaaggaggccgtgtcctactgctcttcttcggagcatgggatcttgtgcacatgatggtggtggccacttgttttctgtcgtccatttgttcccattcttggttcttggttcttctgagggggaataggaggaagggttcatcttctatgagctttacttgttccattattggttctcgattctttgaaggagaagaggaggaagagtccgtcgtctacaagagagcttcgatgagcttcacagttttacaagaggatgaaacgaaggagtcacatcttt

SEQ ID NO: 14698 - protein, 76 aa, Triticum aestivum
  peptide (1)..(76): Ceres Seq. ID no. 12585874
MMVVATCFLSSICSHSWFLVLLRGNRRKGSSSMSFTCSIIGSRFFEGEEEEESVVYKRASMSFTVLQEDETKESHL

SEQ ID NO: 14699 - protein, 75 aa, Triticum aestivum
  peptide (1)..(75): Ceres Seq. ID no. 12585875
MVVATCFLSSICSHSWFLVLLRGNRRKGSSSMSFTCSIIGSRFFEGEEEEESVVYKRASMSFTVLQEDETKESHL

SEQ ID NO: 14700 - protein, 71 aa, Triticum aestivum
  peptide (1)..(71): Ceres Seq. ID no. 12585876
  misc_feature (1)..(51): Pfam Name: Pfam Description:  Auxin responsive protein
  misc_feature (1)..(70): NCBI GI NO: 6906857 NR Description: unknown [Zea mays]
  misc_feature (1)..(62): NCBI GI NO: 38567890 NR Description: OSJNBa0060N03.10
  misc_feature (1)..(56): NCBI GI NO: 15224133 NR Description: auxin-induced protein-related
  misc_feature (1)..(65): NCBI GI NO: 15235917 NR Description: auxin induced protein-related
  misc_feature (1)..(51): NCBI GI NO: 15229222 NR Description: indole-3-acetic acid induced protein, related
  misc_feature (1)..(51): NCBI GI NO: 21553798 NR Description: unknown [Arabidopsis thaliana]
  misc_feature (1)..(49): NCBI GI NO: 30687983 NR Description: auxin-induced
  misc_feature (1)..(48): NCBI GI NO: 24943206 NR Description: auxin-regulated protein [Phaseolus vulgaris]
  misc_feature (1)..(47): NCBI GI NO: 416692 NR Description: AUXIN-INDUCED PROTEIN 6B
  misc_feature (1)..(66): NCBI GI NO: 15226425 NR Description: putative auxin-regulated protein
MRRFVIPTEYLGHWAFEELLREAEEEFGFRHEGALRIPCDVEVFEGILRLVGGKKEAVSYCSSSEHGILCT

SEQ ID NO: 14701 - DNA, 1319 bp, Triticum aestivum
  misc_feature (1)..(1319): Ceres Seq. ID no. 15176854
atttcctcctccaccccagtagtagagatcatggcgaggagcgcgcgctcgatggcgttctttgtgctcgtcgccgtggccgtccgagccatctccgccgtcaccgacgggctgttgcccaacggggacttcgcgcaggggccggacaggtcggagatgaacggcacggtggtgaccgcgcgccacgccataccgcgctgggagatctccgggttcgtggagtacatcgcgcccgggcacagggaggaggacatgatcctgccgttgccgcccggcgcgtcggccgtgcggctgggcaacgacgccaccatccggcagcagctcaacgtcagccgccacatgttctattccgtctccttcatggccgcgcggtcgtgcgcccaggccgagaagctcaacgtgtcggtcgaccccgagttcggcctgctcccgatccagaccgtgtacaccagcaccggctgggacacctactcctgggccttcaaggccaggcacggcaccgggtggctgaccatccacaacaccggcgtcgaggaggacccggcgtgcggccccctcctgatcgccgtcgccatcaagaccctctacgccccccaccacaccaagggtaacatgctgaggaacggggacttcgagcaggggccgtacatcttccccggcacccggtggggcgtgctggtgccgccgatcacggaggacgtgcactcgccgctgtcgggctggactgtcatgtcggacaccaaggtggtcaagtacgtggacgcgccgcaccacgcggtgccgcggggcgcgcgcgccgtggagctggtggccggccgggagagcgcgctggtgcaggaggtgcgcaccgtgccggggcggacgtacaggctctccttcgccgtgggggacgccgccaacggctgcagcgggtccctggtggtggaggcgtacgcggggcgggggaccctgagggtgccctatgagtccctcggcacgggcggctccacgcccgcggcgctcgagttcacggccgtcgccaacgagacgcgcgtggtgttccagagctccagccacctcatgaagtccgacgccacgctgtgcgggcccgtcgtcgacgacgtctccctcgtcccggtgcgcgtgcacgctgcccgccggctgcgtttgtagcggatatctatcttttttgcagtagtttcggagttcgttgcgtttgtaccggccggcattcggtgcgccctgtgtctgaccgccgcgctggaggccttacgtgtctcgttagtcgcgtgtctgggtgacacaatatataacagtctccgtgaacggagacttcaacc

SEQ ID NO: 14702 - protein, 383 aa, Triticum aestivum
  peptide (1)..(383): Ceres Seq. ID no. 15176855
  misc_feature (53)..(374): Pfam Name: Pfam Description:  Protein of unknown function, DUF642
  misc_feature (11)..(379): NCBI GI NO: 38345428 NR Description: OSJNBb0091E11.19
  misc_feature (11)..(383): NCBI GI NO: 38345426 NR Description: OSJNBb0091E11.17
  misc_feature (22)..(383): NCBI GI NO: 34912572 NR Description: P0410E03.24
  misc_feature (11)..(383): NCBI GI NO: 38345427 NR Description: OSJNBb0091E11.18
  misc_feature (15)..(381): NCBI GI NO: 38345423 NR Description: OSJNBb0091E11.14
  misc_feature (10)..(373): NCBI GI NO: 15220093 NR Description: expressed protein [Arabidopsis thaliana]
  misc_feature (153)..(368): NCBI GI NO: 34913458 NR Description: P0702H08.18
  misc_feature (203)..(312): NCBI GI NO: 34902166 NR Description: Hypothetical protein
  misc_feature (232)..(312): NCBI GI NO: 34899562 NR Description: OJ1606_D04.1
ISSSTPVVEIMARSARSMAFFVLVAVAVRAISAVTDGLLPNGDFAQGPDRSEMNGTVVTARHAIPRWEISGFVEYIAPGHREEDMILPLPPGASAVRLGNDATIRQQLNVSRHMFYSVSFMAARSCAQAEKLNVSVDPEFGLLPIQTVYTSTGWDTYSWAFKARHGTGWLTIHNTGVEEDPACGPLLIAVAIKTLYAPHHTKGNMLRNGDFEQGPYIFPGTRWGVLVPPITEDVHSPLSGWTVMSDTKVVKYVDAPHHAVPRGARAVELVAGRESALVQEVRTVPGRTYRLSFAVGDAANGCSGSLVVEAYAGRGTLRVPYESLGTGGSTPAALEFTAVANETRVVFQSSSHLMKSDATLCGPVVDDVSLVPVRVHAARRLRL

SEQ ID NO: 14703 - protein, 373 aa, Triticum aestivum
  peptide (1)..(373): Ceres Seq. ID no. 15176856
  misc_feature (43)..(364): Pfam Name: Pfam Description:  Protein of unknown function, DUF642
  misc_feature (1)..(369): NCBI GI NO: 38345428 NR Description: OSJNBb0091E11.19
  misc_feature (1)..(373): NCBI GI NO: 38345426 NR Description: OSJNBb0091E11.17
  misc_feature (12)..(373): NCBI GI NO: 34912572 NR Description: P0410E03.24
  misc_feature (1)..(373): NCBI GI NO: 38345427 NR Description: OSJNBb0091E11.18
  misc_feature (5)..(371): NCBI GI NO: 38345423 NR Description: OSJNBb0091E11.14
  misc_feature (1)..(363): NCBI GI NO: 15220093 NR Description: expressed protein [Arabidopsis thaliana]
  misc_feature (143)..(358): NCBI GI NO: 34913458 NR Description: P0702H08.18
  misc_feature (193)..(302): NCBI GI NO: 34902166 NR Description: Hypothetical protein
  misc_feature (222)..(302): NCBI GI NO: 34899562 NR Description: OJ1606_D04.1
MARSARSMAFFVLVAVAVRAISAVTDGLLPNGDFAQGPDRSEMNGTVVTARHAIPRWEISGFVEYIAPGHREEDMILPLPPGASAVRLGNDATIRQQLNVSRHMFYSVSFMAARSCAQAEKLNVSVDPEFGLLPIQTVYTSTGWDTYSWAFKARHGTGWLTIHNTGVEEDPACGPLLIAVAIKTLYAPHHTKGNMLRNGDFEQGPYIFPGTRWGVLVPPITEDVHSPLSGWTVMSDTKVVKYVDAPHHAVPRGARAVELVAGRESALVQEVRTVPGRTYRLSFAVGDAANGCSGSLVVEAYAGRGTLRVPYESLGTGGSTPAALEFTAVANETRVVFQSSSHLMKSDATLCGPVVDDVSLVPVRVHAARRLRL

SEQ ID NO: 14704 - protein, 366 aa, Triticum aestivum
  peptide (1)..(366): Ceres Seq. ID no. 15176857
  misc_feature (36)..(357): Pfam Name: Pfam Description:  Protein of unknown function, DUF642
  misc_feature (1)..(362): NCBI GI NO: 38345428 NR Description: OSJNBb0091E11.19
  misc_feature (1)..(366): NCBI GI NO: 38345426 NR Description: OSJNBb0091E11.17
  misc_feature (5)..(366): NCBI GI NO: 34912572 NR Description: P0410E03.24
  misc_feature (1)..(366): NCBI GI NO: 38345427 NR Description: OSJNBb0091E11.18
  misc_feature (1)..(364): NCBI GI NO: 38345423 NR Description: OSJNBb0091E11.14
  misc_feature (1)..(356): NCBI GI NO: 15220093 NR Description: expressed protein [Arabidopsis thaliana]
  misc_feature (136)..(351): NCBI GI NO: 34913458 NR Description: P0702H08.18
  misc_feature (186)..(295): NCBI GI NO: 34902166 NR Description: Hypothetical protein
  misc_feature (215)..(295): NCBI GI NO: 34899562 NR Description: OJ1606_D04.1
MAFFVLVAVAVRAISAVTDGLLPNGDFAQGPDRSEMNGTVVTARHAIPRWEISGFVEYIAPGHREEDMILPLPPGASAVRLGNDATIRQQLNVSRHMFYSVSFMAARSCAQAEKLNVSVDPEFGLLPIQTVYTSTGWDTYSWAFKARHGTGWLTIHNTGVEEDPACGPLLIAVAIKTLYAPHHTKGNMLRNGDFEQGPYIFPGTRWGVLVPPITEDVHSPLSGWTVMSDTKVVKYVDAPHHAVPRGARAVELVAGRESALVQEVRTVPGRTYRLSFAVGDAANGCSGSLVVEAYAGRGTLRVPYESLGTGGSTPAALEFTAVANETRVVFQSSSHLMKSDATLCGPVVDDVSLVPVRVHAARRLRL

SEQ ID NO: 14705 - DNA, 1052 bp, Triticum aestivum
  misc_feature (1)..(1052): Ceres Seq. ID no. 14302082
ctgtctctccctgctctctgtttctccgctcctcccagatccgcgcgtgcgttcctgttcacgttcctttccggcggcgtcgtcgtcttcctccagattcgactcgacgatttcccaagcgataatggcggaggaggggcacaaggtggtgctcaacgtgtacgacctcagcaacggcctggcgcgccagctctccacctccttcctcggcaagcccatcgaggccatatggcacacgggcgtggtggtgtacggcaacgagtacttcttcgggggcgggatccaggcggcgccggcgggggccacgcagtacggccgccccgtgcgggtcgtcgacctgggcgtcacccacctcccccgcgaggtcttcgaggactacctccgcgacatcgcgccgcgctacaccgccgccacctacagcctgctcacccacaactgcaacaactttagcaacgaggtcgcgcagttcctcgtcggcgccgggatccccgactacatcctcaacctgcccaacgaggtcatgtccagccccatgggcgccatgatcatgcccatgatccagaacctcgaggccacgctcaggaacaacgccgcgccccagaccacccagttcgtgcccacgccggcctctgtctccgtgccgcagccggtggcttcggccgacaaaacccctagttctacagcagctgccgctgctagtgcggcacctgttggctcttcttccaagaaagaagaagagaagaagatcgagaagcagactccagagaaagccgccgcggcagctccggctatggctgaccctctcgggagcatgagggggaaggtgcaggaggaggtgatgagggagtttgcggcgctcatggccagtgggacactgcgggcgagcgaggccgcggcgctggccatgcgccgggtcatggagcgccacggtgacggcgccagtatgcaggcctagtggcctgaaactattttacacacgttcgatctttgatgcaattgcaaactgatgcttacttgtattgcagcatgaaactcaattttatttgtctgac

SEQ ID NO: 14706 - protein, 317 aa, Triticum aestivum
  peptide (1)..(317): Ceres Seq. ID no. 14302083
  misc_feature (47)..(170): Pfam Name: DUF862 Pfam Description: Eukaryotic protein of unknown function
  misc_feature (42)..(310): NCBI GI NO: 15231383 NR Description: expressed protein [Arabidopsis thaliana]
  misc_feature (38)..(310): NCBI GI NO: 37535296 NR Description: unknown protein
  misc_feature (47)..(196): NCBI GI NO: 28277916 NR Description: Similar to DNA segment
  misc_feature (49)..(189): NCBI GI NO: 37589651 NR Description: Unknown (protein for MGC:73066) [Danio rerio]
  misc_feature (47)..(190): NCBI GI NO: 14779199 NR Description: similar to DNA segment
  misc_feature (48)..(282): NCBI GI NO: 29246854 NR Description: GLP_191_9337_10773 [Giardia lamblia ATCC 50803]
  misc_feature (47)..(190): NCBI GI NO: 20162548 NR Description: D15Wsu75e protein [Mus musculus]
  misc_feature (47)..(190): NCBI GI NO: 34867307 NR Description: similar to D15Wsu75e protein [Rattus norvegicus]
  misc_feature (49)..(210): NCBI GI NO: 40738408 NR Description: hypothetical protein AN6915.2
  misc_feature (49)..(253): NCBI GI NO: 23508869 NR Description: hypothetical protein [Plasmodium falciparum 3D7]
CLSLLSVSPLLPDPRVRSCSRSFPAASSSSSRFDSTISQAIMAEEGHKVVLNVYDLSNGLARQLSTSFLGKPIEAIWHTGVVVYGNEYFFGGGIQAAPAGATQYGRPVRVVDLGVTHLPREVFEDYLRDIAPRYTAATYSLLTHNCNNFSNEVAQFLVGAGIPDYILNLPNEVMSSPMGAMIMPMIQNLEATLRNNAAPQTTQFVPTPASVSVPQPVASADKTPSSTAAAAASAAPVGSSSKKEEEKKIEKQTPEKAAAAAPAMADPLGSMRGKVQEEVMREFAALMASGTLRASEAAALAMRRVMERHGDGASMQA

SEQ ID NO: 14707 - protein, 276 aa, Triticum aestivum
  peptide (1)..(276): Ceres Seq. ID no. 14302084
  misc_feature (6)..(129): Pfam Name: DUF862 Pfam Description: Eukaryotic protein of unknown function
  misc_feature (1)..(269): NCBI GI NO: 15231383 NR Description: expressed protein [Arabidopsis thaliana]
  misc_feature (1)..(269): NCBI GI NO: 37535296 NR Description: unknown protein
  misc_feature (6)..(155): NCBI GI NO: 28277916 NR Description: Similar to DNA segment
  misc_feature (8)..(148): NCBI GI NO: 37589651 NR Description: Unknown (protein for MGC:73066) [Danio rerio]
  misc_feature (6)..(149): NCBI GI NO: 14779199 NR Description: similar to DNA segment
  misc_feature (7)..(241): NCBI GI NO: 29246854 NR Description: GLP_191_9337_10773 [Giardia lamblia ATCC 50803]
  misc_feature (6)..(149): NCBI GI NO: 20162548 NR Description: D15Wsu75e protein [Mus musculus]
  misc_feature (6)..(149): NCBI GI NO: 34867307 NR Description: similar to D15Wsu75e protein [Rattus norvegicus]
  misc_feature (8)..(169): NCBI GI NO: 40738408 NR Description: hypothetical protein AN6915.2
  misc_feature (8)..(212): NCBI GI NO: 23508869 NR Description: hypothetical protein [Plasmodium falciparum 3D7]
MAEEGHKVVLNVYDLSNGLARQLSTSFLGKPIEAIWHTGVVVYGNEYFFGGGIQAAPAGATQYGRPVRVVDLGVTHLPREVFEDYLRDIAPRYTAATYSLLTHNCNNFSNEVAQFLVGAGIPDYILNLPNEVMSSPMGAMIMPMIQNLEATLRNNAAPQTTQFVPTPASVSVPQPVASADKTPSSTAAAAASAAPVGSSSKKEEEKKIEKQTPEKAAAAAPAMADPLGSMRGKVQEEVMREFAALMASGTLRASEAAALAMRRVMERHGDGASMQA

SEQ ID NO: 14708 - DNA, 922 bp, Triticum aestivum
  misc_feature (1)..(922): Ceres Seq. ID no. 12616626
tcccccgatccaaatccgaaatttttcccctccccgcagcccgctccctcctccgcgcccgcactgtagcccgagcgctcggctccaccgccgtgggctgtagccgccgtcgctgccatggcgaacgacgggtcccccaagtccggtgacatcccgccctaccccgagatgattctcgcggcgatcgaggcgctgggcgacaagaacggctcgagcaagtccgccatctccagctacatcgaggagaagtacgagggcctcccctcggcgcacgcctccctcctcacggccaacctcgccagcatgaaggaggccggcaagctcgccttcgtcaagaacaactacctcaaggctgacgctccctccgccaccccggcaaagcgcggccgcggccgcccgcctaaggaccctaacgcgccgcccaagccgaaggctgcgcccaaggaccccaacacgcccaagcgcggccggggccgcccgcccaaggctaaggatcccatggccgacgccgtcaaggatgccgtcgccaaggcgaccaccggcatgccccggggccgcggccgcccgccgggtccctcctcggccaagaaggccaaggtcgccaaggaggctgcctctccggctcccgcggacggctccgctcctgccaagcgtggccgtgggcgcccacgcaaggtggcggtgtgaggcctgcgtgctgatgcctttcggtctgtgtatctcgctgtggttgcgacggtggtaagctcctaggtgtgaccgtgcttcttcgatttgtgctccgtactaattgttccgtcggcttagttgctcagtatgtgttgtaacctaatcgagatgagtgtgcacaatggatggatggatgtttttagcttcggttgtagttgactgtgctgctgtgagtgaacatgttcattttttt

SEQ ID NO: 14709 - protein, 189 aa, Triticum aestivum; identical to SEQ ID NO: 6631
  peptide (1)..(189): Ceres Seq. ID no. 12616627
  misc_feature (11)..(80): Pfam Name: Pfam Description:  linker histone H1 and H5 family
  misc_feature (1)..(188): NCBI GI NO: 20502966 NR Description: HMG-I/Y protein HMGa [Triticum aestivum]
  misc_feature (1)..(187): NCBI GI NO: 11544762 NR Description: HMGI/Y protein [Zea mays]
  misc_feature (1)..(187): NCBI GI NO: 9837562 NR Description: high mobility group I/Y-2 [Zea mays]
  misc_feature (1)..(187): NCBI GI NO: 4585621 NR Description: HMGI/Y protein [Zea mays]
  misc_feature (2)..(187): NCBI GI NO: 7439646 NR Description: DNA binding protein PF1 - rice
  misc_feature (2)..(188): NCBI GI NO: 25553691 NR Description: P0479C08.8
  misc_feature (1)..(151): NCBI GI NO: 629769 NR Description: histone-like DNA-binding protein PF 1 - oat
  misc_feature (1)..(186): NCBI GI NO: 6651027 NR Description: high mobility group protein I/Y [Brassica napus]
  misc_feature (9)..(187): NCBI GI NO: 1808590 NR Description: HMG-I/Y [Arabidopsis thaliana]
  misc_feature (9)..(187): NCBI GI NO: 15223947 NR Description: linker histone protein, putative

SEQ ID NO: 14710 - protein, 172 aa, Triticum aestivum; identical to SEQ ID NO: 6632
  peptide (1)..(172): Ceres Seq. ID no. 12616628
  misc_feature (1)..(63): Pfam Name: Pfam Description:  linker histone H1 and H5 family
  misc_feature (1)..(171): NCBI GI NO: 20502966 NR Description: HMG-I/Y protein HMGa [Triticum aestivum]
  misc_feature (1)..(170): NCBI GI NO: 11544762 NR Description: HMGI/Y protein [Zea mays]
  misc_feature (1)..(170): NCBI GI NO: 9837562 NR Description: high mobility group I/Y-2 [Zea mays]
  misc_feature (1)..(170): NCBI GI NO: 4585621 NR Description: HMGI/Y protein [Zea mays]
  misc_feature (1)..(170): NCBI GI NO: 7439646 NR Description: DNA binding protein PF1 - rice
  misc_feature (1)..(171): NCBI GI NO: 25553691 NR Description: P0479C08.8
  misc_feature (1)..(134): NCBI GI NO: 629769 NR Description: histone-like DNA-binding protein PF 1 - oat
  misc_feature (1)..(169): NCBI GI NO: 6651027 NR Description: high mobility group protein I/Y [Brassica napus]
  misc_feature (1)..(170): NCBI GI NO: 1808590 NR Description: HMG-I/Y [Arabidopsis thaliana]
  misc_feature (1)..(170): NCBI GI NO: 15223947 NR Description: linker histone protein, putative

SEQ ID NO: 14711 - protein, 127 aa, Triticum aestivum; identical to SEQ ID NO: 6633
  peptide (1)..(127): Ceres Seq. ID no. 12616629
  misc_feature (1)..(126): NCBI GI NO: 20502966 NR Description: HMG-I/Y protein HMGa [Triticum aestivum]
  misc_feature (1)..(125): NCBI GI NO: 11544762 NR Description: HMGI/Y protein [Zea mays]
  misc_feature (1)..(125): NCBI GI NO: 9837562 NR Description: high mobility group I/Y-2 [Zea mays]
  misc_feature (1)..(125): NCBI GI NO: 4585621 NR Description: HMGI/Y protein [Zea mays]
  misc_feature (1)..(125): NCBI GI NO: 7439646 NR Description: DNA binding protein PF1 - rice
  misc_feature (1)..(126): NCBI GI NO: 25553691 NR Description: P0479C08.8
  misc_feature (1)..(89): NCBI GI NO: 629769 NR Description: histone-like DNA-binding protein PF 1 - oat
  misc_feature (1)..(124): NCBI GI NO: 6651027 NR Description: high mobility group protein I/Y [Brassica napus]
  misc_feature (1)..(125): NCBI GI NO: 1808590 NR Description: HMG-I/Y [Arabidopsis thaliana]
  misc_feature (1)..(125): NCBI GI NO: 15223947 NR Description: linker histone protein, putative

SEQ ID NO: 14712 - DNA, 1044 bp, Triticum aestivum
  misc_feature (1)..(1044): Ceres Seq. ID no. 13584819
aatcgaaaactctcggtctcgctagggttttgggattttagcctccagcgccgccgccgccgccccccagcgaattcgacaagcccccgagctcgccggatccgatggccgtcacgttctccgacctccacaccgccgacgggctcaaggccctcgaggcgcacctcgccggcaagacctacatctccggcgatgggatcaccaaggacgacgtcaaggtgttcgcggcggtgcccgtgaagcccagcgccgagttcccgaacgctgcccgctggtatgacaccgtcgccgcggctgttgcttcaaggttccctggccagtcctctggggtgagtgcatcatcggctcctgctgcagctgctcctgccgcttccaaggatgaagacgacgatgatgacatggatctgtttggcgatgagaccgaggaggacaagaaagctgcagctgagcgtgaggctgccaagcctgcaaagaagaaagaaagtggcaaatcctctgtcctcatggatatcaagccatgggacgatgagactgacatgaagaagttggaggaggctgtccgcagtgttcaaatggagggtctcacctggggtgcatctaagcttatgcccgtgggttatggcatcaagaagctccagatcatgctgacgatcattgacgacctcgtgtctgtcgacactcttattgaggaagtgctctgcgagacgcccatcaacgagtatgtccagtcgtgtgacatcgttgccttcaacaagatctagaatctttgttcacccacttgttgctgctggattcttggtactgggatctgtcgatctggaaaacattattgtcgtcccatttagttacccctcttacagaaatgctactggttttgtttttgagtgatgccctggtcttgaatgtctgctacctttaaatagttgaactgctgagcggtttgtaatggcgaaacatctatcatgtggagtaaaatcagtctttgataaaaaaaaaaaaaaaaaagcttatcgataccgtcgacctcgagggggggcccggtac

SEQ ID NO: 14713 - protein, 218 aa, Triticum aestivum
  peptide (1)..(218): Ceres Seq. ID no. 13584820
  misc_feature (129)..(218): Pfam Name: Pfam Description:  EF-1 guanine nucleotide exchange domain
  misc_feature (1)..(218): NCBI GI NO: 232033 NR Description: ELONGATION FACTOR 1-BETA' (EF-1-BETA')
  misc_feature (1)..(218): NCBI GI NO: 38175744 NR Description: putative translation elongation factor eEF-1 beta'chain
  misc_feature (1)..(218): NCBI GI NO: 232031 NR Description: ELONGATION FACTOR 1-BETA' (EF-1-BETA')
  misc_feature (1)..(218): NCBI GI NO: 34899162 NR Description: putative translation elongation factor eEF-1 beta'chain
  misc_feature (1)..(218): NCBI GI NO: 30687350 NR Description: elongation factor 1B alpha-subunit
  misc_feature (1)..(218): NCBI GI NO: 15239877 NR Description: elongation factor 1B alpha-subunit (emb|CAB64729
  misc_feature (1)..(218): NCBI GI NO: 6015063 NR Description: ELONGATION FACTOR 1-BETA (EF-1-BETA)
  misc_feature (20)..(218): NCBI GI NO: 27754711 NR Description: putative elongation factor 1B alpha-subunit
  misc_feature (1)..(218): NCBI GI NO: 38232568 NR Description: translational elongation factor 1 subunit Bbeta
  misc_feature (1)..(218): NCBI GI NO: 3894214 NR Description: elongation factor 1 beta 2
MAVTFSDLHTADGLKALEAHLAGKTYISGDGITKDDVKVFAAVPVKPSAEFPNAARWYDTVAAAVASRFPGQSSGVSASSAPAAAAPAASKDEDDDDDMDLFGDETEEDKKAAAEREAAKPAKKKESGKSSVLMDIKPWDDETDMKKLEEAVRSVQMEGLTWGASKLMPVGYGIKKLQIMLTIIDDLVSVDTLIEEVLCETPINEYVQSCDIVAFNKI

SEQ ID NO: 14714 - protein, 120 aa, Triticum aestivum
  peptide (1)..(120): Ceres Seq. ID no. 13584821
  misc_feature (31)..(120): Pfam Name: Pfam Description:  EF-1 guanine nucleotide exchange domain
  misc_feature (1)..(120): NCBI GI NO: 232033 NR Description: ELONGATION FACTOR 1-BETA' (EF-1-BETA')
  misc_feature (1)..(120): NCBI GI NO: 38175744 NR Description: putative translation elongation factor eEF-1 beta'chain
  misc_feature (1)..(120): NCBI GI NO: 232031 NR Description: ELONGATION FACTOR 1-BETA' (EF-1-BETA')
  misc_feature (1)..(120): NCBI GI NO: 34899162 NR Description: putative translation elongation factor eEF-1 beta'chain
  misc_feature (1)..(120): NCBI GI NO: 30687350 NR Description: elongation factor 1B alpha-subunit
  misc_feature (1)..(120): NCBI GI NO: 15239877 NR Description: elongation factor 1B alpha-subunit (emb|CAB64729
  misc_feature (1)..(120): NCBI GI NO: 6015063 NR Description: ELONGATION FACTOR 1-BETA (EF-1-BETA)
  misc_feature (1)..(120): NCBI GI NO: 27754711 NR Description: putative elongation factor 1B alpha-subunit
  misc_feature (1)..(120): NCBI GI NO: 38232568 NR Description: translational elongation factor 1 subunit Bbeta
  misc_feature (1)..(120): NCBI GI NO: 3894214 NR Description: elongation factor 1 beta 2
MDLFGDETEEDKKAAAEREAAKPAKKKESGKSSVLMDIKPWDDETDMKKLEEAVRSVQMEGLTWGASKLMPVGYGIKKLQIMLTIIDDLVSVDTLIEEVLCETPINEYVQSCDIVAFNKI

SEQ ID NO: 14715 - DNA, 757 bp, Triticum aestivum
  misc_feature (1)..(757): Ceres Seq. ID no. 12618180
attttggatactagtgttggtctcagagtcctccaccccggacctctctgttcaccgcacacgatcagcagaggcagcggcaaggaagatgacgacgacgacaaggaggagacccttgaaggtccctgagatggcgctgagggtgtgcgtgatccccctcgccttggcctccctgtgggagatggccaccaacaagcaagctaatgacacctacggagagatcagcttctccaacctctccggcttcaagtatttagttttcattaacgctgtcactgccgcctattccgtggtctccatcctgatgtcatccttcaagtccctcgctcgctatgattggctcattttcctcctggatcaggcggcggcgtacctgctggtgacatcgtgctcggcggcggcggagctggtgtacctggcgatggagggcgaccgggaggtgtcgtggggcgaggtgtgctcctacttcggtcggttctgcggcagggccaccgtgtccgtggcgctgcaggccgccgcgctgctctgcttcgtcgcgctctccctcgtctccgccttccgggtcttccgcgagttcgacgcccctggtgctcatgttgattgctcgggggactctgactccaagcaggaaggtagaggatgatccatcatgaacaatcgctgatatttggaccatcttttatgtgtcaatggttgacgatggcgatgcgtccttggttttctttacgaatgctgatttcggggggagaaatgttgt

SEQ ID NO: 14716 - protein, 213 aa, Triticum aestivum
  peptide (1)..(213): Ceres Seq. ID no. 12618181
  misc_feature (39)..(174): Pfam Name: DUF588 Pfam Description: Domain of unknown function
  misc_feature (14)..(195): NCBI GI NO: 15240435 NR Description: putative protein; protein id: At5g54980.1
  misc_feature (35)..(195): NCBI GI NO: 38344646 NR Description: OSJNBa0094P09.18
  misc_feature (39)..(195): NCBI GI NO: 16973324 NR Description: hypothetical protein [Gossypium hirsutum]
  misc_feature (7)..(195): NCBI GI NO: 17380964 NR Description: unknown protein [Arabidopsis thaliana]
  misc_feature (7)..(195): NCBI GI NO: 18394453 NR Description: expressed protein; protein id: At1g17200
  misc_feature (71)..(195): NCBI GI NO: 14030504 NR Description: salicylic acid-induced fragment 1 protein
  misc_feature (37)..(195): NCBI GI NO: 15231842 NR Description: unknown protein; protein id: At3g14380.1
  misc_feature (37)..(213): NCBI GI NO: 25408415 NR Description: hypothetical protein At2g35760
  misc_feature (37)..(190): NCBI GI NO: 18403948 NR Description: expressed protein; protein id: At2g35760
  misc_feature (37)..(190): NCBI GI NO: 21617945 NR Description: unknown [Arabidopsis thaliana]
FWILVLVSESSTPDLSVHRTRSAEAAARKMTTTTRRRPLKVPEMALRVCVIPLALASLWEMATNKQANDTYGEISFSNLSGFKYLVFINAVTAAYSVVSILMSSFKSLARYDWLIFLLDQAAAYLLVTSCSAAAELVYLAMEGDREVSWGEVCSYFGRFCGRATVSVALQAAALLCFVALSLVSAFRVFREFDAPGAHVDCSGDSDSKQEGRG

SEQ ID NO: 14717 - protein, 184 aa, Triticum aestivum
  peptide (1)..(184): Ceres Seq. ID no. 12618182
  misc_feature (10)..(145): Pfam Name: DUF588 Pfam Description: Domain of unknown function
  misc_feature (1)..(166): NCBI GI NO: 15240435 NR Description: putative protein; protein id: At5g54980.1
  misc_feature (6)..(166): NCBI GI NO: 38344646 NR Description: OSJNBa0094P09.18
  misc_feature (10)..(166): NCBI GI NO: 16973324 NR Description: hypothetical protein [Gossypium hirsutum]
  misc_feature (1)..(166): NCBI GI NO: 17380964 NR Description: unknown protein [Arabidopsis thaliana]
  misc_feature (1)..(166): NCBI GI NO: 18394453 NR Description: expressed protein; protein id: At1g17200
  misc_feature (42)..(166): NCBI GI NO: 14030504 NR Description: salicylic acid-induced fragment 1 protein
  misc_feature (8)..(166): NCBI GI NO: 15231842 NR Description: unknown protein; protein id: At3g14380.1
  misc_feature (8)..(184): NCBI GI NO: 25408415 NR Description: hypothetical protein At2g35760
  misc_feature (8)..(161): NCBI GI NO: 18403948 NR Description: expressed protein; protein id: At2g35760
  misc_feature (8)..(161): NCBI GI NO: 21617945 NR Description: unknown [Arabidopsis thaliana]
MTTTTRRRPLKVPEMALRVCVIPLALASLWEMATNKQANDTYGEISFSNLSGFKYLVFINAVTAAYSVVSILMSSFKSLARYDWLIFLLDQAAAYLLVTSCSAAAELVYLAMEGDREVSWGEVCSYFGRFCGRATVSVALQAAALLCFVALSLVSAFRVFREFDAPGAHVDCSGDSDSKQEGRG

SEQ ID NO: 14718 - protein, 170 aa, Triticum aestivum
  peptide (1)..(170): Ceres Seq. ID no. 12618183
  misc_feature (1)..(131): Pfam Name: DUF588 Pfam Description: Domain of unknown function
  misc_feature (1)..(152): NCBI GI NO: 15240435 NR Description: putative protein; protein id: At5g54980.1
  misc_feature (1)..(152): NCBI GI NO: 38344646 NR Description: OSJNBa0094P09.18
  misc_feature (1)..(152): NCBI GI NO: 16973324 NR Description: hypothetical protein [Gossypium hirsutum]
  misc_feature (1)..(152): NCBI GI NO: 17380964 NR Description: unknown protein [Arabidopsis thaliana]
  misc_feature (1)..(152): NCBI GI NO: 18394453 NR Description: expressed protein; protein id: At1g17200
  misc_feature (28)..(152): NCBI GI NO: 14030504 NR Description: salicylic acid-induced fragment 1 protein
  misc_feature (1)..(152): NCBI GI NO: 15231842 NR Description: unknown protein; protein id: At3g14380.1
  misc_feature (1)..(170): NCBI GI NO: 25408415 NR Description: hypothetical protein At2g35760
  misc_feature (1)..(147): NCBI GI NO: 18403948 NR Description: expressed protein; protein id: At2g35760
  misc_feature (1)..(147): NCBI GI NO: 21617945 NR Description: unknown [Arabidopsis thaliana]
MALRVCVIPLALASLWEMATNKQANDTYGEISFSNLSGFKYLVFINAVTAAYSVVSILMSSFKSLARYDWLIFLLDQAAAYLLVTSCSAAAELVYLAMEGDREVSWGEVCSYFGRFCGRATVSVALQAAALLCFVALSLVSAFRVFREFDAPGAHVDCSGDSDSKQEGRG

SEQ ID NO: 14719 - DNA, 1063 bp, Triticum aestivum
  misc_feature (1)..(1063): Ceres Seq. ID no. 12617472
aaaaccactacagcgtagtgagcggcccagatcagccgaagtcagccggcaagctccacgggaaaccctagctactcccggccggccgccgccgccgcgtctgccgtccacgctccacccgcgggagctcgcctcctcctccacccgctacccctcgaggccactccggacggccatggcgcagagggccgcgggcggccttctccgacggtccatcgggctcgcgccgccgacaaccgcgagggccctgagcaccagcgccaccacgccggccgcggcggcagagggagaggcggcggccaaggcgaggaggaacaagaagaagaacctgttcgacgtggcgcagttcctgccggactggggcgtcggctacagggttgccaagaccacctggcgcgacgtctcctaccagatcaccaagatcaacctctacaaggatggccgccacgggaaggcgtgggggattcggcacaaggccggcgtgcaagcagccgatgctccgataagaatcagcggggttaacaaacgtggttggaagtacataaaggcgtcgttgcaagatatccctggagcagagccgccagccgtcaccgctgcttagtcagttacccggctagatatttatttagcaggtggcaaaactggtccctgtagaagcttagtgctgaaactattcagaaggttgactgatctaccatctccatcatttcataattctcctttgtctctgcaagtgttttttttttgacccggaacaattcattccattactaaactggctcagcaatgtctctgcaaggggttaaacataggtgaaagggttttagcgcgggcgtgaggccaggttgtcgtggcctccatgcttgttactgaagctaaagatgatgtagcgtcaattttttttttttggttttttctttttgcaatgcctcatttccatcagaagcaagcgcttcaccaacaatgagaatcgatcataaggtgattctcgccatcgaagccgaggacactgcgttcctagaatgcaaattatgatcccgtgtaataaaagttttctcttgcg

SEQ ID NO: 14720 - protein, 199 aa, Triticum aestivum
  peptide (1)..(199): Ceres Seq. ID no. 12617473
  misc_feature (71)..(199): NCBI GI NO: 15237795 NR Description: putative protein; protein id: At5g58990
  misc_feature (83)..(199): NCBI GI NO: 18423383 NR Description: expressed protein; protein id: At5g52370
KPLQRSERPRSAEVSRQAPRETLATPGRPPPPRLPSTLHPRELASSSTRYPSRPLRTAMAQRAAGGLLRRSIGLAPPTTARALSTSATTPAAAAEGEAAAKARRNKKKNLFDVAQFLPDWGVGYRVAKTTWRDVSYQITKINLYKDGRHGKAWGIRHKAGVQAADAPIRISGVNKRGWKYIKASLQDIPGAEPPAVTAA

SEQ ID NO: 14721 - protein, 141 aa, Triticum aestivum
  peptide (1)..(141): Ceres Seq. ID no. 12617474
  misc_feature (13)..(141): NCBI GI NO: 15237795 NR Description: putative protein; protein id: At5g58990
  misc_feature (25)..(141): NCBI GI NO: 18423383 NR Description: expressed protein; protein id: At5g52370
MAQRAAGGLLRRSIGLAPPTTARALSTSATTPAAAAEGEAAAKARRNKKKNLFDVAQFLPDWGVGYRVAKTTWRDVSYQITKINLYKDGRHGKAWGIRHKAGVQAADAPIRISGVNKRGWKYIKASLQDIPGAEPPAVTAA

SEQ ID NO: 14722 - DNA, 961 bp, Triticum aestivum
  misc_feature (1)..(961): Ceres Seq. ID no. 13585404
ctatcctctctctctctccagcatcctctttctctccttcctcccatggagtcggcatagccactagccggttctgcccgttgagagcgctcatataccctccacacctccagatctgtggcctgttgtagtctctgcctcctcagaacaacaagcccccgcagccgcgcccggatcggatggacaccgccatgcaccccgccggcgccgacgacggcggcctcgccgacccgctcaccggcaacgcgggcacaggcaccgagggcattatttgtggtatgccagacttcaagatgggtggaaagaggggcgatgaatctgcccctactgatgctggtgatgaagacggcgaagatgatgacggggatgaggatggtgacttcgcggagggcgaagaggaaatctcggaaggagaggagtatgacaaccccaaggccagtgacgccaagaagaaacaaataggcgagggtgaggagaatggcgaggatgatgaggaagaacaagaggagcaggagggtggaggaggtgacgacgatgatgatgacgacgacaacgacgatgacaatgaggacgacgacgatgatgacgatgatgtcgctgctgaagacgatggagatggagtagaagaggaggatgatgacgatgatgaggaggaggacgatgaggactcgctccagcccccgaagaagaggaagaagtgaagcccttcgacgcggctgctttagtcaccatgcgacgagatgtgcctgtccttcactgtgttctggaaactttccttagagttaaaaatgcccccacacgatcacaatgtgtgggcttgtaggagcgattagagggaactttgttgtcaccgttgctttgcttctgtggagttgatcgaacagatgtttcgctaacataattgtacctgagtggcgaaagcctcaagatttgaatatgtcagtcaactctttttatctcc

SEQ ID NO: 14723 - protein, 173 aa, Triticum aestivum
  peptide (1)..(173): Ceres Seq. ID no. 13585405
  misc_feature (46)..(163): Pfam Name: Pfam Description:  Chromadorea ALT protein
  misc_feature (8)..(173): NCBI GI NO: 39545744 NR Description: OSJNBb0034I13.8
  misc_feature (45)..(163): NCBI GI NO: 35210492 NR Description: aspartic acid-rich protein aspolin1
  misc_feature (45)..(163): NCBI GI NO: 35210494 NR Description: aspartic acid-rich protein aspolin2
  misc_feature (44)..(163): NCBI GI NO: 35210492 NR Description: aspartic acid-rich protein aspolin1
  misc_feature (44)..(163): NCBI GI NO: 35210494 NR Description: aspartic acid-rich protein aspolin2
  misc_feature (45)..(163): NCBI GI NO: 35210492 NR Description: aspartic acid-rich protein aspolin1
  misc_feature (45)..(163): NCBI GI NO: 35210494 NR Description: aspartic acid-rich protein aspolin2
  misc_feature (45)..(163): NCBI GI NO: 35210492 NR Description: aspartic acid-rich protein aspolin1
  misc_feature (45)..(163): NCBI GI NO: 35210494 NR Description: aspartic acid-rich protein aspolin2
  misc_feature (45)..(163): NCBI GI NO: 35210494 NR Description: aspartic acid-rich protein aspolin2
MDTAMHPAGADDGGLADPLTGNAGTGTEGIICGMPDFKMGGKRGDESAPTDAGDEDGEDDDGDEDGDFAEGEEEISEGEEYDNPKASDAKKKQIGEGEENGEDDEEEQEEQEGGGGDDDDDDDDNDDDNEDDDDDDDDVAAEDDGDGVEEEDDDDDEEEDDEDSLQPPKKRKK

SEQ ID NO: 14724 - protein, 169 aa, Triticum aestivum
  peptide (1)..(169): Ceres Seq. ID no. 13585406
  misc_feature (42)..(159): Pfam Name: Pfam Description:  Chromadorea ALT protein
  misc_feature (4)..(169): NCBI GI NO: 39545744 NR Description: OSJNBb0034I13.8
  misc_feature (41)..(159): NCBI GI NO: 35210492 NR Description: aspartic acid-rich protein aspolin1
  misc_feature (41)..(159): NCBI GI NO: 35210494 NR Description: aspartic acid-rich protein aspolin2
  misc_feature (40)..(159): NCBI GI NO: 35210492 NR Description: aspartic acid-rich protein aspolin1
  misc_feature (40)..(159): NCBI GI NO: 35210494 NR Description: aspartic acid-rich protein aspolin2
  misc_feature (41)..(159): NCBI GI NO: 35210492 NR Description: aspartic acid-rich protein aspolin1
  misc_feature (41)..(159): NCBI GI NO: 35210494 NR Description: aspartic acid-rich protein aspolin2
  misc_feature (41)..(159): NCBI GI NO: 35210492 NR Description: aspartic acid-rich protein aspolin1
  misc_feature (41)..(159): NCBI GI NO: 35210494 NR Description: aspartic acid-rich protein aspolin2
  misc_feature (41)..(159): NCBI GI NO: 35210494 NR Description: aspartic acid-rich protein aspolin2
MHPAGADDGGLADPLTGNAGTGTEGIICGMPDFKMGGKRGDESAPTDAGDEDGEDDDGDEDGDFAEGEEEISEGEEYDNPKASDAKKKQIGEGEENGEDDEEEQEEQEGGGGDDDDDDDDNDDDNEDDDDDDDDVAAEDDGDGVEEEDDDDDEEEDDEDSLQPPKKRKK

SEQ ID NO: 14725 - protein, 140 aa, Triticum aestivum
  peptide (1)..(140): Ceres Seq. ID no. 13585407
  misc_feature (13)..(130): Pfam Name: Pfam Description:  Chromadorea ALT protein
  misc_feature (1)..(140): NCBI GI NO: 39545744 NR Description: OSJNBb0034I13.8
  misc_feature (12)..(130): NCBI GI NO: 35210492 NR Description: aspartic acid-rich protein aspolin1
  misc_feature (12)..(130): NCBI GI NO: 35210494 NR Description: aspartic acid-rich protein aspolin2
  misc_feature (11)..(130): NCBI GI NO: 35210492 NR Description: aspartic acid-rich protein aspolin1
  misc_feature (11)..(130): NCBI GI NO: 35210494 NR Description: aspartic acid-rich protein aspolin2
  misc_feature (12)..(130): NCBI GI NO: 35210492 NR Description: aspartic acid-rich protein aspolin1
  misc_feature (12)..(130): NCBI GI NO: 35210494 NR Description: aspartic acid-rich protein aspolin2
  misc_feature (12)..(130): NCBI GI NO: 35210492 NR Description: aspartic acid-rich protein aspolin1
  misc_feature (12)..(130): NCBI GI NO: 35210494 NR Description: aspartic acid-rich protein aspolin2
  misc_feature (12)..(130): NCBI GI NO: 35210494 NR Description: aspartic acid-rich protein aspolin2
MPDFKMGGKRGDESAPTDAGDEDGEDDDGDEDGDFAEGEEEISEGEEYDNPKASDAKKKQIGEGEENGEDDEEEQEEQEGGGGDDDDDDDDNDDDNEDDDDDDDDVAAEDDGDGVEEEDDDDDEEEDDEDSLQPPKKRKK

SEQ ID NO: 14726 - DNA, 921 bp, Triticum aestivum
  misc_feature (1)..(921): Ceres Seq. ID no. 12617475
cccttggaatggttacacaacttccctcacaggatgagacttctatcagcaagaaacaactcctggcacgtcttgatgtttgcatgggcggaagggttgctgaagagcttatatttggggaagaaaatgttactactggtgccagaaatgatcttcatactgcaacagagctcgcccagtatatggtatcaaactgtgggatgagtaatgctattggtcctgtgcatgtaaaagaacgaccaagtgttgacatgcaatcaagaatagatgcagaggtgggcagactcctaagagaagcttatgaacgggtgacacatttactgaagaagcatgagaagcaattacatgctttagcgaatgctctgctggagcgtgaaactctgacggcagatgagatcaacaaagtagttcatccctaccaagaagaaccacagcttcccttccaagaagaagcctttgcgctaacttagacatattaccttttgttgcatcaaggtggtagtttcgactgtaaatccgtgtacagtaattggaaagtcattactcaccattttgcgaagtggggtaaacttgggtgcatttccttctcggcaccattaggctggcatgcaggaaattgaaagatgagattatcggagggtgttgcatgattgtgagctattgacatatctgtgacgcggcgagactcaccagcgcctgccttttacccaacatgaagcccctgagctgagaagtgcatcacgcttggtttagatagggaagcaatacagatgtgacattgcatattttggattctagattatttcttcttttcaattctatgcctcgccattgtttaaaggaaaccgtacatataactgtctcattctattgcgtcgtaacatgttacgcggatgtggtcaattattagttggcatgttc

SEQ ID NO: 14727 - protein, 155 aa, Triticum aestivum
  peptide (1)..(155): Ceres Seq. ID no. 12617476
  misc_feature (1)..(135): Pfam Name: Pfam Description:  Peptidase family M41
  misc_feature (31)..(155): NCBI GI NO: 34912722 NR Description: putative cell division protein FtsH protease-like
  misc_feature (1)..(150): NCBI GI NO: 18423480 NR Description: FtsH protease, putative; protein id: At5g53170
  misc_feature (1)..(136): NCBI GI NO: 7488430 NR Description: probable YME1 ATP-dependant proteinase
  misc_feature (1)..(136): NCBI GI NO: 18401040 NR Description: FtsH protease, putative; protein id: At2g26140.1
  misc_feature (1)..(62): NCBI GI NO: 34912242 NR Description: P0710A02.1
  misc_feature (94)..(154): NCBI GI NO: 34912242 NR Description: P0710A02.1
  misc_feature (1)..(151): NCBI GI NO: 34914298 NR Description: putative FtsH protease
  misc_feature (1)..(136): NCBI GI NO: 30526336 NR Description: putative FtsH protease [Lycopersicon esculentum]
  misc_feature (1)..(136): NCBI GI NO: 34914296 NR Description: putative FtsH protease
  misc_feature (1)..(136): NCBI GI NO: 19076014 NR Description: putative metallopeptidase
LGMVTQLPSQDETSISKKQLLARLDVCMGGRVAEELIFGEENVTTGARNDLHTATELAQYMVSNCGMSNAIGPVHVKERPSVDMQSRIDAEVGRLLREAYERVTHLLKKHEKQLHALANALLERETLTADEINKVVHPYQEEPQLPFQEEAFALT

SEQ ID NO: 14728 - protein, 153 aa, Triticum aestivum
  peptide (1)..(153): Ceres Seq. ID no. 12617477
  misc_feature (1)..(133): Pfam Name: Pfam Description:  Peptidase family M41
  misc_feature (29)..(153): NCBI GI NO: 34912722 NR Description: putative cell division protein FtsH protease-like
  misc_feature (1)..(148): NCBI GI NO: 18423480 NR Description: FtsH protease, putative; protein id: At5g53170
  misc_feature (1)..(134): NCBI GI NO: 7488430 NR Description: probable YME1 ATP-dependant proteinase
  misc_feature (1)..(134): NCBI GI NO: 18401040 NR Description: FtsH protease, putative; protein id: At2g26140.1
  misc_feature (1)..(60): NCBI GI NO: 34912242 NR Description: P0710A02.1
  misc_feature (92)..(152): NCBI GI NO: 34912242 NR Description: P0710A02.1
  misc_feature (1)..(149): NCBI GI NO: 34914298 NR Description: putative FtsH protease
  misc_feature (1)..(134): NCBI GI NO: 30526336 NR Description: putative FtsH protease [Lycopersicon esculentum]
  misc_feature (1)..(134): NCBI GI NO: 34914296 NR Description: putative FtsH protease
  misc_feature (1)..(134): NCBI GI NO: 19076014 NR Description: putative metallopeptidase
MVTQLPSQDETSISKKQLLARLDVCMGGRVAEELIFGEENVTTGARNDLHTATELAQYMVSNCGMSNAIGPVHVKERPSVDMQSRIDAEVGRLLREAYERVTHLLKKHEKQLHALANALLERETLTADEINKVVHPYQEEPQLPFQEEAFALT

SEQ ID NO: 14729 - protein, 128 aa, Triticum aestivum
  peptide (1)..(128): Ceres Seq. ID no. 12617478
  misc_feature (1)..(108): Pfam Name: Pfam Description:  Peptidase family M41
  misc_feature (4)..(128): NCBI GI NO: 34912722 NR Description: putative cell division protein FtsH protease-like
  misc_feature (1)..(123): NCBI GI NO: 18423480 NR Description: FtsH protease, putative; protein id: At5g53170
  misc_feature (1)..(109): NCBI GI NO: 7488430 NR Description: probable YME1 ATP-dependant proteinase
  misc_feature (1)..(109): NCBI GI NO: 18401040 NR Description: FtsH protease, putative; protein id: At2g26140.1
  misc_feature (1)..(35): NCBI GI NO: 34912242 NR Description: P0710A02.1
  misc_feature (67)..(127): NCBI GI NO: 34912242 NR Description: P0710A02.1
  misc_feature (1)..(124): NCBI GI NO: 34914298 NR Description: putative FtsH protease
  misc_feature (1)..(109): NCBI GI NO: 30526336 NR Description: putative FtsH protease [Lycopersicon esculentum]
  misc_feature (1)..(109): NCBI GI NO: 34914296 NR Description: putative FtsH protease
  misc_feature (1)..(109): NCBI GI NO: 19076014 NR Description: putative metallopeptidase
MGGRVAEELIFGEENVTTGARNDLHTATELAQYMVSNCGMSNAIGPVHVKERPSVDMQSRIDAEVGRLLREAYERVTHLLKKHEKQLHALANALLERETLTADEINKVVHPYQEEPQLPFQEEAFALT

SEQ ID NO: 14730 - DNA, 849 bp, Triticum aestivum
  misc_feature (1)..(849): Ceres Seq. ID no. 13598517
gtattcttccccgagcgagtggcgcacctctggaattgttttctgttttctcctccccacaatgtccatctccgggaacggccacctccccgccgccgccgcctccaccggcctgccggaccactcctccgcctccgcgtcagactccgaggccgagggagacgccgactacctccccatctccggcgccgcctcggacaccgacagcgaccccgaccccgatctcgcatctcaccgccgcctcgacgcggtcgacaacggcgtctccgagctggatatcgcctccgacgacgaagaaagcgacgaagaagaaggcacgggcgcgacggaggccgcggcctccttggacgacgagcgtaggcggcgcgcccagctgcccgcgggcgccgcggcccggatcgtggacgcgatgcgcggcgtggcgttccccggcgcgccgccgccctgggcgggcgccgtccccgacgagcagtggctcgagcgcctccgctccctccgcggcggccgcgactagacagagcagatgagttctcgacccacagatcactgtgagttgtgagagcttctgatccgcctttgtactgaaggaacattcctgtatcgccatagatccagtagaattgcctctcgctgcttcggaatgaaactcgtgcgcagatcatcgccgatgagatcagtgatcaacactggacgctgttcttgtgtatggattttatggaggtttggtttttttttcgaaaaaaaaaaaaaaaaaaaaaaaaaaaaaaaaaaaaaaaaaaaaaaaaaaaaaaaaagaaaaaaaaaaaaaaaaaggcttatcaataccgtcaacctcaagggggggcccgg

SEQ ID NO: 14731 - protein, 174 aa, Triticum aestivum
  peptide (1)..(174): Ceres Seq. ID no. 13598518
  misc_feature (26)..(170): Pfam Name: Pfam Description:  Mucin-like glycoprotein
  misc_feature (18)..(165): NCBI GI NO: 27375632 NR Description: blr0521 [Bradyrhizobium japonicum]
  misc_feature (19)..(131): NCBI GI NO: 30387315 NR Description: unknown [Choristoneura fumiferana MNPV]
  misc_feature (3)..(174): NCBI GI NO: 9630030 NR Description: unknown
  misc_feature (19)..(165): NCBI GI NO: 30387315 NR Description: unknown [Choristoneura fumiferana MNPV]
  misc_feature (23)..(174): NCBI GI NO: 7949115 NR Description: Ser/Arg-related nuclear matrix protein
  misc_feature (17)..(169): NCBI GI NO: 27375632 NR Description: blr0521 [Bradyrhizobium japonicum]
  misc_feature (18)..(123): NCBI GI NO: 15320736 NR Description: unknown
  misc_feature (22)..(174): NCBI GI NO: 188864 NR Description: mucin
  misc_feature (19)..(131): NCBI GI NO: 15320736 NR Description: unknown
  misc_feature (14)..(165): NCBI GI NO: 9630030 NR Description: unknown
ILPRASGAPLELFSVFSSPQCPSPGTATSPPPPPPPACRTTPPPPRQTPRPRETPTTSPSPAPPRTPTATPTPISHLTAASTRSTTASPSWISPPTTKKATKKKARARRRPRPPWTTSVGGAPSCPRAPRPGSWTRCAAWRSPARRRPGRAPSPTSSGSSASAPSAAAATRQSR

SEQ ID NO: 14732 - protein, 170 aa, Triticum aestivum
  peptide (1)..(170): Ceres Seq. ID no. 13598519
  misc_feature (21)..(148): NCBI GI NO: 34914208 NR Description: OSJNBb0049O23.17
  misc_feature (40)..(166): NCBI GI NO: 18390712 NR Description: expressed protein [Arabidopsis thaliana]
  misc_feature (40)..(166): NCBI GI NO: 25406950 NR Description: hypothetical protein
YSSPSEWRTSGIVFCFLLPTMSISGNGHLPAAAASTGLPDHSSASASDSEAEGDADYLPISGAASDTDSDPDPDLASHRRLDAVDNGVSELDIASDDEESDEEEGTGATEAAASLDDERRRRAQLPAGAAARIVDAMRGVAFPGAPPPWAGAVPDEQWLERLRSLRGGRD

SEQ ID NO: 14733 - protein, 150 aa, Triticum aestivum
  peptide (1)..(150): Ceres Seq. ID no. 13598520
  misc_feature (1)..(128): NCBI GI NO: 34914208 NR Description: OSJNBb0049O23.17
  misc_feature (20)..(146): NCBI GI NO: 18390712 NR Description: expressed protein [Arabidopsis thaliana]
  misc_feature (20)..(146): NCBI GI NO: 25406950 NR Description: hypothetical protein
MSISGNGHLPAAAASTGLPDHSSASASDSEAEGDADYLPISGAASDTDSDPDPDLASHRRLDAVDNGVSELDIASDDEESDEEEGTGATEAAASLDDERRRRAQLPAGAAARIVDAMRGVAFPGAPPPWAGAVPDEQWLERLRSLRGGRD

SEQ ID NO: 14734 - DNA, 982 bp, Triticum aestivum
  misc_feature (1)..(982): Ceres Seq. ID no. 12598739
gaagaaatcagatcaaagggggaaggaagcgaggcacagggcaccgcactgctccacttcgccttctcctccaagccacgaactccggcgactccaccacaagcccccgagcagcccgccctctccgaccaccgccatgtcgaggcgcggcgactgggtctacgagaacaacggcgggacctgcgtggccatcgccggcgcggactactgcgtggtcgccgccgacacccgcctctccgtcggatacaacatcctcacgcgcgagcactccaagatctgcgagctggccgataaatgtgtaatagcatcttctggcttccaaggtgacatcaaagctctacagaagaacttagctgccagggaactgctataccagcaccagcacaataaaaggatgagctgcccagcaatggcacaattgctctccaacaccctgtactacaagcgattcttcccatactatgctttcaacgtgcttggtgggcttgacagtgaagggaaaggatgtgtctactcatatgatgctgttgggtcctacgagaggaccggttacagtgctcagggatcaggatctaccttgatcatgccagtgctggacaaccagctaaaatcacctagtccactattagttcctgcaagagatgctgtcacccctttgtccgagtcagaggcggtcgacctagttaaggatgtctttgcatctgcaactgagagggacatctacaccggggacaaggtggagattgtagtcatcaacaaagctgggactaggcgcgagtacatcgagttgaggaaggactaagtttgcgccgcggttgccatttgcttccctagatatagggaattattatgcccagagctgctacttgatagaaacacccgtgcttgctttgcttccgtgatgatgtaccaggatcgacccagcttgctttgttaaactactttgttgtttcatgcatatgagatgctgagctatttgttg

SEQ ID NO: 14735 - protein, 266 aa, Triticum aestivum
  peptide (1)..(266): Ceres Seq. ID no. 12598740
  misc_feature (55)..(251): Pfam Name: Pfam Description:  Proteasome A-type and B-type
  misc_feature (46)..(266): NCBI GI NO: 17380182 NR Description: Proteasome subunit beta type 1
  misc_feature (48)..(266): NCBI GI NO: 17380185 NR Description: Proteasome subunit beta type 1
  misc_feature (44)..(266): NCBI GI NO: 600387 NR Description: proteosome subunit [Arabidopsis thaliana]
  misc_feature (48)..(266): NCBI GI NO: 15232965 NR Description: 20S proteasome beta subunit F1
  misc_feature (54)..(243): NCBI GI NO: 14594933 NR Description: putative beta6 proteasome subunit
  misc_feature (54)..(266): NCBI GI NO: 28829610 NR Description: similar to Petunia hybrida (Petunia)
  misc_feature (54)..(266): NCBI GI NO: 17380206 NR Description: Proteasome subunit beta type 1-B
  misc_feature (54)..(266): NCBI GI NO: 17380207 NR Description: Proteasome subunit beta type 1-A
  misc_feature (54)..(266): NCBI GI NO: 4506193 NR Description: proteasome beta 1 subunit
  misc_feature (54)..(266): NCBI GI NO: 12653473 NR Description: proteasome
KKSDQRGKEARHRAPHCSTSPSPPSHELRRLHHKPPSSPPSPTTAMSRRGDWVYENNGGTCVAIAGADYCVVAADTRLSVGYNILTREHSKICELADKCVIASSGFQGDIKALQKNLAARELLYQHQHNKRMSCPAMAQLLSNTLYYKRFFPYYAFNVLGGLDSEGKGCVYSYDAVGSYERTGYSAQGSGSTLIMPVLDNQLKSPSPLLVPARDAVTPLSESEAVDLVKDVFASATERDIYTGDKVEIVVINKAGTRREYIELRKD

SEQ ID NO: 14736 - protein, 221 aa, Triticum aestivum
  peptide (1)..(221): Ceres Seq. ID no. 12598741
  misc_feature (10)..(206): Pfam Name: Pfam Description:  Proteasome A-type and B-type
  misc_feature (1)..(221): NCBI GI NO: 17380182 NR Description: Proteasome subunit beta type 1
  misc_feature (3)..(221): NCBI GI NO: 17380185 NR Description: Proteasome subunit beta type 1
  misc_feature (1)..(221): NCBI GI NO: 600387 NR Description: proteosome subunit [Arabidopsis thaliana]
  misc_feature (3)..(221): NCBI GI NO: 15232965 NR Description: 20S proteasome beta subunit F1
  misc_feature (9)..(198): NCBI GI NO: 14594933 NR Description: putative beta6 proteasome subunit
  misc_feature (9)..(221): NCBI GI NO: 28829610 NR Description: similar to Petunia hybrida (Petunia)
  misc_feature (9)..(221): NCBI GI NO: 17380206 NR Description: Proteasome subunit beta type 1-B
  misc_feature (9)..(221): NCBI GI NO: 17380207 NR Description: Proteasome subunit beta type 1-A
  misc_feature (9)..(221): NCBI GI NO: 4506193 NR Description: proteasome beta 1 subunit
  misc_feature (9)..(221): NCBI GI NO: 12653473 NR Description: proteasome
MSRRGDWVYENNGGTCVAIAGADYCVVAADTRLSVGYNILTREHSKICELADKCVIASSGFQGDIKALQKNLAARELLYQHQHNKRMSCPAMAQLLSNTLYYKRFFPYYAFNVLGGLDSEGKGCVYSYDAVGSYERTGYSAQGSGSTLIMPVLDNQLKSPSPLLVPARDAVTPLSESEAVDLVKDVFASATERDIYTGDKVEIVVINKAGTRREYIELRKD

SEQ ID NO: 14737 - protein, 135 aa, Triticum aestivum
  peptide (1)..(135): Ceres Seq. ID no. 12598742
  misc_feature (1)..(120): Pfam Name: Pfam Description:  Proteasome A-type and B-type
  misc_feature (1)..(135): NCBI GI NO: 17380182 NR Description: Proteasome subunit beta type 1
  misc_feature (1)..(135): NCBI GI NO: 17380185 NR Description: Proteasome subunit beta type 1
  misc_feature (1)..(135): NCBI GI NO: 600387 NR Description: proteosome subunit [Arabidopsis thaliana]
  misc_feature (1)..(135): NCBI GI NO: 15232965 NR Description: 20S proteasome beta subunit F1
  misc_feature (1)..(112): NCBI GI NO: 14594933 NR Description: putative beta6 proteasome subunit
  misc_feature (1)..(135): NCBI GI NO: 28829610 NR Description: similar to Petunia hybrida (Petunia)
  misc_feature (1)..(135): NCBI GI NO: 17380206 NR Description: Proteasome subunit beta type 1-B
  misc_feature (1)..(135): NCBI GI NO: 17380207 NR Description: Proteasome subunit beta type 1-A
  misc_feature (1)..(135): NCBI GI NO: 4506193 NR Description: proteasome beta 1 subunit
  misc_feature (1)..(135): NCBI GI NO: 12653473 NR Description: proteasome
MSCPAMAQLLSNTLYYKRFFPYYAFNVLGGLDSEGKGCVYSYDAVGSYERTGYSAQGSGSTLIMPVLDNQLKSPSPLLVPARDAVTPLSESEAVDLVKDVFASATERDIYTGDKVEIVVINKAGTRREYIELRKD

SEQ ID NO: 14738 - DNA, 1157 bp, Triticum aestivum
  misc_feature (1)..(1157): Ceres Seq. ID no. 13579986
aggattggagaaaagcagagtgggccgacgtcgtcgccctccgcaggtcaagctcggcagctccagctccacctcgaaaccgaagccgccgccgccgccgccggcagcggaggaggaggaggaggaggagggagatggcgtcgggcctggtgacggaggacgtgacggtggggcggctggtccggatccggcgcacggtgatgcacatgctgcgcgaccggggctacctggtggtggagcacgagctgtccatgacccgccgcgacttccagcgcaagtacggcgagtccttccaccgcgaggacatgctcatcaacaagtgcaagaagaacgaccccaacgaccagatatacgtgttcttcccgaacgacgagaaggtggggatgaagcacatcaagaagtacgtcgaaatgatgaacgccgagaaagtctccagggctatattggtcgtgcagcagaacctcaccccatttgcaaaatcgtttctccaagaactggagccaaagatccacttggaggttttccaggacgcggaaatgcttataaatatcaaggaacatgttcttgttccggagcatcaagtgcttgctaatgaggaaaagaagacgttattggcgcggtacactttaaaggaaactcagctaccaagaatacagattacagatcccattgcgaggtactacggcctcaaacgagggcaggtggtgaagatcatcaggcccagcgagacagccggcagatacgtcacatatcgctatgttgtatgacagtacacaagtgaggtgaaggtcaaggaacctaaaacatggtgatttttgcagttacacacgacacacatacccattcgcttggagaaaaacggcatcgcttcaagcaaccattcttaaggatcgcatgcctgttacgtaaaaggattcttaataagctgagtgtatggagcataagcaaaatcctcatgttgtaccattgtttcgtgaactttatagaacatacagaaccgaaactagtgtgctgagagcaatgaaaggctctgcagttctggctgctacatcatttgaacgaaccattcttgaaactccatgattctggtcctgacgttgtgtgagtgtgtgtgtgtggtggtgatatgcgtgatgaacttgtttgcaatatacccc

SEQ ID NO: 14739 - protein, 254 aa, Triticum aestivum
  peptide (1)..(254): Ceres Seq. ID no. 13579987
  misc_feature (181)..(254): Pfam Name: Pfam Description:  RNA polymerase Rpb5, C-terminal domain
  misc_feature (49)..(254): NCBI GI NO: 15228724 NR Description: DNA-directed RNA polymerase
  misc_feature (49)..(254): NCBI GI NO: 38344231 NR Description: OJ991113_30.8
  misc_feature (49)..(254): NCBI GI NO: 17507947 NR Description: RNA polymerase Rpb5
  misc_feature (58)..(253): NCBI GI NO: 1173134 NR Description: DNA-directed RNA polymerase II 23 kDa polypeptide
  misc_feature (58)..(253): NCBI GI NO: 28497750 NR Description: polymerase (RNA) II (DNA directed) polypeptide E
  misc_feature (58)..(253): NCBI GI NO: 2135016 NR Description: DNA-directed RNA polymerase (EC 2
  misc_feature (58)..(253): NCBI GI NO: 14589951 NR Description: DNA directed RNA polymerase II polypeptide E
  misc_feature (49)..(254): NCBI GI NO: 39595790 NR Description: Hypothetical protein CBG12745
  misc_feature (58)..(253): NCBI GI NO: 2896797 NR Description: RPB5_Human [Homo sapiens]
  misc_feature (58)..(253): NCBI GI NO: 19922004 NR Description: CG11979-PA [Drosophila melanogaster]
DWRKAEWADVVALRRSSSAAPAPPRNRSRRRRRRQRRRRRRRREMASGLVTEDVTVGRLVRIRRTVMHMLRDRGYLVVEHELSMTRRDFQRKYGESFHREDMLINKCKKNDPNDQIYVFFPNDEKVGMKHIKKYVEMMNAEKVSRAILVVQQNLTPFAKSFLQELEPKIHLEVFQDAEMLINIKEHVLVPEHQVLANEEKKTLLARYTLKETQLPRIQITDPIARYYGLKRGQVVKIIRPSETAGRYVTYRYVV

SEQ ID NO: 14740 - protein, 210 aa, Triticum aestivum
  peptide (1)..(210): Ceres Seq. ID no. 13579988
  misc_feature (137)..(210): Pfam Name: Pfam Description:  RNA polymerase Rpb5, C-terminal domain
  misc_feature (5)..(210): NCBI GI NO: 15228724 NR Description: DNA-directed RNA polymerase
  misc_feature (5)..(210): NCBI GI NO: 38344231 NR Description: OJ991113_30.8
  misc_feature (5)..(210): NCBI GI NO: 17507947 NR Description: RNA polymerase Rpb5
  misc_feature (14)..(209): NCBI GI NO: 1173134 NR Description: DNA-directed RNA polymerase II 23 kDa polypeptide
  misc_feature (14)..(209): NCBI GI NO: 28497750 NR Description: polymerase (RNA) II (DNA directed) polypeptide E
  misc_feature (14)..(209): NCBI GI NO: 2135016 NR Description: DNA-directed RNA polymerase (EC 2
  misc_feature (14)..(209): NCBI GI NO: 14589951 NR Description: DNA directed RNA polymerase II polypeptide E
  misc_feature (5)..(210): NCBI GI NO: 39595790 NR Description: Hypothetical protein CBG12745
  misc_feature (14)..(209): NCBI GI NO: 2896797 NR Description: RPB5_Human [Homo sapiens]
  misc_feature (14)..(209): NCBI GI NO: 19922004 NR Description: CG11979-PA [Drosophila melanogaster]
MASGLVTEDVTVGRLVRIRRTVMHMLRDRGYLVVEHELSMTRRDFQRKYGESFHREDMLINKCKKNDPNDQIYVFFPNDEKVGMKHIKKYVEMMNAEKVSRAILVVQQNLTPFAKSFLQELEPKIHLEVFQDAEMLINIKEHVLVPEHQVLANEEKKTLLARYTLKETQLPRIQITDPIARYYGLKRGQVVKIIRPSETAGRYVTYRYVV

SEQ ID NO: 14741 - protein, 196 aa, Triticum aestivum
  peptide (1)..(196): Ceres Seq. ID no. 13579989
GLEKSRVGRRRRPPQVKLGSSSSTSKPKPPPPPPAAEEEEEEEGDGVGPGDGGRDGGAAGPDPAHGDAHAARPGLPGGGARAVHDPPRLPAQVRRVLPPRGHAHQQVQEERPQRPDIRVLPERREGGDEAHQEVRRNDERRESLQGYIGRAAEPHPICKIVSPRTGAKDPLGGFPGRGNAYKYQGTCSCSGASSAC

SEQ ID NO: 14742 - DNA, 1164 bp, Triticum aestivum
  misc_feature (1)..(1164): Ceres Seq. ID no. 15173077
atcatccacacatacgaacacacacaacattgtcatttagttgttcttgcttgctgctgctgaaatacctgcatgctagcatcccctgctcagaagaaacagaggtctggaggtctgtcttttcatcctggttttgttattggttcgtcgaggagaagatagtttcttggaggtgcaagctaggcgctgaggaggtcggacatggaggatgtggccaagttcttgtttgggatttccgggaatgtcattgctctatttctcttcctatccccggtgcctactttctggaggatcattcggaacaaatccacagaggaattctccggggtgccatacaacatgacgctcctcaactgcctcctctccgcctggtacgggctgccgttcgtgtccccgaacaacgtcctggtgtcgacgatcaacggcgtgggcgcggcgatcgagacggtgtacgtggtgatcttcctcgtcttcgcgtcgaacaagaaggcgaggctccggacgctcggcctggcgtcggccgtcgcgacggtgttcgcggtcgtggcgctcgtctcgatgctcgtcctgcacggcccggcacgcaagctcctcgccggcctcgccatgaccgtcttctccatctgcatgtacgcctcgcccctctccatcatgaggatggtgatcaagacgaagagcgtggagtacatgccgttcctgctgtcgctggcggtgttcctgtgcggcacgtcgtggttcatttacggcttgctcggccacgacctcttcgtcacgatccccaacgggtgcgggagcgtcctgggcgccgcgcagctcatcctttacgccatctaccggaacaacaagggcaacgccgcggccggcgctggcaagctacagggcgacgacgtggagatgtccgtcgacggcaggaacggcaaggtcgccgatagcgacgatcgcggtgcggcggggtcgacgaagaccggcaagatggtcggccaggtttagctagatcggtcgaagatcagccatattatgtgctttttctaccagtatcttgttactgcaagaatcccgcgtgttggccttgcgtaattagccaatataggactagcctttaattgccaccttgtacctgtttgtaagctatgtattgcatacgtgtactaatgtctcaagctg

SEQ ID NO: 14743 - protein, 309 aa, Triticum aestivum
  peptide (1)..(309): Ceres Seq. ID no. 15173078
HPHIRTHTTLSFSCSCLLLLKYLHASIPCSEETEVWRSVFSSWFCYWFVEEKIVSWRCKLGAEEVGHGGCGQVLVWDFRECHCSISLPIPGAYFLEDHSEQIHRGILRGAIQHDAPQLPPLRLVRAAVRVPEQRPGVDDQRRGRGDRDGVRGDLPRLRVEQEGEAPDARPGVGRRDGVRGRGARLDARPARPGTQAPRRPRHDRLLHLHVRLAPLHHEDGDQDEERGVHAVPAVAGGVPVRHVVVHLRLARPRPLRHDPQRVRERPGRRAAHPLRHLPEQQGQRRGRRWQATGRRRGDVRRRQERQGRR

SEQ ID NO: 14744 - protein, 262 aa, Triticum aestivum
  peptide (1)..(262): Ceres Seq. ID no. 15173079
  misc_feature (7)..(95): Pfam Name: Pfam Description:  MtN3/saliva family
  misc_feature (1)..(262): NCBI GI NO: 34907420 NR Description: P0018C10.36
  misc_feature (3)..(243): NCBI GI NO: 18394992 NR Description: nodulin MtN3 family protein [Arabidopsis thaliana]
  misc_feature (47)..(243): NCBI GI NO: 25518644 NR Description: hypothetical protein F24J8
  misc_feature (3)..(211): NCBI GI NO: 34912454 NR Description: P0681B11.31
  misc_feature (3)..(252): NCBI GI NO: 34912462 NR Description: MtN3-like protein
  misc_feature (8)..(215): NCBI GI NO: 18413388 NR Description: nodulin MtN3 family protein [Arabidopsis thaliana]
  misc_feature (4)..(214): NCBI GI NO: 18400517 NR Description: nodulin MtN3 family protein [Arabidopsis thaliana]
  misc_feature (1)..(211): NCBI GI NO: 18421965 NR Description: nodulin MtN3 family protein [Arabidopsis thaliana]
  misc_feature (3)..(215): NCBI GI NO: 15234863 NR Description: nodulin MtN3 family protein [Arabidopsis thaliana]
  misc_feature (7)..(214): NCBI GI NO: 15240040 NR Description: nodulin MtN3 family protein [Arabidopsis thaliana]
MEDVAKFLFGISGNVIALFLFLSPVPTFWRIIRNKSTEEFSGVPYNMTLLNCLLSAWYGLPFVSPNNVLVSTINGVGAAIETVYVVIFLVFASNKKARLRTLGLASAVATVFAVVALVSMLVLHGPARKLLAGLAMTVFSICMYASPLSIMRMVIKTKSVEYMPFLLSLAVFLCGTSWFIYGLLGHDLFVTIPNGCGSVLGAAQLILYAIYRNNKGNAAAGAGKLQGDDVEMSVDGRNGKVADSDDRGAAGSTKTGKMVGQV

SEQ ID NO: 14745 - protein, 216 aa, Triticum aestivum
  peptide (1)..(216): Ceres Seq. ID no. 15173080
  misc_feature (1)..(216): NCBI GI NO: 34907420 NR Description: P0018C10.36
  misc_feature (1)..(197): NCBI GI NO: 18394992 NR Description: nodulin MtN3 family protein [Arabidopsis thaliana]
  misc_feature (1)..(197): NCBI GI NO: 25518644 NR Description: hypothetical protein F24J8
  misc_feature (1)..(165): NCBI GI NO: 34912454 NR Description: P0681B11.31
  misc_feature (1)..(206): NCBI GI NO: 34912462 NR Description: MtN3-like protein
  misc_feature (1)..(169): NCBI GI NO: 18413388 NR Description: nodulin MtN3 family protein [Arabidopsis thaliana]
  misc_feature (1)..(168): NCBI GI NO: 18400517 NR Description: nodulin MtN3 family protein [Arabidopsis thaliana]
  misc_feature (1)..(165): NCBI GI NO: 18421965 NR Description: nodulin MtN3 family protein [Arabidopsis thaliana]
  misc_feature (1)..(169): NCBI GI NO: 15234863 NR Description: nodulin MtN3 family protein [Arabidopsis thaliana]
  misc_feature (1)..(168): NCBI GI NO: 15240040 NR Description: nodulin MtN3 family protein [Arabidopsis thaliana]
MTLLNCLLSAWYGLPFVSPNNVLVSTINGVGAAIETVYVVIFLVFASNKKARLRTLGLASAVATVFAVVALVSMLVLHGPARKLLAGLAMTVFSICMYASPLSIMRMVIKTKSVEYMPFLLSLAVFLCGTSWFIYGLLGHDLFVTIPNGCGSVLGAAQLILYAIYRNNKGNAAAGAGKLQGDDVEMSVDGRNGKVADSDDRGAAGSTKTGKMVGQV

SEQ ID NO: 14746 - DNA, 927 bp, Triticum aestivum
  misc_feature (1)..(927): Ceres Seq. ID no. 15226980
atttccattcgcatccccggctagccaaccctgttctcccgctcgcgcatctcaggctcctgcgttgcaggaaggaactcactcaagtatggacgccctctcctgctttgcgccgcctgcgatgctctcccggtcctttgcggacgcggccatcgcgcgcgcgctccacttctctccctcggccggctgctcccccgtcccggagccgtccatcgtcgccgacctcggcgcctgcagcgcggcagccacgacggcctcgtcctcctcctgcggccccgtggcgatgcttcccccggcggcaccgtccgcgcgttgcaggctgggacccgcgggcggccgcgcggggaagcgccggccgcggccgtccaagcgcgtgcccaccacgtacataaacaccgacgcggcaaccttccgtctcatggtgcagcacgtcaccggcgccgaggccgagccgcaggtcgacgccgacgccggcctcggtgtcctcctgtcgcccttcgactttgatcacttgctaccgtcggaccctgcggcggccgcggcccaagtcgccgcgtacgcccttccggcggcggcggcagagcagccgtgcttcccgacgctggactcgtggaacgtcatgtacgacaagaactaggtgactttgggtcgaaactgaagctctaggctctgtataaacatcatgcagcaagatgaaggcgccgttgcgtctggcttgtgatgtattgctccctttggtcgttgcagagcagtaggagaggattagagatgtagtagtagtgctgtatgcaagtgcgagtaccaccagactaccagtatagcacgcactagcagtgtaggaatgcagaggtgctccttggtctcctcgccggttgcactcgctgcttcaacttaggtagttcaatctgcctgttcttggttcttgcc

SEQ ID NO: 14747 - protein, 211 aa, Triticum aestivum
  peptide (1)..(211): Ceres Seq. ID no. 15226981
  misc_feature (123)..(151): Pfam Name: Pfam Description:  VQ motif
  misc_feature (82)..(209): NCBI GI NO: 22324429 NR Description: unknown protein
  misc_feature (83)..(205): NCBI GI NO: 18403283 NR Description: expressed protein [Arabidopsis thaliana]
FPFASPASQPCSPARASQAPALQEGTHSSMDALSCFAPPAMLSRSFADAAIARALHFSPSAGCSPVPEPSIVADLGACSAAATTASSSSCGPVAMLPPAAPSARCRLGPAGGRAGKRRPRPSKRVPTTYINTDAATFRLMVQHVTGAEAEPQVDADAGLGVLLSPFDFDHLLPSDPAAAAAQVAAYALPAAAAEQPCFPTLDSWNVMYDKN

SEQ ID NO: 14748 - protein, 182 aa, Triticum aestivum
  peptide (1)..(182): Ceres Seq. ID no. 15226982
  misc_feature (94)..(122): Pfam Name: Pfam Description:  VQ motif
  misc_feature (53)..(180): NCBI GI NO: 22324429 NR Description: unknown protein
  misc_feature (54)..(176): NCBI GI NO: 18403283 NR Description: expressed protein [Arabidopsis thaliana]
MDALSCFAPPAMLSRSFADAAIARALHFSPSAGCSPVPEPSIVADLGACSAAATTASSSSCGPVAMLPPAAPSARCRLGPAGGRAGKRRPRPSKRVPTTYINTDAATFRLMVQHVTGAEAEPQVDADAGLGVLLSPFDFDHLLPSDPAAAAAQVAAYALPAAAAEQPCFPTLDSWNVMYDKN

SEQ ID NO: 14749 - protein, 171 aa, Triticum aestivum
  peptide (1)..(171): Ceres Seq. ID no. 15226983
  misc_feature (83)..(111): Pfam Name: Pfam Description:  VQ motif
  misc_feature (42)..(169): NCBI GI NO: 22324429 NR Description: unknown protein
  misc_feature (43)..(165): NCBI GI NO: 18403283 NR Description: expressed protein [Arabidopsis thaliana]
MLSRSFADAAIARALHFSPSAGCSPVPEPSIVADLGACSAAATTASSSSCGPVAMLPPAAPSARCRLGPAGGRAGKRRPRPSKRVPTTYINTDAATFRLMVQHVTGAEAEPQVDADAGLGVLLSPFDFDHLLPSDPAAAAAQVAAYALPAAAAEQPCFPTLDSWNVMYDKN

SEQ ID NO: 14750 - DNA, 809 bp, Triticum aestivum
  misc_feature (1)..(809): Ceres Seq. ID no. 15173178
aaaacacgcattctcgccactggcaggctctctccctaacgccaggcccactgctaactcttcccacccttctcttctccatcacgagcgccggcggcggctggtagagaggcgagccgagaggtgcggctacgagcggaagaggcgaggagctcgagcgagcgatggggcggaggatcctcaacgacgcgctgcgcacgatggtgaacgcggagcggcgggggaaggcgacggcgcaactccagcccatctccggcgtcatgatctccttccttaacatcatgaagcaccgaggttacataaaaaatttcgaggtctttgatccacatagggttggaaaaatcaccgtggaacttcagggaaggattaaagattgcaaagctctcacttacaggcaggacctcagagctacggaaatagaaaaatacagaactaggatgcttccaacacggcagtggggctatgttgtggtgaccaccccaaatggcgttttagatcacgaggaagcaattaggcagaatgtgggtggccaggtcctcggttacttccattgagaaggaaaacacagttatcccatgctgagtcagctctgggttgcattttattttgttatgatgactgaagtcattttattttgacatttagagcttgctgcttttgttcatggccagcagaaaatgcgattacatctcagaagtatgtctcgcaacactgacataaatattgtaatccttctttgggacaggtatttctgtaggtgtaatacacccatgtacttcgagatacacgagtaaagctctagtttgagc

SEQ ID NO: 14751 - protein, 129 aa, Triticum aestivum
  peptide (1)..(129): Ceres Seq. ID no. 15173179
  misc_feature (6)..(129): Pfam Name: Pfam Description:  Ribosomal protein S8
  misc_feature (1)..(129): NCBI GI NO: 15233571 NR Description: 40S ribosomal protein S15A (RPS15aE)
  misc_feature (1)..(129): NCBI GI NO: 15224834 NR Description: 40S ribosomal protein S15A (RPS15aB)
  misc_feature (5)..(129): NCBI GI NO: 28411802 NR Description: ribosomal protein S15
  misc_feature (5)..(129): NCBI GI NO: 13560779 NR Description: cytoplasmic ribosomal protein S15a [Daucus carota]
  misc_feature (5)..(129): NCBI GI NO: 133793 NR Description: 40S RIBOSOMAL PROTEIN S15A (PPCB8)
  misc_feature (5)..(129): NCBI GI NO: 15223001 NR Description: 40S ribosomal protein S15A (RPS15aA)
  misc_feature (1)..(129): NCBI GI NO: 15225502 NR Description: 40S ribosomal protein S15A (RPS15aC)
  misc_feature (5)..(129): NCBI GI NO: 6683481 NR Description: wrp15a [Citrullus lanatus]
  misc_feature (5)..(129): NCBI GI NO: 15231316 NR Description: 40S ribosomal protein S15A (RPS15aD)
  misc_feature (5)..(129): NCBI GI NO: 2130985 NR Description: r-protein BnS15a [Brassica napus]
MGRRILNDALRTMVNAERRGKATAQLQPISGVMISFLNIMKHRGYIKNFEVFDPHRVGKITVELQGRIKDCKALTYRQDLRATEIEKYRTRMLPTRQWGYVVVTTPNGVLDHEEAIRQNVGGQVLGYFH

SEQ ID NO: 14752 - protein, 117 aa, Triticum aestivum
  peptide (1)..(117): Ceres Seq. ID no. 15173180
  misc_feature (1)..(117): Pfam Name: Pfam Description:  Ribosomal protein S8
  misc_feature (1)..(117): NCBI GI NO: 15233571 NR Description: 40S ribosomal protein S15A (RPS15aE)
  misc_feature (1)..(117): NCBI GI NO: 15224834 NR Description: 40S ribosomal protein S15A (RPS15aB)
  misc_feature (1)..(117): NCBI GI NO: 28411802 NR Description: ribosomal protein S15
  misc_feature (1)..(117): NCBI GI NO: 13560779 NR Description: cytoplasmic ribosomal protein S15a [Daucus carota]
  misc_feature (1)..(117): NCBI GI NO: 133793 NR Description: 40S RIBOSOMAL PROTEIN S15A (PPCB8)
  misc_feature (1)..(117): NCBI GI NO: 15223001 NR Description: 40S ribosomal protein S15A (RPS15aA)
  misc_feature (1)..(117): NCBI GI NO: 15225502 NR Description: 40S ribosomal protein S15A (RPS15aC)
  misc_feature (1)..(117): NCBI GI NO: 6683481 NR Description: wrp15a [Citrullus lanatus]
  misc_feature (1)..(117): NCBI GI NO: 15231316 NR Description: 40S ribosomal protein S15A (RPS15aD)
  misc_feature (1)..(117): NCBI GI NO: 2130985 NR Description: r-protein BnS15a [Brassica napus]
MVNAERRGKATAQLQPISGVMISFLNIMKHRGYIKNFEVFDPHRVGKITVELQGRIKDCKALTYRQDLRATEIEKYRTRMLPTRQWGYVVVTTPNGVLDHEEAIRQNVGGQVLGYFH

SEQ ID NO: 14753 - protein, 97 aa, Triticum aestivum
  peptide (1)..(97): Ceres Seq. ID no. 15173181
  misc_feature (1)..(97): Pfam Name: Pfam Description:  Ribosomal protein S8
  misc_feature (1)..(97): NCBI GI NO: 15233571 NR Description: 40S ribosomal protein S15A (RPS15aE)
  misc_feature (1)..(97): NCBI GI NO: 15224834 NR Description: 40S ribosomal protein S15A (RPS15aB)
  misc_feature (1)..(97): NCBI GI NO: 28411802 NR Description: ribosomal protein S15
  misc_feature (1)..(97): NCBI GI NO: 13560779 NR Description: cytoplasmic ribosomal protein S15a [Daucus carota]
  misc_feature (1)..(97): NCBI GI NO: 133793 NR Description: 40S RIBOSOMAL PROTEIN S15A (PPCB8)
  misc_feature (1)..(97): NCBI GI NO: 15223001 NR Description: 40S ribosomal protein S15A (RPS15aA)
  misc_feature (1)..(97): NCBI GI NO: 15225502 NR Description: 40S ribosomal protein S15A (RPS15aC)
  misc_feature (1)..(97): NCBI GI NO: 6683481 NR Description: wrp15a [Citrullus lanatus]
  misc_feature (1)..(97): NCBI GI NO: 15231316 NR Description: 40S ribosomal protein S15A (RPS15aD)
  misc_feature (1)..(97): NCBI GI NO: 2130985 NR Description: r-protein BnS15a [Brassica napus]
MISFLNIMKHRGYIKNFEVFDPHRVGKITVELQGRIKDCKALTYRQDLRATEIEKYRTRMLPTRQWGYVVVTTPNGVLDHEEAIRQNVGGQVLGYFH

SEQ ID NO: 14754 - DNA, 1045 bp, Triticum aestivum
  misc_feature (1)..(1045): Ceres Seq. ID no. 13597213
attctcatttcccctgcttccagaacaccaccactccccacggacgactcttctcgccgcgcaaaccctagctagctaaatctcccatggcgacggcgaggctgcgatccgcgtcggcgtcctccctccgcgggatcctcctccgccactgctccgcgcccccgcgcgccgtctcagattttcaggttcctggatctgcaacatggaggcatttctcaacatgcaggcctaaccctcttgcaaaagggaacagctttggctcaatggcttctctgtacagccagacaagatgggcttctcaagccactgctgtgaaagaaactgaccccagtggcggcaagataagcattgggcccaaatccaagcagatcaaggaggaggacaaagatgatggactggtttatcagggaccgatatcatcaaccatcaagaaagtgaagcttctgtccctgtccacctgctgcctctctgtgtcgctaggccctgtcataacgttcatgacttcgcccgacatgaatgtgatcctcaagggaggagtcgcatccaccgtgatcttcctcagtgccacaacaaccgcagccctgcactggttcgtgagcccctacatccacaagctgagatggaggcagggttcagatagcttcgaggcggagataatgtcatggctggctacacccctgaagaagacgatcaagtttgctgacatcaggcccgcagagactaaccggcctttcgtcaccttcagggccgacgggaacttctacttcgtcgacgccgaccacttccccaacaaggccttgctggagaggctcacgcctaagctccccaacgagtccgcgttcaagaacttgtgatggaagctactgttttgcccgcattcgtgctcttgaacctggctgagctatcgagtcctttttcctgtagctaatacttgtgagaatttgtggtataaggtatcgccgttgtttttagttcagtacggagatttgtgaatcgctggcgtggaatatttttaactcctggacgattttgaataagtagcagc

SEQ ID NO: 14755 - protein, 255 aa, Triticum aestivum
  peptide (1)..(255): Ceres Seq. ID no. 13597214
  misc_feature (1)..(255): NCBI GI NO: 29126334 NR Description: unknown protein
  misc_feature (65)..(255): NCBI GI NO: 18403955 NR Description: expressed protein [Arabidopsis thaliana]
MATARLRSASASSLRGILLRHCSAPPRAVSDFQVPGSATWRHFSTCRPNPLAKGNSFGSMASLYSQTRWASQATAVKETDPSGGKISIGPKSKQIKEEDKDDGLVYQGPISSTIKKVKLLSLSTCCLSVSLGPVITFMTSPDMNVILKGGVASTVIFLSATTTAALHWFVSPYIHKLRWRQGSDSFEAEIMSWLATPLKKTIKFADIRPAETNRPFVTFRADGNFYFVDADHFPNKALLERLTPKLPNESAFKNL

SEQ ID NO: 14756 - protein, 196 aa, Triticum aestivum
  peptide (1)..(196): Ceres Seq. ID no. 13597215
  misc_feature (1)..(196): NCBI GI NO: 29126334 NR Description: unknown protein
  misc_feature (6)..(196): NCBI GI NO: 18403955 NR Description: expressed protein [Arabidopsis thaliana]
MASLYSQTRWASQATAVKETDPSGGKISIGPKSKQIKEEDKDDGLVYQGPISSTIKKVKLLSLSTCCLSVSLGPVITFMTSPDMNVILKGGVASTVIFLSATTTAALHWFVSPYIHKLRWRQGSDSFEAEIMSWLATPLKKTIKFADIRPAETNRPFVTFRADGNFYFVDADHFPNKALLERLTPKLPNESAFKNL

SEQ ID NO: 14757 - DNA, 690 bp, Triticum aestivum
  misc_feature (1)..(690): Ceres Seq. ID no. 12617479
cgattctccgctcgcctgctctgctccgccgcctctctggaaaaaaacacacaggtggcactgaataatagacaaggatggcttctactggcgtgaaagatttctaccggcagaagaagaaaggaggtgttggcaaaacttcagcatcttctaagaagaaaacacagaattacactggaggggcctctgttggggcctcaaataaggctcagacagcagcactaatttctcacggatccttagacctcagagatgatttcagtgagcaagaggagcagctgcggcagtttgacatggacatgaagtttggcccgtgcatcggtgtcaaccggcttcagcgctgggagcgtgcttccgccatgggcctccagccaccgccccaccttcgtgatctcctagcgcgcgcctcctccggaaacaaccgcaacaacggcggcccctcccctgaatgcctctgggagggtaagatctagaatcaaatttcttccgccgcaagtgctccttggcaacctagcatggcttgcctactgtagtctgaaactctgagcccgttttaccacgcggaactcctgctgttgcaccgtatccttggttgtttgcttatcagatgttgctacctcaactcctgcgagtgtcatcttcagtttgccgaaaaaaaaaaaaaaaaaagcttatcgataccgtcgacct

SEQ ID NO: 14758 - protein, 131 aa, Triticum aestivum
  peptide (1)..(131): Ceres Seq. ID no. 12617480
  misc_feature (1)..(131): NCBI GI NO: 18391073 NR Description: Expressed protein; protein id: At1g09815
  misc_feature (1)..(131): NCBI GI NO: 21594051 NR Description: unknown [Arabidopsis thaliana]
  misc_feature (64)..(131): NCBI GI NO: 34905320 NR Description: OJ9990_A01.8
  misc_feature (58)..(116): NCBI GI NO: 10863969 NR Description: polymerase
  misc_feature (42)..(107): NCBI GI NO: 34861401 NR Description: similar to DNA polymerase delta subunit 4
  misc_feature (42)..(107): NCBI GI NO: 21312396 NR Description: small subunit DNA polymerase delta p12
MASTGVKDFYRQKKKGGVGKTSASSKKKTQNYTGGASVGASNKAQTAALISHGSLDLRDDFSEQEEQLRQFDMDMKFGPCIGVNRLQRWERASAMGLQPPPHLRDLLARASSGNNRNNGGPSPECLWEGKI

SEQ ID NO: 14759 - DNA, 704 bp, Triticum aestivum
  misc_feature (1)..(704): Ceres Seq. ID no. 13655766
gataggaacaggcggaaccgtagacgaagcctcggacggaacgatacagagaagcctcggaaggggagcgatcggaaggggagggcggagagatggggatccggttcgtgctgctggtgaacaagcaggggcagacgcggctggcgcagtactacgagcacctctccctcgacgagcgccgcgccctcgagggcgagatcgtccgcaagtgcctcgcccgcaccgaccagcagtgctctttcgtggagcaccggaactacaaggtcgtctaccggcgctacgcctccctcttcttcctcgtcggcgtcgacaacgatgagaatgagttagccatccttgaattcatacatcttctcgtggaaaccatggaccgtcactttggcaacgtgtgtgagcttgacatcatgttccatctggagaaagtccacttcatgcttgaagagatggtgatgaatggttgcatcgtggagacgagcaaacagaacatattggcgcccatccagcttatggagaaaacctcgtaaatagtgtgtgaactcaagagcgcctaggtgatgcttagcctcttcctcccgccttcaccatagattcccccgttgtgtgaggagaaatgccgaacaactgctgtatgcatgggtggctgtgttcacccgactggaaaatgtgaaatgttctgtaatgttgaaaatgaagaccccatcatt

SEQ ID NO: 14760 - protein, 143 aa, Triticum aestivum
  peptide (1)..(143): Ceres Seq. ID no. 13655767
  misc_feature (2)..(143): Pfam Name: Pfam Description:  Clathrin adaptor complex small chain
  misc_feature (1)..(143): NCBI GI NO: 40253273 NR Description: putative clathrin coat assembly protein AP17
  misc_feature (1)..(143): NCBI GI NO: 37533546 NR Description: putative clathrin assembly protein
  misc_feature (1)..(141): NCBI GI NO: 15224841 NR Description: clathrin assembly protein -related
  misc_feature (3)..(143): NCBI GI NO: 23510210 NR Description: clathrin assembly protein, putative
  misc_feature (3)..(143): NCBI GI NO: 23482798 NR Description: putative clathrin assembly protein
  misc_feature (3)..(143): NCBI GI NO: 13431288 NR Description: Adapter-related protein complex 4 sigma 1 subunit
  misc_feature (3)..(143): NCBI GI NO: 17998681 NR Description: adaptor-related protein complex AP-4, sigma 1
  misc_feature (3)..(141): NCBI GI NO: 26788038 NR Description: SI:dZ234G15
  misc_feature (1)..(136): NCBI GI NO: 19114322 NR Description: putative clathrin-associated protein
  misc_feature (3)..(142): NCBI GI NO: 37544043 NR Description: similar to adaptor-related protein complex 1 sigma2 subunit
MGIRFVLLVNKQGQTRLAQYYEHLSLDERRALEGEIVRKCLARTDQQCSFVEHRNYKVVYRRYASLFFLVGVDNDENELAILEFIHLLVETMDRHFGNVCELDIMFHLEKVHFMLEEMVMNGCIVETSKQNILAPIQLMEKTS

SEQ ID NO: 14761 - protein, 105 aa, Triticum aestivum
  peptide (1)..(105): Ceres Seq. ID no. 13655768
IGTGGTVDEASDGTIQRSLGRGAIGRGGRRDGDPVRAAGEQAGADAAGAVLRAPLPRRAPRPRGRDRPQVPRPHRPAVLFRGAPELQGRLPALRLPLLPRRRRQR

SEQ ID NO: 14762 - DNA, 1334 bp, Triticum aestivum
  misc_feature (1)..(1334): Ceres Seq. ID no. 13598735
cccccctcccgttcsaacawwattgcaagcgattgcwgccaaacaggtcgatttcgaccgatctcctccgcatatgtggttctctgctgcccttgccgcttctcctcccacccaccttgtcctcgcgcgcacggggaaacgacgccggtgagatggctcctccccgcacggtgatctgcgtgggtgacgtccacggctacatctccaagctggagagcctgtgggcgaacctccagtccgcgctccccgccgacgccttcgccgccgcgctcgtcatcttcctcggggactacaacgaccgcggcccggacacccgccgcgtcctcgacttcctcctcgcgctcccggcccgccacccggctcagcgccacgtcttcctctgcggcaaccacgacctcgccttcgccgccttcgtcggagcgctgccgccgccccccgacggttcccctttcgccgccacctgggaccaatacatcgacaatgaggcccacgagggctggttccgcgggccggggcacgaggatatgcacgtgcaggggaggagatggggcggcgtcatcaaggagaggtggaaccccaagaagggcctcccgtacaagggctctatctacgatgcgcagcccaccttcgagtcctacggcgtcgcccatggatcaccagatctcatgaaagctgtgcctgaggagcacaagaagtttctgcatgacttggtttgggtccatgaagaggaagacgttcgtattgatacagatggaggccagattctatgcaaactgatcgcggttcatgccggcctggaaaagtccttggatttgaatgagcagcttagagttttgagaactagagacacaagggtgccaaaagttcaaatgcttagcgggaggcaggatgtttggaacataccacaggatctggccggcaagcagaccatcgttgtaagtgggcatcatgggaagctccacgtggacggtctcaggttcatcatcgacgaaggtggcgggtacgcagataaacctatagcggccgttgttttcccttcaaagtgatcaggagcacagagggaacggcctcccagaattaatctagacaccatcggaaatgcaagatatttttttttgttactgtcgtaacatgagcaattggacgactggtatgthcatctgccaaaatggagtataatatttcaaaaaacacagaattggggttttaatgtataatgtcgaggaaataagtcaaaaaaaaaaaaaaaaaaaaaaaaaaaaaaaaaaaaaaaaaaaaataaaaaaaaaaaaaaaaaagcttatcgataccgtcracctcragggggggcccgg

SEQ ID NO: 14763 - protein, 347 aa, Triticum aestivum
  peptide (1)..(347): Ceres Seq. ID no. 15222412
  misc_feature (55)..(319): Pfam Name: Pfam Description:  Calcineurin-like phosphoesterase
  misc_feature (53)..(347): NCBI GI NO: 38347604 NR Description: OSJNBa0042I15.17
  misc_feature (54)..(347): NCBI GI NO: 18398699 NR Description: calcineurin-like phosphoesterase family
  misc_feature (54)..(347): NCBI GI NO: 21618122 NR Description: unknown [Arabidopsis thaliana]
  misc_feature (54)..(347): NCBI GI NO: 6143880 NR Description: unknown protein [Arabidopsis thaliana]
  misc_feature (54)..(347): NCBI GI NO: 18398696 NR Description: calcineurin-like phosphoesterase family
  misc_feature (208)..(347): NCBI GI NO: 19424085 NR Description: unknown protein [Arabidopsis thaliana]
  misc_feature (60)..(147): NCBI GI NO: 13475753 NR Description: serine/threonine protein phosphatase
  misc_feature (37)..(138): NCBI GI NO: 17937249 NR Description: serine/threonine protein phosphatase I
  misc_feature (5)..(5): Xaa is any aa, unknown or other
  misc_feature (6)..(6): Xaa is any aa, unknown or other
  misc_feature (7)..(7): Xaa is any aa, unknown or other
  misc_feature (12)..(12): Xaa is any aa, unknown or other
PLPFXXXCKRLXPNRSISTDLLRICGSLLPLPLLLPPTLSSRARGNDAGEMAPPRTVICVGDVHGYISKLESLWANLQSALPADAFAAALVIFLGDYNDRGPDTRRVLDFLLALPARHPAQRHVFLCGNHDLAFAAFVGALPPPPDGSPFAATWDQYIDNEAHEGWFRGPGHEDMHVQGRRWGGVIKERWNPKKGLPYKGSIYDAQPTFESYGVAHGSPDLMKAVPEEHKKFLHDLVWVHEEEDVRIDTDGGQILCKLIAVHAGLEKSLDLNEQLRVLRTRDTRVPKVQMLSGRQDVWNIPQDLAGKQTIVVSGHHGKLHVDGLRFIIDEGGGYADKPIAAVVFPSK

SEQ ID NO: 14764 - protein, 297 aa, Triticum aestivum
  peptide (1)..(297): Ceres Seq. ID no. 15222413
  misc_feature (5)..(269): Pfam Name: Pfam Description:  Calcineurin-like phosphoesterase
  misc_feature (3)..(297): NCBI GI NO: 38347604 NR Description: OSJNBa0042I15.17
  misc_feature (4)..(297): NCBI GI NO: 18398699 NR Description: calcineurin-like phosphoesterase family
  misc_feature (4)..(297): NCBI GI NO: 21618122 NR Description: unknown [Arabidopsis thaliana]
  misc_feature (4)..(297): NCBI GI NO: 6143880 NR Description: unknown protein [Arabidopsis thaliana]
  misc_feature (4)..(297): NCBI GI NO: 18398696 NR Description: calcineurin-like phosphoesterase family
  misc_feature (158)..(297): NCBI GI NO: 19424085 NR Description: unknown protein [Arabidopsis thaliana]
  misc_feature (10)..(97): NCBI GI NO: 13475753 NR Description: serine/threonine protein phosphatase
  misc_feature (1)..(88): NCBI GI NO: 17937249 NR Description: serine/threonine protein phosphatase I
MAPPRTVICVGDVHGYISKLESLWANLQSALPADAFAAALVIFLGDYNDRGPDTRRVLDFLLALPARHPAQRHVFLCGNHDLAFAAFVGALPPPPDGSPFAATWDQYIDNEAHEGWFRGPGHEDMHVQGRRWGGVIKERWNPKKGLPYKGSIYDAQPTFESYGVAHGSPDLMKAVPEEHKKFLHDLVWVHEEEDVRIDTDGGQILCKLIAVHAGLEKSLDLNEQLRVLRTRDTRVPKVQMLSGRQDVWNIPQDLAGKQTIVVSGHHGKLHVDGLRFIIDEGGGYADKPIAAVVFPSK

SEQ ID NO: 14765 - protein, 173 aa, Triticum aestivum
  peptide (1)..(173): Ceres Seq. ID no. 15222414
  misc_feature (1)..(145): Pfam Name: Pfam Description:  Calcineurin-like phosphoesterase
  misc_feature (1)..(173): NCBI GI NO: 38347604 NR Description: OSJNBa0042I15.17
  misc_feature (1)..(173): NCBI GI NO: 18398699 NR Description: calcineurin-like phosphoesterase family
  misc_feature (1)..(173): NCBI GI NO: 21618122 NR Description: unknown [Arabidopsis thaliana]
  misc_feature (1)..(173): NCBI GI NO: 6143880 NR Description: unknown protein [Arabidopsis thaliana]
  misc_feature (1)..(173): NCBI GI NO: 18398696 NR Description: calcineurin-like phosphoesterase family
  misc_feature (34)..(173): NCBI GI NO: 19424085 NR Description: unknown protein [Arabidopsis thaliana]
MHVQGRRWGGVIKERWNPKKGLPYKGSIYDAQPTFESYGVAHGSPDLMKAVPEEHKKFLHDLVWVHEEEDVRIDTDGGQILCKLIAVHAGLEKSLDLNEQLRVLRTRDTRVPKVQMLSGRQDVWNIPQDLAGKQTIVVSGHHGKLHVDGLRFIIDEGGGYADKPIAAVVFPSK

SEQ ID NO: 14766 - DNA, 657 bp, Triticum aestivum
  misc_feature (1)..(657): Ceres Seq. ID no. 12598184
gaaaaaaaaatcccaaacccaaagcactagctatattactctagcacaccacacaatcacaatggcatgcaaagctgccatcttcgtcgcgctgagcctcctcctctccgccgtcgccgccaacggctgcggaagcacctattgccaaccgccggtcgtcgtgccgacaccacccgtcgtcgttccgccgccataccatggaggaggagggcacggccacggccacggccacggagggcagtgctccatcaacgtgctcaacctgagggtgtgcgccaacgttctcggtggactgctcggcctcaagatcggcgttccggcgcgcgaccagtgctgcccgctgctccaggggttggccgacctcgacgccgccgtctgcctctgcaccgccgtcagggccaacatcctcggcctccacctcaacgtgcctgtggacatcagcctcctcctcaaccactgcggcaagacgtgcccgtctggtttcatttgcccagcccattaacggacgtattgttgcatgggctccgaataagatttgccttccgtactttgtttttttatttcatcaaatgtggatctgttccactcccacatttcaattgtgtaaccagtactacttttgttttttggcaaacagagcatatactcttcgtattg

SEQ ID NO: 14767 - protein, 197 aa, Triticum aestivum
  peptide (1)..(197): Ceres Seq. ID no. 12598185
MQSCHLRRAEPPPLRRRRQRLRKHLLPTAGRRADTTRRRSAAIPWRRRARPRPRPRRAVLHQRAQPEGVRQRSRWTARPQDRRSGARPVLPAAPGVGRPRRRRLPLHRRQGQHPRPPPQRACGHQPPPQPLRQDVPVWFHLPSPLTDVLLHGLRIRFAFRTLFFYFIKCGSVPLPHFNCVTSTTFVFWQTEHILFVL

SEQ ID NO: 14768 - protein, 166 aa, Triticum aestivum
  peptide (1)..(166): Ceres Seq. ID no. 12598186
  misc_feature (81)..(163): Pfam Name: Pfam Description:  Protease inhibitor/seed storage/LTP family
  misc_feature (24)..(163): NCBI GI NO: 37536704 NR Description: putative lipid transfer protein
  misc_feature (22)..(163): NCBI GI NO: 1084460 NR Description: RCc2 protein - rice
  misc_feature (22)..(163): NCBI GI NO: 37536702 NR Description: putative lipid transfer protein
  misc_feature (21)..(163): NCBI GI NO: 37533212 NR Description: putative lipid transfer protein
  misc_feature (26)..(163): NCBI GI NO: 37533214 NR Description: putative lipid tranfer protein
  misc_feature (24)..(163): NCBI GI NO: 37536712 NR Description: putative lipid transfer protein
  misc_feature (21)..(164): NCBI GI NO: 2226329 NR Description: physical impedance induced protein [Zea mays]
  misc_feature (26)..(164): NCBI GI NO: 39748092 NR Description: lipid transfer protein-like protein
  misc_feature (21)..(164): NCBI GI NO: 399204 NR Description: CORTICAL CELL DELINEATING PROTEIN PRECURSOR
  misc_feature (67)..(163): NCBI GI NO: 7489138 NR Description: glycine-rich protein 16K - common tobacco
KKKSQTQSTSYITLAHHTITMACKAAIFVALSLLLSAVAANGCGSTYCQPPVVVPTPPVVVPPPYHGGGGHGHGHGHGGQCSINVLNLRVCANVLGGLLGLKIGVPARDQCCPLLQGLADLDAAVCLCTAVRANILGLHLNVPVDISLLLNHCGKTCPSGFICPAH

SEQ ID NO: 14769 - protein, 146 aa, Triticum aestivum
  peptide (1)..(146): Ceres Seq. ID no. 12598187
  misc_feature (61)..(143): Pfam Name: Pfam Description:  Protease inhibitor/seed storage/LTP family
  misc_feature (4)..(143): NCBI GI NO: 37536704 NR Description: putative lipid transfer protein
  misc_feature (2)..(143): NCBI GI NO: 1084460 NR Description: RCc2 protein - rice
  misc_feature (2)..(143): NCBI GI NO: 37536702 NR Description: putative lipid transfer protein
  misc_feature (1)..(143): NCBI GI NO: 37533212 NR Description: putative lipid transfer protein
  misc_feature (6)..(143): NCBI GI NO: 37533214 NR Description: putative lipid tranfer protein
  misc_feature (4)..(143): NCBI GI NO: 37536712 NR Description: putative lipid transfer protein
  misc_feature (1)..(144): NCBI GI NO: 2226329 NR Description: physical impedance induced protein [Zea mays]
  misc_feature (6)..(144): NCBI GI NO: 39748092 NR Description: lipid transfer protein-like protein
  misc_feature (1)..(144): NCBI GI NO: 399204 NR Description: CORTICAL CELL DELINEATING PROTEIN PRECURSOR
  misc_feature (47)..(143): NCBI GI NO: 7489138 NR Description: glycine-rich protein 16K - common tobacco
MACKAAIFVALSLLLSAVAANGCGSTYCQPPVVVPTPPVVVPPPYHGGGGHGHGHGHGGQCSINVLNLRVCANVLGGLLGLKIGVPARDQCCPLLQGLADLDAAVCLCTAVRANILGLHLNVPVDISLLLNHCGKTCPSGFICPAH

SEQ ID NO: 14770 - DNA, 1152 bp, Triticum aestivum
  misc_feature (1)..(1152): Ceres Seq. ID no. 12626061
ccctcccctcccctcccctccgagcgagctcccgagcagcagcggcggccggcctccctccccctctccctcgcgcgcgccccagccgctcgcgccggtccgcccctccccctccagcggcgtcggcggaaggcattgcgccgagcagtcatcacagtccaagacaatggttgcacaagcctttaccgtcgatttggataagcctcttgtatttcaggttggtcatctggaggaacagtatcaagactgggttcaccagccaattgttagcaaggaggggccacggttttttgccaatgatgtattggagttcttaacacgtacgaaatggtgggcagttcctctcatttggttgcctgttgtttgctggtgcctgaatacatcgatccaaatgggccacacagttccagaagtagcgctgatggttgtggcaggaatatttatctggacactggttgaatacgtgctacatcggtacctgttccacatagatactaaaagttactggacaaacacggctcattatcttctgcatggatgccatcacaagcatccaatggatgggcttcgacttgtatttccaccaactgccgcagccatcttgtgctatccgttctggaattttgtcaagctcttcacaactacaactaccactcctggcgtgtttggaggtggcctgttgggttacgtgatctatgattgcacacactactacctgcatcacgcccacccttcattcgatccagcaaaatatctcaagaaataccatctgaaccatcacttcagaatccaaaacaagggctttggaataacatcaaccctgtgggaccatgtgtttggaacgctgccttcaacgaaaaccgccggcaagagctcttgagttgttgtaccgccttgcagtgcgagaatcaagactgtccaatggttgataacggattgaacggacggatgaacaaacaattaatcggagacgtcactgaagtgcttacatcctcactgatgtgtcgcgaatagagtggttccagacttgagcatatgttgtcatgtgtacagaggtttttctatctaaatagtatagcaccagcgtcgttcatttgtggctgttggtggccagtataatttttgggacaaattaagtaattgcattgcttg

SEQ ID NO: 14771 - protein, 292 aa, Triticum aestivum
  peptide (1)..(292): Ceres Seq. ID no. 12626062
  misc_feature (141)..(283): Pfam Name: Pfam Description:  Fatty acid hydroxylase
  misc_feature (56)..(292): NCBI GI NO: 34897078 NR Description: putative fatty acid hydroxylase
  misc_feature (56)..(290): NCBI GI NO: 15226828 NR Description: fatty acid hydroxylase
  misc_feature (56)..(292): NCBI GI NO: 15233426 NR Description: fatty acid hydroxylase - like protein
  misc_feature (141)..(286): NCBI GI NO: 32766618 NR Description: Unknown (protein for IMAGE:6878212)
  misc_feature (52)..(164): NCBI GI NO: 32766618 NR Description: Unknown (protein for IMAGE:6878212)
  misc_feature (63)..(281): NCBI GI NO: 6323928 NR Description: Required for the hydroxylation of the very longchain fatty acid
  misc_feature (69)..(282): NCBI GI NO: 17505701 NR Description: Fatty acid hydroxylase (36.3 kD)
  misc_feature (69)..(282): NCBI GI NO: 39589620 NR Description: Hypothetical protein CBG12227
  misc_feature (63)..(281): NCBI GI NO: 18447515 NR Description: RE63157p [Drosophila melanogaster]
  misc_feature (63)..(286): NCBI GI NO: 40746791 NR Description: hypothetical protein AN0918.2
PPLPSPPSELPSSSGGRPPSPSPSRAPQPLAPVRPSPSSGVGGRHCAEQSSQSKTMVAQAFTVDLDKPLVFQVGHLEEQYQDWVHQPIVSKEGPRFFANDVLEFLTRTKWWAVPLIWLPVVCWCLNTSIQMGHTVPEVALMVVAGIFIWTLVEYVLHRYLFHIDTKSYWTNTAHYLLHGCHHKHPMDGLRLVFPPTAAAILCYPFWNFVKLFTTTTTTPGVFGGGLLGYVIYDCTHYYLHHAHPSFDPAKYLKKYHLNHHFRIQNKGFGITSTLWDHVFGTLPSTKTAGKSS

SEQ ID NO: 14772 - protein, 237 aa, Triticum aestivum
  peptide (1)..(237): Ceres Seq. ID no. 12626063
  misc_feature (86)..(228): Pfam Name: Pfam Description:  Fatty acid hydroxylase
  misc_feature (1)..(237): NCBI GI NO: 34897078 NR Description: putative fatty acid hydroxylase
  misc_feature (1)..(235): NCBI GI NO: 15226828 NR Description: fatty acid hydroxylase
  misc_feature (1)..(237): NCBI GI NO: 15233426 NR Description: fatty acid hydroxylase - like protein
  misc_feature (86)..(231): NCBI GI NO: 32766618 NR Description: Unknown (protein for IMAGE:6878212)
  misc_feature (1)..(109): NCBI GI NO: 32766618 NR Description: Unknown (protein for IMAGE:6878212)
  misc_feature (8)..(226): NCBI GI NO: 6323928 NR Description: Required for the hydroxylation of the very longchain fatty acid
  misc_feature (14)..(227): NCBI GI NO: 17505701 NR Description: Fatty acid hydroxylase (36.3 kD)
  misc_feature (14)..(227): NCBI GI NO: 39589620 NR Description: Hypothetical protein CBG12227
  misc_feature (8)..(226): NCBI GI NO: 18447515 NR Description: RE63157p [Drosophila melanogaster]
  misc_feature (8)..(231): NCBI GI NO: 40746791 NR Description: hypothetical protein AN0918.2
MVAQAFTVDLDKPLVFQVGHLEEQYQDWVHQPIVSKEGPRFFANDVLEFLTRTKWWAVPLIWLPVVCWCLNTSIQMGHTVPEVALMVVAGIFIWTLVEYVLHRYLFHIDTKSYWTNTAHYLLHGCHHKHPMDGLRLVFPPTAAAILCYPFWNFVKLFTTTTTTPGVFGGGLLGYVIYDCTHYYLHHAHPSFDPAKYLKKYHLNHHFRIQNKGFGITSTLWDHVFGTLPSTKTAGKSS

SEQ ID NO: 14773 - protein, 162 aa, Triticum aestivum
  peptide (1)..(162): Ceres Seq. ID no. 12626064
  misc_feature (11)..(153): Pfam Name: Pfam Description:  Fatty acid hydroxylase
  misc_feature (1)..(162): NCBI GI NO: 34897078 NR Description: putative fatty acid hydroxylase
  misc_feature (1)..(160): NCBI GI NO: 15226828 NR Description: fatty acid hydroxylase
  misc_feature (1)..(162): NCBI GI NO: 15233426 NR Description: fatty acid hydroxylase - like protein
  misc_feature (11)..(156): NCBI GI NO: 32766618 NR Description: Unknown (protein for IMAGE:6878212)
  misc_feature (1)..(34): NCBI GI NO: 32766618 NR Description: Unknown (protein for IMAGE:6878212)
  misc_feature (1)..(151): NCBI GI NO: 6323928 NR Description: Required for the hydroxylation of the very longchain fatty acid
  misc_feature (1)..(152): NCBI GI NO: 17505701 NR Description: Fatty acid hydroxylase (36.3 kD)
  misc_feature (1)..(152): NCBI GI NO: 39589620 NR Description: Hypothetical protein CBG12227
  misc_feature (1)..(151): NCBI GI NO: 18447515 NR Description: RE63157p [Drosophila melanogaster]
  misc_feature (1)..(156): NCBI GI NO: 40746791 NR Description: hypothetical protein AN0918.2
MGHTVPEVALMVVAGIFIWTLVEYVLHRYLFHIDTKSYWTNTAHYLLHGCHHKHPMDGLRLVFPPTAAAILCYPFWNFVKLFTTTTTTPGVFGGGLLGYVIYDCTHYYLHHAHPSFDPAKYLKKYHLNHHFRIQNKGFGITSTLWDHVFGTLPSTKTAGKSS

SEQ ID NO: 14774 - DNA, 1208 bp, Triticum aestivum
  misc_feature (1)..(1208): Ceres Seq. ID no. 13597809
cccaaccccccagacccaccgccacccaccaaaacacggactcctctcgctcgctcgctcgccgccgccggctgctgctccgcgcggccgtcgccgggcgtgcttcagtcagctcgcgcccctcctcgtgagctcgaaatacctcaagatgtcggagcattctgagagcaaggctgaaaagctcatgggcaacatcatggatactattgctgacaggctccccaagcagaagtctgacaatatcatgagcaacatcatggataccatttctgacaagctccctaagcagaggtctggccgtttcgatccaggctcagtcgctgatgtgaagaacaagatgtttggtcgtcagaggtccctccatggagttttgggtggcggaaagtctgctgatgtgttgttatggaggaacaagaagatatcttccagtgttttgggtctcgcaacagctatctgggttttcttcgagtggcttgattaccacttcttgacaatcatttcatttgcccttgttattggaatggtggttcagtttgtttggtccaacttctcaaggtcttctgaaataccccgggttaagttgccagaggacctgtttgtgaacattgctgttgccatcggtgcccaagtaaacaagttccttggtttccttcaagatgtgtcttgtgaaagaaacttgaagcattttgtattggcaattgttggattgtgggctgcttctgtagctgggagctggttcaacttcctgactgtcatttacattgggtttgtctgcgcgcacacgctccctgtgctgtacgagaagtacgaggaccaggtcgacgacttcctctacagcatcctgggcctgctccgagagcagtaccagaaactcgacagcggcgtcctgagcaggataccctccaagaggaacaagaagagcgagtagattgattagatcagatggacactcatgatttatcgagtgaaatcccagctattatttattctgcctagtttgtgtgctgcagacctgtagtgtgtctcaactatcatgtgagagaatgtgtgctcaagtgcttcctgaacggaacgctggtttaaattcaaccgcgacgcatgcgtctgttgtcccatttattattagtgggatgctgctcaacaaactggtgagaccagaagttgtatgcatatattggaaattgagctgaaatccgctgtgctttgtc

SEQ ID NO: 14775 - protein, 308 aa, Triticum aestivum
  peptide (1)..(308): Ceres Seq. ID no. 15222200
  misc_feature (78)..(308): NCBI GI NO: 34897094 NR Description: unknown protein
  misc_feature (80)..(308): NCBI GI NO: 34899590 NR Description: hypothetical protein~similar to Oryza sativachromosome3
  misc_feature (62)..(301): NCBI GI NO: 30681227 NR Description: expressed protein [Arabidopsis thaliana]
  misc_feature (79)..(301): NCBI GI NO: 18398810 NR Description: expressed protein [Arabidopsis thaliana]
  misc_feature (76)..(300): NCBI GI NO: 18406991 NR Description: expressed protein [Arabidopsis thaliana]
  misc_feature (50)..(300): NCBI GI NO: 34909318 NR Description: OSJNBb0021A09.5
  misc_feature (112)..(300): NCBI GI NO: 34904202 NR Description: P0492F05.25
  misc_feature (64)..(308): NCBI GI NO: 15236556 NR Description: expressed protein [Arabidopsis thaliana]
  misc_feature (79)..(302): NCBI GI NO: 15222616 NR Description: expressed protein [Arabidopsis thaliana]
  misc_feature (64)..(308): NCBI GI NO: 15237093 NR Description: expressed protein [Arabidopsis thaliana]
PTPQTHRHPPKHGLLSLARSPPPAAAPRGRRRACFSQLAPLLVSSKYLKMSEHSESKAEKLMGNIMDTIADRLPKQKSDNIMSNIMDTISDKLPKQRSGRFDPGSVADVKNKMFGRQRSLHGVLGGGKSADVLLWRNKKISSSVLGLATAIWVFFEWLDYHFLTIISFALVIGMVVQFVWSNFSRSSEIPRVKLPEDLFVNIAVAIGAQVNKFLGFLQDVSCERNLKHFVLAIVGLWAASVAGSWFNFLTVIYIGFVCAHTLPVLYEKYEDQVDDFLYSILGLLREQYQKLDSGVLSRIPSKRNKKSE

SEQ ID NO: 14776 - protein, 259 aa, Triticum aestivum
  peptide (1)..(259): Ceres Seq. ID no. 15222201
  misc_feature (29)..(259): NCBI GI NO: 34897094 NR Description: unknown protein
  misc_feature (31)..(259): NCBI GI NO: 34899590 NR Description: hypothetical protein~similar to Oryza sativachromosome3
  misc_feature (13)..(252): NCBI GI NO: 30681227 NR Description: expressed protein [Arabidopsis thaliana]
  misc_feature (30)..(252): NCBI GI NO: 18398810 NR Description: expressed protein [Arabidopsis thaliana]
  misc_feature (27)..(251): NCBI GI NO: 18406991 NR Description: expressed protein [Arabidopsis thaliana]
  misc_feature (1)..(251): NCBI GI NO: 34909318 NR Description: OSJNBb0021A09.5
  misc_feature (63)..(251): NCBI GI NO: 34904202 NR Description: P0492F05.25
  misc_feature (15)..(259): NCBI GI NO: 15236556 NR Description: expressed protein [Arabidopsis thaliana]
  misc_feature (30)..(253): NCBI GI NO: 15222616 NR Description: expressed protein [Arabidopsis thaliana]
  misc_feature (15)..(259): NCBI GI NO: 15237093 NR Description: expressed protein [Arabidopsis thaliana]
MSEHSESKAEKLMGNIMDTIADRLPKQKSDNIMSNIMDTISDKLPKQRSGRFDPGSVADVKNKMFGRQRSLHGVLGGGKSADVLLWRNKKISSSVLGLATAIWVFFEWLDYHFLTIISFALVIGMVVQFVWSNFSRSSEIPRVKLPEDLFVNIAVAIGAQVNKFLGFLQDVSCERNLKHFVLAIVGLWAASVAGSWFNFLTVIYIGFVCAHTLPVLYEKYEDQVDDFLYSILGLLREQYQKLDSGVLSRIPSKRNKKSE

SEQ ID NO: 14777 - protein, 247 aa, Triticum aestivum
  peptide (1)..(247): Ceres Seq. ID no. 15222202
  misc_feature (17)..(247): NCBI GI NO: 34897094 NR Description: unknown protein
  misc_feature (19)..(247): NCBI GI NO: 34899590 NR Description: hypothetical protein~similar to Oryza sativachromosome3
  misc_feature (1)..(240): NCBI GI NO: 30681227 NR Description: expressed protein [Arabidopsis thaliana]
  misc_feature (18)..(240): NCBI GI NO: 18398810 NR Description: expressed protein [Arabidopsis thaliana]
  misc_feature (15)..(239): NCBI GI NO: 18406991 NR Description: expressed protein [Arabidopsis thaliana]
  misc_feature (1)..(239): NCBI GI NO: 34909318 NR Description: OSJNBb0021A09.5
  misc_feature (51)..(239): NCBI GI NO: 34904202 NR Description: P0492F05.25
  misc_feature (3)..(247): NCBI GI NO: 15236556 NR Description: expressed protein [Arabidopsis thaliana]
  misc_feature (18)..(241): NCBI GI NO: 15222616 NR Description: expressed protein [Arabidopsis thaliana]
  misc_feature (3)..(247): NCBI GI NO: 15237093 NR Description: expressed protein [Arabidopsis thaliana]
MGNIMDTIADRLPKQKSDNIMSNIMDTISDKLPKQRSGRFDPGSVADVKNKMFGRQRSLHGVLGGGKSADVLLWRNKKISSSVLGLATAIWVFFEWLDYHFLTIISFALVIGMVVQFVWSNFSRSSEIPRVKLPEDLFVNIAVAIGAQVNKFLGFLQDVSCERNLKHFVLAIVGLWAASVAGSWFNFLTVIYIGFVCAHTLPVLYEKYEDQVDDFLYSILGLLREQYQKLDSGVLSRIPSKRNKKSE

SEQ ID NO: 14778 - DNA, 1171 bp, Triticum aestivum
  misc_feature (1)..(1171): Ceres Seq. ID no. 13662721
gaatatacggttacacccacaagcttcccctgcacacacgcgaccaactcttacgccgccgccgccgccgccggcggagagatggactcccggggcttcgattccacgggccgcgagttttccagcgccacggagatgtgggcccaggagatcggcgccaccgcctccgcctcggcctccgaagtccctccgggcgccgccgccgcggctccaagcaatggggacgccggcgaggaggcgggcggagaagggaagcgcgaggagtggtactccaaaggaatcgcctactggcagggcgtggaggcgtcgaccgagggcgtcctgggagggtacgggtgcgtcaacgacgccgacgtcaagggcagcgccgccttcctccgccctctcctcaccgagcgattcggcgccgcgaagcgccatcttgtcgcgcttgattgtggctcgggcatcgggcgggttacaaagaattttcttatcaagcatttcaatgaggttgatctcgttgagccagtagcccattttctagaagcggcacgggaaaatcttagtagctgtatggatgtagagcaggatacgcataaggctgcaaacttttattgtacacctcttcaggacttcactcctgaggaaggaagatatgatgtgatatggatccagtggtgcatagggcaacttactgatgatgattttatttcattttttaaccgcgcaaaggttgggctcaaaccagatggtttttttgttctgaaagagaacattgcaaaaaatggatttgttttagacaaggaggataacagtgtcactaggtctgatgcatatttcagggagctatttaacaagtgtggattgtatatccacagcatcaagaaccaaaaggagctaccagaggaactatttgctgtcagaatgtacgcattggtgaccagccagccaaaggtcacaaaaaatggcaagagagggcggcctaaaaattcaccccgtataatccgctcttgaaggggggactattgtgccagcgtattgtctggcaatgtactgttgttcacttgtttctagtcgcaatttagctcggtctacattttgttttgagcatgctgtctttttcagagatcaaatccactagttgctgtcgaaacttaatgcatatggcatctagcaccttttgattctg

SEQ ID NO: 14779 - protein, 331 aa, Triticum aestivum
  peptide (1)..(331): Ceres Seq. ID no. 13662722
  misc_feature (85)..(307): Pfam Name: DUF858 Pfam Description: Eukaryotic protein of unknown function
  misc_feature (28)..(331): NCBI GI NO: 34897080 NR Description: unknown protein
  misc_feature (75)..(330): NCBI GI NO: 15241499 NR Description: expressed protein [Arabidopsis thaliana]
  misc_feature (90)..(306): NCBI GI NO: 6523567 NR Description: hypothetical protein [Zygosaccharomyces rouxii]
  misc_feature (90)..(306): NCBI GI NO: 6319738 NR Description: Hypothetical ORF; Ybr261cp
  misc_feature (87)..(306): NCBI GI NO: 24528555 NR Description: RIKEN cDNA 2610205E22 [Mus musculus]
  misc_feature (87)..(306): NCBI GI NO: 12655091 NR Description: AD-003 protein [Homo sapiens]
  misc_feature (87)..(307): NCBI GI NO: 19115139 NR Description: Putative S-adenosylmethionine-dependentmethyltransferase
  misc_feature (87)..(306): NCBI GI NO: 7661528 NR Description: AD-003 protein [Homo sapiens]
  misc_feature (66)..(305): NCBI GI NO: 24652235 NR Description: CG1675-PA [Drosophila melanogaster]
  misc_feature (90)..(311): NCBI GI NO: 39594796 NR Description: Hypothetical protein CBG17371
EYTVTPTSFPCTHATNSYAAAAAAGGEMDSRGFDSTGREFSSATEMWAQEIGATASASASEVPPGAAAAAPSNGDAGEEAGGEGKREEWYSKGIAYWQGVEASTEGVLGGYGCVNDADVKGSAAFLRPLLTERFGAAKRHLVALDCGSGIGRVTKNFLIKHFNEVDLVEPVAHFLEAARENLSSCMDVEQDTHKAANFYCTPLQDFTPEEGRYDVIWIQWCIGQLTDDDFISFFNRAKVGLKPDGFFVLKENIAKNGFVLDKEDNSVTRSDAYFRELFNKCGLYIHSIKNQKELPEELFAVRMYALVTSQPKVTKNGKRGRPKNSPRIIRS

SEQ ID NO: 14780 - protein, 304 aa, Triticum aestivum
  peptide (1)..(304): Ceres Seq. ID no. 13662723
  misc_feature (58)..(280): Pfam Name: DUF858 Pfam Description: Eukaryotic protein of unknown function
  misc_feature (1)..(304): NCBI GI NO: 34897080 NR Description: unknown protein
  misc_feature (48)..(303): NCBI GI NO: 15241499 NR Description: expressed protein [Arabidopsis thaliana]
  misc_feature (63)..(279): NCBI GI NO: 6523567 NR Description: hypothetical protein [Zygosaccharomyces rouxii]
  misc_feature (63)..(279): NCBI GI NO: 6319738 NR Description: Hypothetical ORF; Ybr261cp
  misc_feature (60)..(279): NCBI GI NO: 24528555 NR Description: RIKEN cDNA 2610205E22 [Mus musculus]
  misc_feature (60)..(279): NCBI GI NO: 12655091 NR Description: AD-003 protein [Homo sapiens]
  misc_feature (60)..(280): NCBI GI NO: 19115139 NR Description: Putative S-adenosylmethionine-dependentmethyltransferase
  misc_feature (60)..(279): NCBI GI NO: 7661528 NR Description: AD-003 protein [Homo sapiens]
  misc_feature (39)..(278): NCBI GI NO: 24652235 NR Description: CG1675-PA [Drosophila melanogaster]
  misc_feature (63)..(284): NCBI GI NO: 39594796 NR Description: Hypothetical protein CBG17371
MDSRGFDSTGREFSSATEMWAQEIGATASASASEVPPGAAAAAPSNGDAGEEAGGEGKREEWYSKGIAYWQGVEASTEGVLGGYGCVNDADVKGSAAFLRPLLTERFGAAKRHLVALDCGSGIGRVTKNFLIKHFNEVDLVEPVAHFLEAARENLSSCMDVEQDTHKAANFYCTPLQDFTPEEGRYDVIWIQWCIGQLTDDDFISFFNRAKVGLKPDGFFVLKENIAKNGFVLDKEDNSVTRSDAYFRELFNKCGLYIHSIKNQKELPEELFAVRMYALVTSQPKVTKNGKRGRPKNSPRIIRS

SEQ ID NO: 14781 - protein, 286 aa, Triticum aestivum
  peptide (1)..(286): Ceres Seq. ID no. 13662724
  misc_feature (40)..(262): Pfam Name: DUF858 Pfam Description: Eukaryotic protein of unknown function
  misc_feature (1)..(286): NCBI GI NO: 34897080 NR Description: unknown protein
  misc_feature (30)..(285): NCBI GI NO: 15241499 NR Description: expressed protein [Arabidopsis thaliana]
  misc_feature (45)..(261): NCBI GI NO: 6523567 NR Description: hypothetical protein [Zygosaccharomyces rouxii]
  misc_feature (45)..(261): NCBI GI NO: 6319738 NR Description: Hypothetical ORF; Ybr261cp
  misc_feature (42)..(261): NCBI GI NO: 24528555 NR Description: RIKEN cDNA 2610205E22 [Mus musculus]
  misc_feature (42)..(261): NCBI GI NO: 12655091 NR Description: AD-003 protein [Homo sapiens]
  misc_feature (42)..(262): NCBI GI NO: 19115139 NR Description: Putative S-adenosylmethionine-dependentmethyltransferase
  misc_feature (42)..(261): NCBI GI NO: 7661528 NR Description: AD-003 protein [Homo sapiens]
  misc_feature (21)..(260): NCBI GI NO: 24652235 NR Description: CG1675-PA [Drosophila melanogaster]
  misc_feature (45)..(266): NCBI GI NO: 39594796 NR Description: Hypothetical protein CBG17371
MWAQEIGATASASASEVPPGAAAAAPSNGDAGEEAGGEGKREEWYSKGIAYWQGVEASTEGVLGGYGCVNDADVKGSAAFLRPLLTERFGAAKRHLVALDCGSGIGRVTKNFLIKHFNEVDLVEPVAHFLEAARENLSSCMDVEQDTHKAANFYCTPLQDFTPEEGRYDVIWIQWCIGQLTDDDFISFFNRAKVGLKPDGFFVLKENIAKNGFVLDKEDNSVTRSDAYFRELFNKCGLYIHSIKNQKELPEELFAVRMYALVTSQPKVTKNGKRGRPKNSPRIIRS

SEQ ID NO: 14782 - DNA, 809 bp, Triticum aestivum
  misc_feature (1)..(809): Ceres Seq. ID no. 15173263
atctcagatcaaagtttctttttcttattctcttgtgcgccaactcattccttcgttgctcatgactgaatttcttggaatttgtagagaatttttgggtcctgatccgaggagaggagatgtcggacagcgaagagcaccagttcgagtcgaaggcagacgccggcgcttccaagacctacccgcagcaggccggcaccattcgcaagaacggctacatcgtcatcaagaaccgcccctgcaaggttgtggaggtttcaacatctaaaaccgggaagcatggtcatgccaagtgccactttgttgctattgacatcttcaccggcaagaaacttgaagatattgtgccatcttctcacaactgtgatgttcctcatgtgaatcgcacagaataccagctcattgatatatctgaggatggatttgtgagtctgctcactgataatggtaacaccaaagatgacctcaagctcccgactgatgaaaccctccttggccagatcaaggatgggtttgctgaagggaaggacctggtggtgtctgtcatgtccgccatgggagaggagcagattaatgcgctcaaggacattggccccaagtagtctgccctgttagccatggacatcggccccaagagtgtggttcatttgtctctgccggttaagatggatttgggtgtcacagccgttgaggaattgtatctttttgcacaactaagttgtcagtgtttggttgatttgtagtcctaaattcatgggtgactgtatcctaaaactgtcgctccggggtttattgacccctcttgactg

SEQ ID NO: 14783 - protein, 160 aa, Triticum aestivum
  peptide (1)..(160): Ceres Seq. ID no. 15173264
  misc_feature (86)..(155): Pfam Name: Pfam Description:  Eukaryotic initiation factor 5A hypusine
  misc_feature (1)..(160): NCBI GI NO: 3024021 NR Description: Eukaryotic translation initiation factor 5A-4
  misc_feature (1)..(160): NCBI GI NO: 20138706 NR Description: Eukaryotic translation initiation factor 5A-3
  misc_feature (1)..(160): NCBI GI NO: 3789948 NR Description: translation initiation factor 5A [Oryza sativa]
  misc_feature (1)..(160): NCBI GI NO: 124226 NR Description: Eukaryotic translation initiation factor 5A-2
  misc_feature (1)..(160): NCBI GI NO: 3024022 NR Description: Eukaryotic translation initiation factor 5A-5
  misc_feature (1)..(160): NCBI GI NO: 13236654 NR Description: translation initiation factor 5A [Oryza sativa]
  misc_feature (1)..(160): NCBI GI NO: 33325117 NR Description: eukaryotic translation iation factor 5A isoform1
  misc_feature (1)..(160): NCBI GI NO: 20138708 NR Description: Eukaryotic translation initiation factor 5A-1
  misc_feature (1)..(160): NCBI GI NO: 33325123 NR Description: eukaryotic translation iation factor 5A isoform4
  misc_feature (1)..(158): NCBI GI NO: 9295717 NR Description: T24P13.1 [Arabidopsis thaliana]
MSDSEEHQFESKADAGASKTYPQQAGTIRKNGYIVIKNRPCKVVEVSTSKTGKHGHAKCHFVAIDIFTGKKLEDIVPSSHNCDVPHVNRTEYQLIDISEDGFVSLLTDNGNTKDDLKLPTDETLLGQIKDGFAEGKDLVVSVMSAMGEEQINALKDIGPK

SEQ ID NO: 14784 - protein, 88 aa, Triticum aestivum
  peptide (1)..(88): Ceres Seq. ID no. 15173265
SQIKVSFSYSLVRQLIPSLLMTEFLGICREFLGPDPRRGDVGQRRAPVRVEGRRRRFQDLPAAGRHHSQERLHRHQEPPLQGCGGFNI

SEQ ID NO: 14785 - DNA, 1278 bp, Triticum aestivum
  misc_feature (1)..(1278): Ceres Seq. ID no. 13656155
atacatcacctcggccggcgctgctaccgatctcctccagagtccaagcctcctcacccaaagccatggccgcgcggcgtcgctccctcctcatgctcctgcccctcctcctctcccacttcctctccctcgccgccgccttccagtcggacgagctgctcctccacgacgacgacgagttcgagggcacccgggtctcctccaccccctccccccggccgccctcgacgccgccggtagtgtcctcccgccgccgatccgcggacgcgacgcaggcggctggcgcctccgagtccgacaccgtccagttcaccctcgagcacgacctcggagccggcctagggttcgcccccgccgggtccttctccgcccgcctcaagtcctcggcccacggctcccagactctcactaagctccggtttacgaggaatgagttgactgaggatgaaaagaatgcatttaagaaattacttgaagaagatagtttttacacaataaggctaccgtctaatgtgttggatcctacaagaaacgattatatttattcctcgatcaaagcgagatgcattccacgtgacagcttggatgaacatattgtcatccacatggacggtgtaaatattttggctgttaattatggttccgtcggtggatgccaatatccccggccaatgaaagtaccgtcaaaatggacattcaattcatacactattctgaagactgctgaccaagcaccaagaactccatcatttgtagagcaattaatagaaactgagagtggactcggtgaagtgatgaaaccacctgagaaatctttctgggctaaatattggatgtacatcattcctcttggtctcattgtcatgaacgctgtcacagcagcagcaaacataccggaggagcaagctggagggcagggtcaagctccagcacaaatggcgccaattgctgctccaaggagaagatgatggcttcctatattctttgcatgccatagattcacaaacaatggacagaggatggatctgcttgaccttccccagaacaggggcagtactagcggcaacaagactcacttgggtttttcttttctcgcattcagaaactcacctttgttgtagaatcacctcagaaaaggttgcgtgttctggtcgcatctacacgcgtatttttgcctgttgatagaaattaccatcagtctttaactcggtgcaaactgcatgccttaatattcagaactagcttaattacaaatatcaaacattgtatgttttgctc

SEQ ID NO: 14786 - protein, 321 aa, Triticum aestivum
  peptide (1)..(321): Ceres Seq. ID no. 15219802
  misc_feature (28)..(320): NCBI GI NO: 18408239 NR Description: expressed protein [Arabidopsis thaliana]
  misc_feature (28)..(320): NCBI GI NO: 21594383 NR Description: unknown [Arabidopsis thaliana]
  misc_feature (96)..(306): NCBI GI NO: 27503262 NR Description: Unknown (protein for IMAGE:5570892)
  misc_feature (96)..(306): NCBI GI NO: 38181935 NR Description: Unknown (protein for MGC:76288)
  misc_feature (65)..(306): NCBI GI NO: 37574074 NR Description: RIKEN cDNA 2310044H10 [Mus musculus]
  misc_feature (85)..(306): NCBI GI NO: 21432049 NR Description: LOC284361 protein [Homo sapiens]
TSPRPALLPISSRVQASSPKAMAARRRSLLMLLPLLLSHFLSLAAAFQSDELLLHDDDEFEGTRVSSTPSPRPPSTPPVVSSRRRSADATQAAGASESDTVQFTLEHDLGAGLGFAPAGSFSARLKSSAHGSQTLTKLRFTRNELTEDEKNAFKKLLEEDSFYTIRLPSNVLDPTRNDYIYSSIKARCIPRDSLDEHIVIHMDGVNILAVNYGSVGGCQYPRPMKVPSKWTFNSYTILKTADQAPRTPSFVEQLIETESGLGEVMKPPEKSFWAKYWMYIIPLGLIVMNAVTAAANIPEEQAGGQGQAPAQMAPIAAPRRR

SEQ ID NO: 14787 - protein, 300 aa, Triticum aestivum
  peptide (1)..(300): Ceres Seq. ID no. 15219803
  misc_feature (7)..(299): NCBI GI NO: 18408239 NR Description: expressed protein [Arabidopsis thaliana]
  misc_feature (7)..(299): NCBI GI NO: 21594383 NR Description: unknown [Arabidopsis thaliana]
  misc_feature (75)..(285): NCBI GI NO: 27503262 NR Description: Unknown (protein for IMAGE:5570892)
  misc_feature (75)..(285): NCBI GI NO: 38181935 NR Description: Unknown (protein for MGC:76288)
  misc_feature (44)..(285): NCBI GI NO: 37574074 NR Description: RIKEN cDNA 2310044H10 [Mus musculus]
  misc_feature (64)..(285): NCBI GI NO: 21432049 NR Description: LOC284361 protein [Homo sapiens]
MAARRRSLLMLLPLLLSHFLSLAAAFQSDELLLHDDDEFEGTRVSSTPSPRPPSTPPVVSSRRRSADATQAAGASESDTVQFTLEHDLGAGLGFAPAGSFSARLKSSAHGSQTLTKLRFTRNELTEDEKNAFKKLLEEDSFYTIRLPSNVLDPTRNDYIYSSIKARCIPRDSLDEHIVIHMDGVNILAVNYGSVGGCQYPRPMKVPSKWTFNSYTILKTADQAPRTPSFVEQLIETESGLGEVMKPPEKSFWAKYWMYIIPLGLIVMNAVTAAANIPEEQAGGQGQAPAQMAPIAAPRRR

SEQ ID NO: 14788 - protein, 291 aa, Triticum aestivum
  peptide (1)..(291): Ceres Seq. ID no. 15219804
  misc_feature (1)..(290): NCBI GI NO: 18408239 NR Description: expressed protein [Arabidopsis thaliana]
  misc_feature (1)..(290): NCBI GI NO: 21594383 NR Description: unknown [Arabidopsis thaliana]
  misc_feature (66)..(276): NCBI GI NO: 27503262 NR Description: Unknown (protein for IMAGE:5570892)
  misc_feature (66)..(276): NCBI GI NO: 38181935 NR Description: Unknown (protein for MGC:76288)
  misc_feature (35)..(276): NCBI GI NO: 37574074 NR Description: RIKEN cDNA 2310044H10 [Mus musculus]
  misc_feature (55)..(276): NCBI GI NO: 21432049 NR Description: LOC284361 protein [Homo sapiens]
MLLPLLLSHFLSLAAAFQSDELLLHDDDEFEGTRVSSTPSPRPPSTPPVVSSRRRSADATQAAGASESDTVQFTLEHDLGAGLGFAPAGSFSARLKSSAHGSQTLTKLRFTRNELTEDEKNAFKKLLEEDSFYTIRLPSNVLDPTRNDYIYSSIKARCIPRDSLDEHIVIHMDGVNILAVNYGSVGGCQYPRPMKVPSKWTFNSYTILKTADQAPRTPSFVEQLIETESGLGEVMKPPEKSFWAKYWMYIIPLGLIVMNAVTAAANIPEEQAGGQGQAPAQMAPIAAPRRR

SEQ ID NO: 14789 - DNA, 1154 bp, Triticum aestivum
  misc_feature (1)..(1154): Ceres Seq. ID no. 13597493
cagagctcacacagtgctggacacgccgcgacgagtcggaggggaaagatcaagatggaggcggccgcctccaatccgtcgagcaagaggatcgccctggtcaccggagggaacaaaggggtcgggctggagacgtgcaggcagctcgcgtccaaggggctcaaggtcgtgctgacggcgaggaacgagggcaggggactagaggcggtcgaaggcgtcaggcgctccggtgctgacgtcgtcttccatcagctggatgtcaccgaccctgacagcgtcgcccggctggcggatttcgtcagggatcagttcgggaagctcgatatcctgataaacaatgcaggcatttcaggcgtcgatcgagatccagttctggttgcgaaagttaaagaacaggttgaaagcatggatgtagatcagagagttcaatggatgaaagaaaattccaaggagacatatgaggaagcaaaagaatgcatgagaacaaactactatggggcaaagcttgtcacggaggcactacttcctcttcttcagttgtcctcctctgggagaattgtcaatgtctcatcaggcttttcactgctaagaaacttcaacagtgaaaaactgaagaatgagtttaacaacgctgacaatcttactgaaaagagactagaggagctgttggattcgttcctagaagatttcaaggccaatttgatagaggcacatgggtggccgaccggtggctcgtcagcctacaaagtcgccaaagctgccctcaatgcttacacaaggattctcgccaagaagtaccctaggatgcgcatcaactgtttgacgcctggttatgtcaagagcgacatgtcgatgcacatgggagttttgacgcccgaggagggcgctagcaaccctgtgaaggtcgctctcttgcccgacgatggcccgacgggtgcttattttgatagggatggcgtggcctcgtttgtgtgactctgtcgtacgtgtaatgttttcgtccggttttactctcagaatatgagacaccgtaacagtagttgtcaataaacagtgtgcagtttaacctgtgctgtgcactcgaatcgacatgcaaaattgacaaatttgatcaaaaaaaaaaaaaaaaaagcttatcgataccgtcgacctcg

SEQ ID NO: 14790 - protein, 324 aa, Triticum aestivum
  peptide (1)..(324): Ceres Seq. ID no. 13597494
  misc_feature (19)..(324): NCBI GI NO: 38346767 NR Description: OSJNBa0081C01.18
  misc_feature (19)..(324): NCBI GI NO: 38346774 NR Description: OSJNBa0081C01.25
  misc_feature (19)..(324): NCBI GI NO: 38346769 NR Description: OSJNBa0081C01.20
  misc_feature (19)..(324): NCBI GI NO: 38346768 NR Description: OSJNBa0081C01.19
  misc_feature (19)..(324): NCBI GI NO: 38346772 NR Description: OSJNBa0081C01.23
  misc_feature (28)..(323): NCBI GI NO: 15224100 NR Description: short-chain dehydrogenase/reductase family protein
  misc_feature (30)..(323): NCBI GI NO: 15233062 NR Description: short-chain dehydrogenase/reductase family protein
  misc_feature (5)..(317): NCBI GI NO: 33146492 NR Description: carbonyl reductase -like protein
  misc_feature (29)..(318): NCBI GI NO: 34559416 NR Description: (-)-isopiperitenone reductase [Mentha x piperita]
  misc_feature (30)..(323): NCBI GI NO: 18378884 NR Description: short-chain dehydrogenase/reductase family protein
QSSHSAGHAATSRRGKIKMEAAASNPSSKRIALVTGGNKGVGLETCRQLASKGLKVVLTARNEGRGLEAVEGVRRSGADVVFHQLDVTDPDSVARLADFVRDQFGKLDILINNAGISGVDRDPVLVAKVKEQVESMDVDQRVQWMKENSKETYEEAKECMRTNYYGAKLVTEALLPLLQLSSSGRIVNVSSGFSLLRNFNSEKLKNEFNNADNLTEKRLEELLDSFLEDFKANLIEAHGWPTGGSSAYKVAKAALNAYTRILAKKYPRMRINCLTPGYVKSDMSMHMGVLTPEEGASNPVKVALLPDDGPTGAYFDRDGVASFV

SEQ ID NO: 14791 - protein, 306 aa, Triticum aestivum
  peptide (1)..(306): Ceres Seq. ID no. 13597495
  misc_feature (1)..(306): NCBI GI NO: 38346767 NR Description: OSJNBa0081C01.18
  misc_feature (1)..(306): NCBI GI NO: 38346774 NR Description: OSJNBa0081C01.25
  misc_feature (1)..(306): NCBI GI NO: 38346769 NR Description: OSJNBa0081C01.20
  misc_feature (1)..(306): NCBI GI NO: 38346768 NR Description: OSJNBa0081C01.19
  misc_feature (1)..(306): NCBI GI NO: 38346772 NR Description: OSJNBa0081C01.23
  misc_feature (10)..(305): NCBI GI NO: 15224100 NR Description: short-chain dehydrogenase/reductase family protein
  misc_feature (12)..(305): NCBI GI NO: 15233062 NR Description: short-chain dehydrogenase/reductase family protein
  misc_feature (1)..(299): NCBI GI NO: 33146492 NR Description: carbonyl reductase -like protein
  misc_feature (11)..(300): NCBI GI NO: 34559416 NR Description: (-)-isopiperitenone reductase [Mentha x piperita]
  misc_feature (12)..(305): NCBI GI NO: 18378884 NR Description: short-chain dehydrogenase/reductase family protein
MEAAASNPSSKRIALVTGGNKGVGLETCRQLASKGLKVVLTARNEGRGLEAVEGVRRSGADVVFHQLDVTDPDSVARLADFVRDQFGKLDILINNAGISGVDRDPVLVAKVKEQVESMDVDQRVQWMKENSKETYEEAKECMRTNYYGAKLVTEALLPLLQLSSSGRIVNVSSGFSLLRNFNSEKLKNEFNNADNLTEKRLEELLDSFLEDFKANLIEAHGWPTGGSSAYKVAKAALNAYTRILAKKYPRMRINCLTPGYVKSDMSMHMGVLTPEEGASNPVKVALLPDDGPTGAYFDRDGVASFV

SEQ ID NO: 14792 - protein, 189 aa, Triticum aestivum
  peptide (1)..(189): Ceres Seq. ID no. 13597496
  misc_feature (1)..(189): NCBI GI NO: 38346767 NR Description: OSJNBa0081C01.18
  misc_feature (1)..(189): NCBI GI NO: 38346774 NR Description: OSJNBa0081C01.25
  misc_feature (1)..(189): NCBI GI NO: 38346769 NR Description: OSJNBa0081C01.20
  misc_feature (1)..(189): NCBI GI NO: 38346768 NR Description: OSJNBa0081C01.19
  misc_feature (1)..(189): NCBI GI NO: 38346772 NR Description: OSJNBa0081C01.23
  misc_feature (1)..(188): NCBI GI NO: 15224100 NR Description: short-chain dehydrogenase/reductase family protein
  misc_feature (1)..(188): NCBI GI NO: 15233062 NR Description: short-chain dehydrogenase/reductase family protein
  misc_feature (1)..(182): NCBI GI NO: 33146492 NR Description: carbonyl reductase -like protein
  misc_feature (1)..(183): NCBI GI NO: 34559416 NR Description: (-)-isopiperitenone reductase [Mentha x piperita]
  misc_feature (1)..(188): NCBI GI NO: 18378884 NR Description: short-chain dehydrogenase/reductase family protein
MDVDQRVQWMKENSKETYEEAKECMRTNYYGAKLVTEALLPLLQLSSSGRIVNVSSGFSLLRNFNSEKLKNEFNNADNLTEKRLEELLDSFLEDFKANLIEAHGWPTGGSSAYKVAKAALNAYTRILAKKYPRMRINCLTPGYVKSDMSMHMGVLTPEEGASNPVKVALLPDDGPTGAYFDRDGVASFV

SEQ ID NO: 14793 - DNA, 1289 bp, Triticum aestivum
  misc_feature (1)..(1289): Ceres Seq. ID no. 13597831
ttctgcgatttccatttgcttcctccgtcttctccatcccccctccctgctgccgaccatccctgagcactcccagtcccaggccattagcctagctagctaccccctccatgcgagggcggcaatggcgcccgcctccgcctccttcgccgtctccctctccgcccccgtccgcttaattccgcccagatgcttccgcggtaggccgaggtggtcccgcccaatcagggcttcgagcgacacgaagggcgccccgaacggggagcggaggatcggggctctggagaggagggtgggggatttgagggcgcttgtcgcctcggtgcctcctgctgttgtctcgatcaggaaaaacattggactaaattccattgccggtttcggtttcggcattgcatttttggctgctctcgcaagacaggtcatcataagaactcaacagcaagatagtagtggttctgtttctgatctagtaaggcgcgggcatctaaaatctgggcaacgtgggattgcaaagccacgtgtgtacaatgatcctttcaataattcattagtcaagatcgatgaagatacttctactgctcagatgtttggcaaggagtaccgcatggctcctgtccggcttacaaatgaacaacaggcaatgcatcagaaaaggagatcacatgcatatcagtggaaaaggcccactgtgtttcttaaagaaggtgatcccctgccaccagatgtcgatccagagacagttagatggattccagtaaaccacccatttgctgctggttcggttgaagtagatgaggagactgccaaaaggaatgtttaccaaaaggatggcgtcccgtcccgtgtaaaagccgaacatgaagctttgcgggcaaggctagaggcttcaaatgatgtaacaccattctctaacggtccaaggggtatgcaacatagtgcaagatcatcgaagttatcagacgagccatctgggaatctgcaacagtctaaacctgacatggtgaatgaccaaaatggccaaccaatgttagagcctgagcctgagcccaagagctctgacaacggttcactatcaaaaagcttggaaggacagtaacggtgtgaattgtataaacccttcggcactttgttttgttatgtagtgttgtcaggttttagctgtagatagaggagttttggaacaacagatttacgtactgaacacatgatatggagcagtgttattgttatgtgctgctgtatatctgatattttttttgcccgaagatctccagatgcacgatctc

SEQ ID NO: 14794 - protein, 365 aa, Triticum aestivum
  peptide (1)..(365): Ceres Seq. ID no. 15222207
  misc_feature (95)..(333): NCBI GI NO: 15218043 NR Description: expressed protein [Arabidopsis thaliana]
  misc_feature (95)..(333): NCBI GI NO: 25373024 NR Description: protein F2D10.35 [imported] - Arabidopsis thaliana
SAISICFLRLLHPPSLLPTIPEHSQSQAISLASYPLHARAAMAPASASFAVSLSAPVRLIPPRCFRGRPRWSRPIRASSDTKGAPNGERRIGALERRVGDLRALVASVPPAVVSIRKNIGLNSIAGFGFGIAFLAALARQVIIRTQQQDSSGSVSDLVRRGHLKSGQRGIAKPRVYNDPFNNSLVKIDEDTSTAQMFGKEYRMAPVRLTNEQQAMHQKRRSHAYQWKRPTVFLKEGDPLPPDVDPETVRWIPVNHPFAAGSVEVDEETAKRNVYQKDGVPSRVKAEHEALRARLEASNDVTPFSNGPRGMQHSARSSKLSDEPSGNLQQSKPDMVNDQNGQPMLEPEPEPKSSDNGSLSKSLEGQ

SEQ ID NO: 14795 - protein, 324 aa, Triticum aestivum
  peptide (1)..(324): Ceres Seq. ID no. 15222208
  misc_feature (54)..(292): NCBI GI NO: 15218043 NR Description: expressed protein [Arabidopsis thaliana]
  misc_feature (54)..(292): NCBI GI NO: 25373024 NR Description: protein F2D10.35 [imported] - Arabidopsis thaliana
MAPASASFAVSLSAPVRLIPPRCFRGRPRWSRPIRASSDTKGAPNGERRIGALERRVGDLRALVASVPPAVVSIRKNIGLNSIAGFGFGIAFLAALARQVIIRTQQQDSSGSVSDLVRRGHLKSGQRGIAKPRVYNDPFNNSLVKIDEDTSTAQMFGKEYRMAPVRLTNEQQAMHQKRRSHAYQWKRPTVFLKEGDPLPPDVDPETVRWIPVNHPFAAGSVEVDEETAKRNVYQKDGVPSRVKAEHEALRARLEASNDVTPFSNGPRGMQHSARSSKLSDEPSGNLQQSKPDMVNDQNGQPMLEPEPEPKSSDNGSLSKSLEGQ

SEQ ID NO: 14796 - DNA, 1217 bp, Triticum aestivum
  misc_feature (1)..(1217): Ceres Seq. ID no. 13656156
agaaactaatccgagccacacatccccgtttcacaaccaagccaaagctccccactcctccccattccacgccgccgcaccccgaaccctagcgccccatccatccagcgagcggtagccatgccggcggacgcgaagatccggtggggggagctcgaggaggacgacgggggcgacctcgacttccttctcccgccgcgggtggtcatcgggcccgacgagaacggcttcaagaagacgatcgagtaccgcttcgacgacgacggcaacaaggtcaaggtcaccaccaccacccgcgtccgcaagctcgcccgcgcgcgcctctccaaggccgctgtcgagcgccgcaactgggccaagttcggcgacgccgccagcggcgacgacgcctccgcgcgcctcaccgtcgtctccaccgaggagatcctcctcgagcgcccgcgcgccccagggagcaaagctgatgaaccaagtgcttctggtgacccactggcaatggcaagcaagggaggtgctgttctcatggtttgcagaacctgtggtaagaagggtgaccactggacctcaaagtgcccctacaaggacctcgctccaccaactgatgcatcggacatgcctcctacttctgacggccctgcagcactgagtggccctgccaagggctcatacgttgctccaaggctgagggctggtgctgttcataccgatgctgggcacgacatgaggcgcaggaacgatgagaactctgtccgtgttaccaatctgtcggaggacacccgcgagcccgacctccttgagctgttccgcacgtttggcccggtcagccgtgtctacgttgcggtggatcagaagactggaatgagcaggggctttgggttcgtcaacttcgttcacagggaggacgccgagaaggccatcagcaagctcaatgggtatggttatgataacctcatcctccatgtggagatggctgcacctaggcctacttagttactgcctattaagcatccagatttcctacaagtgtcgtatcattatggtctccgaaataccagtacttttgtgtcgtgggcttgtgtcgtgttttgccttgttgagaataactacactctgttgatgaaaaagtgaatttttttaaaaaaaaaaaaaaaaaaaaaaaaaaaaaaaaaaaaaaaaaaaaaaagaaaaaaaaaaaaaaaaaagcttatcgataccgt

SEQ ID NO: 14797 - protein, 289 aa, Triticum aestivum
  peptide (1)..(289): Ceres Seq. ID no. 13656157
  misc_feature (210)..(281): Pfam Name: a.k.a. RRM, RBD, or RNP domain Pfam Description: RNA recognition motif.
  misc_feature (5)..(289): NCBI GI NO: 12407751 NR Description: initiation factor 3g [Arabidopsis thaliana]
  misc_feature (5)..(289): NCBI GI NO: 15229743 NR Description: eukaryotic translation initiation factor 3 subunitg
  misc_feature (6)..(289): NCBI GI NO: 10177573 NR Description: eukaryotic translation initiation factor 3 subunit-like protein
  misc_feature (29)..(289): NCBI GI NO: 30681225 NR Description: eukaryotic translation initiation factor 3
  misc_feature (1)..(287): NCBI GI NO: 19112519 NR Description: eukaryotic translation iation factor 3 rna-binding subunit
  misc_feature (4)..(286): NCBI GI NO: 29124629 NR Description: Similar to eukaryotic translation initiation factor3
  misc_feature (9)..(287): NCBI GI NO: 2951777 NR Description: translation initiation factor 3
  misc_feature (23)..(286): NCBI GI NO: 23503064 NR Description: Eukaryotic translation initiation factor 3 subunit4
  misc_feature (23)..(286): NCBI GI NO: 30583983 NR Description: Homo sapiens eukaryotic translation initiationfactor 3
  misc_feature (1)..(284): NCBI GI NO: 40738468 NR Description: hypothetical protein AN6017.2
MPADAKIRWGELEEDDGGDLDFLLPPRVVIGPDENGFKKTIEYRFDDDGNKVKVTTTTRVRKLARARLSKAAVERRNWAKFGDAASGDDASARLTVVSTEEILLERPRAPGSKADEPSASGDPLAMASKGGAVLMVCRTCGKKGDHWTSKCPYKDLAPPTDASDMPPTSDGPAALSGPAKGSYVAPRLRAGAVHTDAGHDMRRRNDENSVRVTNLSEDTREPDLLELFRTFGPVSRVYVAVDQKTGMSRGFGFVNFVHREDAEKAISKLNGYGYDNLILHVEMAAPRPT

SEQ ID NO: 14798 - protein, 164 aa, Triticum aestivum
  peptide (1)..(164): Ceres Seq. ID no. 13656158
  misc_feature (85)..(156): Pfam Name: a.k.a. RRM, RBD, or RNP domain Pfam Description: RNA recognition motif.
  misc_feature (1)..(164): NCBI GI NO: 12407751 NR Description: initiation factor 3g [Arabidopsis thaliana]
  misc_feature (1)..(164): NCBI GI NO: 15229743 NR Description: eukaryotic translation initiation factor 3 subunitg
  misc_feature (1)..(164): NCBI GI NO: 10177573 NR Description: eukaryotic translation initiation factor 3 subunit-like protein
  misc_feature (1)..(164): NCBI GI NO: 30681225 NR Description: eukaryotic translation initiation factor 3
  misc_feature (1)..(162): NCBI GI NO: 19112519 NR Description: eukaryotic translation iation factor 3 rna-binding subunit
  misc_feature (1)..(161): NCBI GI NO: 29124629 NR Description: Similar to eukaryotic translation initiation factor3
  misc_feature (1)..(162): NCBI GI NO: 2951777 NR Description: translation initiation factor 3
  misc_feature (1)..(161): NCBI GI NO: 23503064 NR Description: Eukaryotic translation initiation factor 3 subunit4
  misc_feature (1)..(161): NCBI GI NO: 30583983 NR Description: Homo sapiens eukaryotic translation initiationfactor 3
  misc_feature (1)..(159): NCBI GI NO: 40738468 NR Description: hypothetical protein AN6017.2
MASKGGAVLMVCRTCGKKGDHWTSKCPYKDLAPPTDASDMPPTSDGPAALSGPAKGSYVAPRLRAGAVHTDAGHDMRRRNDENSVRVTNLSEDTREPDLLELFRTFGPVSRVYVAVDQKTGMSRGFGFVNFVHREDAEKAISKLNGYGYDNLILHVEMAAPRPT

SEQ ID NO: 14799 - protein, 155 aa, Triticum aestivum
  peptide (1)..(155): Ceres Seq. ID no. 13656159
  misc_feature (76)..(147): Pfam Name: a.k.a. RRM, RBD, or RNP domain Pfam Description: RNA recognition motif.
  misc_feature (1)..(155): NCBI GI NO: 12407751 NR Description: initiation factor 3g [Arabidopsis thaliana]
  misc_feature (1)..(155): NCBI GI NO: 15229743 NR Description: eukaryotic translation initiation factor 3 subunitg
  misc_feature (1)..(155): NCBI GI NO: 10177573 NR Description: eukaryotic translation initiation factor 3 subunit-like protein
  misc_feature (1)..(155): NCBI GI NO: 30681225 NR Description: eukaryotic translation initiation factor 3
  misc_feature (1)..(153): NCBI GI NO: 19112519 NR Description: eukaryotic translation iation factor 3 rna-binding subunit
  misc_feature (1)..(152): NCBI GI NO: 29124629 NR Description: Similar to eukaryotic translation initiation factor3
  misc_feature (1)..(153): NCBI GI NO: 2951777 NR Description: translation initiation factor 3
  misc_feature (1)..(152): NCBI GI NO: 23503064 NR Description: Eukaryotic translation initiation factor 3 subunit4
  misc_feature (1)..(152): NCBI GI NO: 30583983 NR Description: Homo sapiens eukaryotic translation initiationfactor 3
  misc_feature (1)..(150): NCBI GI NO: 40738468 NR Description: hypothetical protein AN6017.2
MVCRTCGKKGDHWTSKCPYKDLAPPTDASDMPPTSDGPAALSGPAKGSYVAPRLRAGAVHTDAGHDMRRRNDENSVRVTNLSEDTREPDLLELFRTFGPVSRVYVAVDQKTGMSRGFGFVNFVHREDAEKAISKLNGYGYDNLILHVEMAAPRPT

SEQ ID NO: 14800 - DNA, 1428 bp, Triticum aestivum
  misc_feature (1)..(1428): Ceres Seq. ID no. 15169639
ccggccactggccaagcatgaagcatccccattccttttcctttccgtagctttcttctttgccgctttgcgtgcctccctctctcgctctctcgtccgcagcagctgggacgatggggacgatgaggtcgtcggcggtggcggtagcggcgcggaagcagcagctgctgccatgcttggccctgctgcttcttgcgggggcggcgtccgcccaggcccagaagtacaacgcggtgttcaacttcggcgactccatcactgacacgggcaacctgtgcacgagcgggaagccgacggcgatcaccttcacgcagcccccctacggcgagacctacttcggcacccccacctgccggtgctccgacggccgcgtcatcgtcgacttcctcagcaccaagtttggggtgcctttcctgccaccgtccaaggcgaacggcacggacttcaagcagggtgcgaacatggccatcacgggggcgacggccatggacgcgcccttcttccgcggcctcggcctctcggacaagatctggaacaacgggcccatcagcttccagatccagtggttccagcagatcgccgccactgtgtgcgggaacgactgcaagcggtacctgcgcgagtcactggtggtgttcggcgagttcggcggcaacgactacaacgcgatgctgttcggcaactacaacccggaccaagcgagcaggtacacgaccaagatcgtcaacaccatcatcaggggcgtggagaaggtggtggcaatgggggccagggacgtggtggtgcccggggtgctccccatcggctgcttccccatctacctcaccgtctacggcaccaacagcagcgccgactacgacgccctcggctgcctccgcaagttcaacgacctctccaccttccacaacaacctgctccaggccaagatcgcccgcctccggaagcgctacggccgggcggcgcgcatcatgtacggcgacttctactccgccgtctacgacatggtccagaacccaaacaaatacggattcaacgcggctttcgaggcgtgctgcggctccgggggaggcaagtacaactacgccaacagcgcgaggtgcgggatgcagggcgcggcggcgtgcgccaacccggccgaccacctcagctgggacggcatccacctcaccgaggctgcctacaagcagatcaccgacggctggctcaacgggccctactgcagcccgcccatcctccacacttaaacattattttatttatttatttatatatggagttgggtagtattatttattatttgatttgaggttgagtttaccgaaaggaaaaagggaaatttgattcagtgccgtatggtggtgctgagatgtatacgttgcccaagaaaaaaaaatggaggcaactcttgaataaattgttaatgtttcc

SEQ ID NO: 14801 - protein, 376 aa, Triticum aestivum
  peptide (1)..(376): Ceres Seq. ID no. 15169640
  misc_feature (41)..(363): Pfam Name: Pfam Description:  GDSL-like Lipase/Acylhydrolase
  misc_feature (11)..(375): NCBI GI NO: 34903956 NR Description: OSJNBa0038J17.23
  misc_feature (33)..(376): NCBI GI NO: 34903958 NR Description: OSJNBa0038J17.24
  misc_feature (1)..(374): NCBI GI NO: 34903978 NR Description: unnamed protein product
  misc_feature (18)..(374): NCBI GI NO: 34903996 NR Description: unnamed protein product
  misc_feature (13)..(374): NCBI GI NO: 34903994 NR Description: unnamed protein product
  misc_feature (1)..(372): NCBI GI NO: 10764858 NR Description: F1K23.17 [Arabidopsis thaliana]
  misc_feature (38)..(372): NCBI GI NO: 10764858 NR Description: F1K23.17 [Arabidopsis thaliana]
  misc_feature (29)..(373): NCBI GI NO: 34894838 NR Description: putative lipase homolog
  misc_feature (38)..(211): NCBI GI NO: 34912612 NR Description: P0046B10.23
  misc_feature (18)..(376): NCBI GI NO: 15231809 NR Description: GDSL-motif lipase/hydrolase protein
MGTMRSSAVAVAARKQQLLPCLALLLLAGAASAQAQKYNAVFNFGDSITDTGNLCTSGKPTAITFTQPPYGETYFGTPTCRCSDGRVIVDFLSTKFGVPFLPPSKANGTDFKQGANMAITGATAMDAPFFRGLGLSDKIWNNGPISFQIQWFQQIAATVCGNDCKRYLRESLVVFGEFGGNDYNAMLFGNYNPDQASRYTTKIVNTIIRGVEKVVAMGARDVVVPGVLPIGCFPIYLTVYGTNSSADYDALGCLRKFNDLSTFHNNLLQAKIARLRKRYGRAARIMYGDFYSAVYDMVQNPNKYGFNAAFEACCGSGGGKYNYANSARCGMQGAAACANPADHLSWDGIHLTEAAYKQITDGWLNGPYCSPPILHT

SEQ ID NO: 14802 - protein, 373 aa, Triticum aestivum
  peptide (1)..(373): Ceres Seq. ID no. 15169641
  misc_feature (38)..(360): Pfam Name: Pfam Description:  GDSL-like Lipase/Acylhydrolase
  misc_feature (8)..(372): NCBI GI NO: 34903956 NR Description: OSJNBa0038J17.23
  misc_feature (30)..(373): NCBI GI NO: 34903958 NR Description: OSJNBa0038J17.24
  misc_feature (1)..(371): NCBI GI NO: 34903978 NR Description: unnamed protein product
  misc_feature (15)..(371): NCBI GI NO: 34903996 NR Description: unnamed protein product
  misc_feature (10)..(371): NCBI GI NO: 34903994 NR Description: unnamed protein product
  misc_feature (1)..(369): NCBI GI NO: 10764858 NR Description: F1K23.17 [Arabidopsis thaliana]
  misc_feature (35)..(369): NCBI GI NO: 10764858 NR Description: F1K23.17 [Arabidopsis thaliana]
  misc_feature (26)..(370): NCBI GI NO: 34894838 NR Description: putative lipase homolog
  misc_feature (35)..(208): NCBI GI NO: 34912612 NR Description: P0046B10.23
  misc_feature (15)..(373): NCBI GI NO: 15231809 NR Description: GDSL-motif lipase/hydrolase protein
MRSSAVAVAARKQQLLPCLALLLLAGAASAQAQKYNAVFNFGDSITDTGNLCTSGKPTAITFTQPPYGETYFGTPTCRCSDGRVIVDFLSTKFGVPFLPPSKANGTDFKQGANMAITGATAMDAPFFRGLGLSDKIWNNGPISFQIQWFQQIAATVCGNDCKRYLRESLVVFGEFGGNDYNAMLFGNYNPDQASRYTTKIVNTIIRGVEKVVAMGARDVVVPGVLPIGCFPIYLTVYGTNSSADYDALGCLRKFNDLSTFHNNLLQAKIARLRKRYGRAARIMYGDFYSAVYDMVQNPNKYGFNAAFEACCGSGGGKYNYANSARCGMQGAAACANPADHLSWDGIHLTEAAYKQITDGWLNGPYCSPPILHT

SEQ ID NO: 14803 - protein, 260 aa, Triticum aestivum
  peptide (1)..(260): Ceres Seq. ID no. 15169642
  misc_feature (1)..(247): Pfam Name: Pfam Description:  GDSL-like Lipase/Acylhydrolase
  misc_feature (1)..(259): NCBI GI NO: 34903956 NR Description: OSJNBa0038J17.23
  misc_feature (1)..(260): NCBI GI NO: 34903958 NR Description: OSJNBa0038J17.24
  misc_feature (1)..(258): NCBI GI NO: 34903978 NR Description: unnamed protein product
  misc_feature (1)..(258): NCBI GI NO: 34903996 NR Description: unnamed protein product
  misc_feature (1)..(258): NCBI GI NO: 34903994 NR Description: unnamed protein product
  misc_feature (1)..(256): NCBI GI NO: 10764858 NR Description: F1K23.17 [Arabidopsis thaliana]
  misc_feature (1)..(256): NCBI GI NO: 10764858 NR Description: F1K23.17 [Arabidopsis thaliana]
  misc_feature (1)..(257): NCBI GI NO: 34894838 NR Description: putative lipase homolog
  misc_feature (1)..(95): NCBI GI NO: 34912612 NR Description: P0046B10.23
  misc_feature (1)..(260): NCBI GI NO: 15231809 NR Description: GDSL-motif lipase/hydrolase protein
MAITGATAMDAPFFRGLGLSDKIWNNGPISFQIQWFQQIAATVCGNDCKRYLRESLVVFGEFGGNDYNAMLFGNYNPDQASRYTTKIVNTIIRGVEKVVAMGARDVVVPGVLPIGCFPIYLTVYGTNSSADYDALGCLRKFNDLSTFHNNLLQAKIARLRKRYGRAARIMYGDFYSAVYDMVQNPNKYGFNAAFEACCGSGGGKYNYANSARCGMQGAAACANPADHLSWDGIHLTEAAYKQITDGWLNGPYCSPPILHT

SEQ ID NO: 14804 - DNA, 1159 bp, Triticum aestivum
  misc_feature (1)..(1159): Ceres Seq. ID no. 13662725
cccaagcgaagccaaaggcagccttcacctgtacgcggcgcccaatctagtccaacccctccgccggcgccagatcgcggaggaccctgccgtctcccgcccattctccgcaaaggtctccatgctcatgagatgcaagcacatttgattttctataagttcaacgggcactaatgttaactgaagtattttcctcgatggaggctgaagctgattttgatgttgaagattccagatcaaacaatgaactgcaggagttgtggccagttggtgagatagacccaaagagagggcgattcccttgttgcattgtctggactcctcttcctgtagtttcatggcttgctccttacatagggcatgttggaatctgtcaggaggatggatctgtcctggattttgctggttcaaatttagtgagcatggataattttgcatatggttctgtcgctagatacctccagctggacagaaagaagtgctgctttcctgctaatctggcggcacatgtatgcgagtggtcatacaaacacacagaagttggaacagcaacatcatgggatggagccctgcaactgggcacgagacatttccagcacaaatactacaacctgttcacctgcaactgttactcattcgtggcaaactgcctgaaccggcttgcccacggtggttcggcggagtggaatgttttgaatgtggcagctcttgtttggctgcacggcgagtgggtggacaaaatgtctatcgttcggtcattcgcgccattcgtaactgtgacgtgcatcggtatttttatggccggctggtctttcctaatagggatattggcgttctgtttgcttctgatagggtggtttgtctttgctgtatactgcacgaaaggtttggtgtgctgatattacattgcgactgaacctggtgaggaattgtggaaataatctgtctgggaccattcatccatgctcgtgattattcgtctgaaacttatcaaaacactgcacctgctaaggcctcctttgctgtgtaggatatgaacactacagaaatgggaaagctgtagaaagtgagatacatgtatctgaaattctatgaatggaaatatgaaaagagatatcatttggttcagacggtatgatttttagcattgagtattttt

SEQ ID NO: 14805 - protein, 241 aa, Triticum aestivum
  peptide (1)..(241): Ceres Seq. ID no. 13662726
  misc_feature (34)..(215): Pfam Name: DUF778 Pfam Description: Protein of unknown function
  misc_feature (1)..(241): NCBI GI NO: 34910502 NR Description: P0456F08.26
  misc_feature (9)..(240): NCBI GI NO: 7452462 NR Description: hypothetical protein At2g26070
  misc_feature (9)..(240): NCBI GI NO: 30682996 NR Description: expressed protein [Arabidopsis thaliana]
  misc_feature (51)..(240): NCBI GI NO: 26449550 NR Description: unknown protein [Arabidopsis thaliana]
  misc_feature (35)..(240): NCBI GI NO: 34897172 NR Description: hypothetical protein
  misc_feature (34)..(240): NCBI GI NO: 15230386 NR Description: expressed protein [Arabidopsis thaliana]
  misc_feature (34)..(240): NCBI GI NO: 21592754 NR Description: unknown [Arabidopsis thaliana]
  misc_feature (35)..(120): NCBI GI NO: 14149779 NR Description: hypothetical protein DKFZp564D0478 [Homo sapiens]
  misc_feature (35)..(120): NCBI GI NO: 19848938 NR Description: hypothetical protein SB71 [Homo sapiens]
  misc_feature (128)..(209): NCBI GI NO: 14149779 NR Description: hypothetical protein DKFZp564D0478 [Homo sapiens]
MLTEVFSSMEAEADFDVEDSRSNNELQELWPVGEIDPKRGRFPCCIVWTPLPVVSWLAPYIGHVGICQEDGSVLDFAGSNLVSMDNFAYGSVARYLQLDRKKCCFPANLAAHVCEWSYKHTEVGTATSWDGALQLGTRHFQHKYYNLFTCNCYSFVANCLNRLAHGGSAEWNVLNVAALVWLHGEWVDKMSIVRSFAPFVTVTCIGIFMAGWSFLIGILAFCLLLIGWFVFAVYCTKGLVC

SEQ ID NO: 14806 - protein, 233 aa, Triticum aestivum
  peptide (1)..(233): Ceres Seq. ID no. 13662727
  misc_feature (26)..(207): Pfam Name: DUF778 Pfam Description: Protein of unknown function
  misc_feature (1)..(233): NCBI GI NO: 34910502 NR Description: P0456F08.26
  misc_feature (1)..(232): NCBI GI NO: 7452462 NR Description: hypothetical protein At2g26070
  misc_feature (1)..(232): NCBI GI NO: 30682996 NR Description: expressed protein [Arabidopsis thaliana]
  misc_feature (43)..(232): NCBI GI NO: 26449550 NR Description: unknown protein [Arabidopsis thaliana]
  misc_feature (27)..(232): NCBI GI NO: 34897172 NR Description: hypothetical protein
  misc_feature (26)..(232): NCBI GI NO: 15230386 NR Description: expressed protein [Arabidopsis thaliana]
  misc_feature (26)..(232): NCBI GI NO: 21592754 NR Description: unknown [Arabidopsis thaliana]
  misc_feature (27)..(112): NCBI GI NO: 14149779 NR Description: hypothetical protein DKFZp564D0478 [Homo sapiens]
  misc_feature (27)..(112): NCBI GI NO: 19848938 NR Description: hypothetical protein SB71 [Homo sapiens]
  misc_feature (120)..(201): NCBI GI NO: 14149779 NR Description: hypothetical protein DKFZp564D0478 [Homo sapiens]
MEAEADFDVEDSRSNNELQELWPVGEIDPKRGRFPCCIVWTPLPVVSWLAPYIGHVGICQEDGSVLDFAGSNLVSMDNFAYGSVARYLQLDRKKCCFPANLAAHVCEWSYKHTEVGTATSWDGALQLGTRHFQHKYYNLFTCNCYSFVANCLNRLAHGGSAEWNVLNVAALVWLHGEWVDKMSIVRSFAPFVTVTCIGIFMAGWSFLIGILAFCLLLIGWFVFAVYCTKGLVC

SEQ ID NO: 14807 - protein, 158 aa, Triticum aestivum
  peptide (1)..(158): Ceres Seq. ID no. 13662728
  misc_feature (1)..(132): Pfam Name: DUF778 Pfam Description: Protein of unknown function
  misc_feature (1)..(158): NCBI GI NO: 34910502 NR Description: P0456F08.26
  misc_feature (1)..(157): NCBI GI NO: 7452462 NR Description: hypothetical protein At2g26070
  misc_feature (1)..(157): NCBI GI NO: 30682996 NR Description: expressed protein [Arabidopsis thaliana]
  misc_feature (1)..(157): NCBI GI NO: 26449550 NR Description: unknown protein [Arabidopsis thaliana]
  misc_feature (1)..(157): NCBI GI NO: 34897172 NR Description: hypothetical protein
  misc_feature (1)..(157): NCBI GI NO: 15230386 NR Description: expressed protein [Arabidopsis thaliana]
  misc_feature (1)..(157): NCBI GI NO: 21592754 NR Description: unknown [Arabidopsis thaliana]
  misc_feature (1)..(37): NCBI GI NO: 14149779 NR Description: hypothetical protein DKFZp564D0478 [Homo sapiens]
  misc_feature (1)..(37): NCBI GI NO: 19848938 NR Description: hypothetical protein SB71 [Homo sapiens]
  misc_feature (45)..(126): NCBI GI NO: 14149779 NR Description: hypothetical protein DKFZp564D0478 [Homo sapiens]
MDNFAYGSVARYLQLDRKKCCFPANLAAHVCEWSYKHTEVGTATSWDGALQLGTRHFQHKYYNLFTCNCYSFVANCLNRLAHGGSAEWNVLNVAALVWLHGEWVDKMSIVRSFAPFVTVTCIGIFMAGWSFLIGILAFCLLLIGWFVFAVYCTKGLVC

SEQ ID NO: 14808 - DNA, 1276 bp, Triticum aestivum
  misc_feature (1)..(1276): Ceres Seq. ID no. 14303600
gaaaaagtaatcctgttatctcctcgcgtcgccctcggcgcaataataaaagcgcaacggcacccagcgatctaggcctcctcctcgctcgcatcgccttccctccgctcgcgtctgctacacttcctctcccggcccggctagatctcgccggcaggagatggcggacgcgaagcagcagcaggccgcggcgcccactggcgtctggaagacgatcaagccattcgtcaatggcggcgcctccgggatgctcgccacctgcgtcatccagcccatcgacatgatcaaggtgaagatccagttgggcgagggatctgcagctcaggtcgcaaagaccatgtatgctaatgagggccttggttccttttacaagggtttgtcagctggtttactaaggcaagcgacctatacgacagctcgtcttggatccttcagggttttgacaaacaaagcaattgaggcaaatgatgggaagccattgccacttgttcagaaagcttttattggtctgactgctggagcgattggcgcatgtgtgggcagtcctgctgatttggcactcattaggatgcaagctgactcgaccctaccagcagcacagcggcgtcactacaagaatgcattccatgcactctaccgtatcaccgctgatgaaggcgtccttgcgctttggaagggtgcaggcccaactgtggtgagagccatgtcactgaatatgggtatgcttgcgtcctatgatcaaagtgttgagctgttcagagacaaattgggtgccggggaatatcagactgttattggagccagtgccatttctggattctgtgcggctgcttgcagtctgccctttgattacgtgaaaacacaaattcagaagatgcaacctgatgccactggcaagtacccatacactgggtctttggactgcgccatgcaaaccttgaagaccggtggcccatttaagttctactccggcttccctgtatattgtgtcaggatcgccccgcatgtcatgatgacgtggctcttcttgaatcaaatccagaagtaccagaagaagatcggcatataagatctccagttggagacaagagtaccaatccttgttcgacacatttaataactttccagcagctttgcactcccgtggttgtttttggtagacagagttttaagcaatttttaccgtagcttacatttgctgtggtactcttgacgttgttacaataatcacataatcacattatttgttgtatttggggcaatttttttggcgggc

SEQ ID NO: 14809 - protein, 302 aa, Triticum aestivum
  peptide (1)..(302): Ceres Seq. ID no. 14303601
  misc_feature (1)..(302): NCBI GI NO: 2130089 NR Description: 2-oxoglutarate/malate translocator
  misc_feature (1)..(302): NCBI GI NO: 2130090 NR Description: 2-oxoglutarate/malate translocator
  misc_feature (1)..(302): NCBI GI NO: 19913109 NR Description: dicarboxylate/tricarboxylate carrier
  misc_feature (7)..(302): NCBI GI NO: 15241167 NR Description: mitochondrial 2-oxoglutarate/malate translocator
  misc_feature (14)..(302): NCBI GI NO: 7489246 NR Description: oxoglutarate/malate translocator - potato
  misc_feature (14)..(302): NCBI GI NO: 10798640 NR Description: mitochondrial 2-oxoglutarate/malate carrier
  misc_feature (14)..(302): NCBI GI NO: 19913105 NR Description: dicarboxylate/tricarboxylate carrier
  misc_feature (14)..(302): NCBI GI NO: 19913107 NR Description: dicarboxylate/tricarboxylate carrier
  misc_feature (78)..(302): NCBI GI NO: 19913111 NR Description: dicarboxylate/tricarboxylate carrier
  misc_feature (85)..(302): NCBI GI NO: 2331139 NR Description: 2-oxoglutarate/malate translocator [Oryza sativa]
MADAKQQQAAAPTGVWKTIKPFVNGGASGMLATCVIQPIDMIKVKIQLGEGSAAQVAKTMYANEGLGSFYKGLSAGLLRQATYTTARLGSFRVLTNKAIEANDGKPLPLVQKAFIGLTAGAIGACVGSPADLALIRMQADSTLPAAQRRHYKNAFHALYRITADEGVLALWKGAGPTVVRAMSLNMGMLASYDQSVELFRDKLGAGEYQTVIGASAISGFCAAACSLPFDYVKTQIQKMQPDATGKYPYTGSLDCAMQTLKTGGPFKFYSGFPVYCVRIAPHVMMTWLFLNQIQKYQKKIGI

SEQ ID NO: 14810 - protein, 273 aa, Triticum aestivum
  peptide (1)..(273): Ceres Seq. ID no. 14303602
  misc_feature (1)..(273): NCBI GI NO: 2130089 NR Description: 2-oxoglutarate/malate translocator
  misc_feature (1)..(273): NCBI GI NO: 2130090 NR Description: 2-oxoglutarate/malate translocator
  misc_feature (1)..(273): NCBI GI NO: 19913109 NR Description: dicarboxylate/tricarboxylate carrier
  misc_feature (1)..(273): NCBI GI NO: 15241167 NR Description: mitochondrial 2-oxoglutarate/malate translocator
  misc_feature (1)..(273): NCBI GI NO: 7489246 NR Description: oxoglutarate/malate translocator - potato
  misc_feature (1)..(273): NCBI GI NO: 10798640 NR Description: mitochondrial 2-oxoglutarate/malate carrier
  misc_feature (1)..(273): NCBI GI NO: 19913107 NR Description: dicarboxylate/tricarboxylate carrier
  misc_feature (1)..(273): NCBI GI NO: 19913105 NR Description: dicarboxylate/tricarboxylate carrier
  misc_feature (49)..(273): NCBI GI NO: 19913111 NR Description: dicarboxylate/tricarboxylate carrier
  misc_feature (56)..(273): NCBI GI NO: 2331139 NR Description: 2-oxoglutarate/malate translocator [Oryza sativa]
MLATCVIQPIDMIKVKIQLGEGSAAQVAKTMYANEGLGSFYKGLSAGLLRQATYTTARLGSFRVLTNKAIEANDGKPLPLVQKAFIGLTAGAIGACVGSPADLALIRMQADSTLPAAQRRHYKNAFHALYRITADEGVLALWKGAGPTVVRAMSLNMGMLASYDQSVELFRDKLGAGEYQTVIGASAISGFCAAACSLPFDYVKTQIQKMQPDATGKYPYTGSLDCAMQTLKTGGPFKFYSGFPVYCVRIAPHVMMTWLFLNQIQKYQKKIGI

SEQ ID NO: 14811 - protein, 262 aa, Triticum aestivum
  peptide (1)..(262): Ceres Seq. ID no. 14303603
  misc_feature (1)..(262): NCBI GI NO: 2130089 NR Description: 2-oxoglutarate/malate translocator
  misc_feature (1)..(262): NCBI GI NO: 2130090 NR Description: 2-oxoglutarate/malate translocator
  misc_feature (1)..(262): NCBI GI NO: 19913109 NR Description: dicarboxylate/tricarboxylate carrier
  misc_feature (1)..(262): NCBI GI NO: 15241167 NR Description: mitochondrial 2-oxoglutarate/malate translocator
  misc_feature (1)..(262): NCBI GI NO: 7489246 NR Description: oxoglutarate/malate translocator - potato
  misc_feature (1)..(262): NCBI GI NO: 10798640 NR Description: mitochondrial 2-oxoglutarate/malate carrier
  misc_feature (1)..(262): NCBI GI NO: 19913105 NR Description: dicarboxylate/tricarboxylate carrier
  misc_feature (1)..(262): NCBI GI NO: 19913107 NR Description: dicarboxylate/tricarboxylate carrier
  misc_feature (38)..(262): NCBI GI NO: 19913111 NR Description: dicarboxylate/tricarboxylate carrier
  misc_feature (45)..(262): NCBI GI NO: 2331139 NR Description: 2-oxoglutarate/malate translocator [Oryza sativa]
MIKVKIQLGEGSAAQVAKTMYANEGLGSFYKGLSAGLLRQATYTTARLGSFRVLTNKAIEANDGKPLPLVQKAFIGLTAGAIGACVGSPADLALIRMQADSTLPAAQRRHYKNAFHALYRITADEGVLALWKGAGPTVVRAMSLNMGMLASYDQSVELFRDKLGAGEYQTVIGASAISGFCAAACSLPFDYVKTQIQKMQPDATGKYPYTGSLDCAMQTLKTGGPFKFYSGFPVYCVRIAPHVMMTWLFLNQIQKYQKKIGI

SEQ ID NO: 14812 - DNA, 1783 bp, Triticum aestivum
  misc_feature (1)..(1783): Ceres Seq. ID no. 13655852
cccgaatccaaatccgccattgcacagccggaccagtgccactcgaaccccacgtaccctctctatcccaaccctagcgcggcggcggcgtcgatggcgtcgatggcgtcgatcccgtctgacgaggtctccgagaacggccacggcaacggaaacggcccatccccgccgcgcgccaagcgcccccgcgcagcgttgatctcggccgcccagatccgcgacgagttcgcgcatcacgaccccgcagttgcccgcgtcaacaacggcagcttcggctgctgcccggcctccgtgctcgaagcgcaggcgcgctggcagcgcctcttcctcgctcagcccgacgccttctacttcgacggccttcagccggggctccgccgctcccgcgcagccgtcgcggcccttgtcaacgctggggacgtctccgagatttccctcgtcgacaacgctaccaccgctgctgcaatcgtgctgcagcatgccgcctggagctttgccgaggggcacttcgctcgtggcgacgctgtgctcatgctccattacgcctacggagcagtaaagaaatctatccaggcctacgttgcccgcgcgggcgccactgtcgtcgaggtacccctcccgttcccggtcacctcccctgacgccattattgcggagttccatgctgcgctcgctgttgccaaggccggtggtcgtaaggtccggcttgctgtcattgatcacatcacctccatgcccagtgttctcattccagtcaaggagctagttgccatttgtcgccatgagggtgtcgacaaagtttttgttgatgctgcacactctgttgggcaagtccctgtcgatgtgcgagacattggggcggatttctacactagcaacctccacaagtggttcttttgccccccggccgtggctttcttacacacccgcaagggtggcccgataacctctcagctccaccaccctgttgtgtcacatgaatatggcaacgggctacctatggagagtggatggattgggacacgggattacagtgcccagatcgtcgttcctgaagctattcactttgtgaaccgatttgaaggtgggattgaggggatacgcagccggaaccatgagaaggtaattgagatggggaggatgcttgccgaagcatgggggacagttcttggatcaccaccagtaatgtgtggaagcatggctatggtagggatgcctagttgtctttgcattgagagtgacgatgatgcactgagagtgcggaccatgttgaggaaggatttcaaagttgaggtgcctatatactacaatagcagacaggttaaagtgcaagagatggcaaaggataatagtagtgatccagtgacggggtatgtaagaatctcacaccaggtttacaatgtcaaggaggagtatgagaggctgagagatgctgtcaataagcttgttgctgaggggttcaccagtgccgaattgaggccagctgagaagcaagaagctctggcttgatgacgtggcatctagccagcactccatccgaagatggattaattagttgtggatctgtgccagaagcctgtgctgcaccgagatcgagttctttggtagcccgctcaatggcatcgccatttgatgtagtgtactttcacatactgacaaatgttgtatttgagcttgcaataacgtgcactggaatggaatgtatgtcttctcccttcacttgcatttttgagctgtaatgtaagaataatgatctgaatgcaaggagacttgcatgctttct

SEQ ID NO: 14813 - protein, 502 aa, Triticum aestivum
  peptide (1)..(502): Ceres Seq. ID no. 13655853
  misc_feature (94)..(475): Pfam Name: Pfam Description:  Aminotransferase class-V
  misc_feature (23)..(502): NCBI GI NO: 34894318 NR Description: unnamed protein product
  misc_feature (35)..(497): NCBI GI NO: 34894322 NR Description: unnamed protein product
  misc_feature (60)..(492): NCBI GI NO: 30690360 NR Description: expressed protein [Arabidopsis thaliana]
  misc_feature (42)..(495): NCBI GI NO: 15228693 NR Description: expressed protein [Arabidopsis thaliana]
  misc_feature (67)..(478): NCBI GI NO: 21230669 NR Description: isopenicillin N epimerase
  misc_feature (80)..(481): NCBI GI NO: 17548917 NR Description: PUTATIVE ISOPENICILLIN N EPIMERASE PROTEIN
  misc_feature (80)..(308): NCBI GI NO: 40738451 NR Description: hypothetical protein AN6227.2
  misc_feature (76)..(388): NCBI GI NO: 25463395 NR Description: hypothetical protein
  misc_feature (80)..(485): NCBI GI NO: 116093 NR Description: Isopenicillin N epimerase
  misc_feature (80)..(482): NCBI GI NO: 399225 NR Description: Isopenicillin N epimerase
PESKSAIAQPDQCHSNPTYPLYPNPSAAAASMASMASIPSDEVSENGHGNGNGPSPPRAKRPRAALISAAQIRDEFAHHDPAVARVNNGSFGCCPASVLEAQARWQRLFLAQPDAFYFDGLQPGLRRSRAAVAALVNAGDVSEISLVDNATTAAAIVLQHAAWSFAEGHFARGDAVLMLHYAYGAVKKSIQAYVARAGATVVEVPLPFPVTSPDAIIAEFHAALAVAKAGGRKVRLAVIDHITSMPSVLIPVKELVAICRHEGVDKVFVDAAHSVGQVPVDVRDIGADFYTSNLHKWFFCPPAVAFLHTRKGGPITSQLHHPVVSHEYGNGLPMESGWIGTRDYSAQIVVPEAIHFVNRFEGGIEGIRSRNHEKVIEMGRMLAEAWGTVLGSPPVMCGSMAMVGMPSCLCIESDDDALRVRTMLRKDFKVEVPIYYNSRQVKVQEMAKDNSSDPVTGYVRISHQVYNVKEEYERLRDAVNKLVAEGFTSAELRPAEKQEALA

SEQ ID NO: 14814 - protein, 471 aa, Triticum aestivum
  peptide (1)..(471): Ceres Seq. ID no. 13655854
  misc_feature (63)..(444): Pfam Name: Pfam Description:  Aminotransferase class-V
  misc_feature (1)..(471): NCBI GI NO: 34894318 NR Description: unnamed protein product
  misc_feature (4)..(466): NCBI GI NO: 34894322 NR Description: unnamed protein product
  misc_feature (29)..(461): NCBI GI NO: 30690360 NR Description: expressed protein [Arabidopsis thaliana]
  misc_feature (11)..(464): NCBI GI NO: 15228693 NR Description: expressed protein [Arabidopsis thaliana]
  misc_feature (36)..(447): NCBI GI NO: 21230669 NR Description: isopenicillin N epimerase
  misc_feature (49)..(450): NCBI GI NO: 17548917 NR Description: PUTATIVE ISOPENICILLIN N EPIMERASE PROTEIN
  misc_feature (49)..(277): NCBI GI NO: 40738451 NR Description: hypothetical protein AN6227.2
  misc_feature (45)..(357): NCBI GI NO: 25463395 NR Description: hypothetical protein
  misc_feature (49)..(454): NCBI GI NO: 116093 NR Description: Isopenicillin N epimerase
  misc_feature (49)..(451): NCBI GI NO: 399225 NR Description: Isopenicillin N epimerase
MASMASIPSDEVSENGHGNGNGPSPPRAKRPRAALISAAQIRDEFAHHDPAVARVNNGSFGCCPASVLEAQARWQRLFLAQPDAFYFDGLQPGLRRSRAAVAALVNAGDVSEISLVDNATTAAAIVLQHAAWSFAEGHFARGDAVLMLHYAYGAVKKSIQAYVARAGATVVEVPLPFPVTSPDAIIAEFHAALAVAKAGGRKVRLAVIDHITSMPSVLIPVKELVAICRHEGVDKVFVDAAHSVGQVPVDVRDIGADFYTSNLHKWFFCPPAVAFLHTRKGGPITSQLHHPVVSHEYGNGLPMESGWIGTRDYSAQIVVPEAIHFVNRFEGGIEGIRSRNHEKVIEMGRMLAEAWGTVLGSPPVMCGSMAMVGMPSCLCIESDDDALRVRTMLRKDFKVEVPIYYNSRQVKVQEMAKDNSSDPVTGYVRISHQVYNVKEEYERLRDAVNKLVAEGFTSAELRPAEKQEALA

SEQ ID NO: 14815 - protein, 468 aa, Triticum aestivum
  peptide (1)..(468): Ceres Seq. ID no. 13655855
  misc_feature (60)..(441): Pfam Name: Pfam Description:  Aminotransferase class-V
  misc_feature (1)..(468): NCBI GI NO: 34894318 NR Description: unnamed protein product
  misc_feature (1)..(463): NCBI GI NO: 34894322 NR Description: unnamed protein product
  misc_feature (26)..(458): NCBI GI NO: 30690360 NR Description: expressed protein [Arabidopsis thaliana]
  misc_feature (8)..(461): NCBI GI NO: 15228693 NR Description: expressed protein [Arabidopsis thaliana]
  misc_feature (33)..(444): NCBI GI NO: 21230669 NR Description: isopenicillin N epimerase
  misc_feature (46)..(447): NCBI GI NO: 17548917 NR Description: PUTATIVE ISOPENICILLIN N EPIMERASE PROTEIN
  misc_feature (46)..(274): NCBI GI NO: 40738451 NR Description: hypothetical protein AN6227.2
  misc_feature (42)..(354): NCBI GI NO: 25463395 NR Description: hypothetical protein
  misc_feature (46)..(451): NCBI GI NO: 116093 NR Description: Isopenicillin N epimerase
  misc_feature (46)..(448): NCBI GI NO: 399225 NR Description: Isopenicillin N epimerase
MASIPSDEVSENGHGNGNGPSPPRAKRPRAALISAAQIRDEFAHHDPAVARVNNGSFGCCPASVLEAQARWQRLFLAQPDAFYFDGLQPGLRRSRAAVAALVNAGDVSEISLVDNATTAAAIVLQHAAWSFAEGHFARGDAVLMLHYAYGAVKKSIQAYVARAGATVVEVPLPFPVTSPDAIIAEFHAALAVAKAGGRKVRLAVIDHITSMPSVLIPVKELVAICRHEGVDKVFVDAAHSVGQVPVDVRDIGADFYTSNLHKWFFCPPAVAFLHTRKGGPITSQLHHPVVSHEYGNGLPMESGWIGTRDYSAQIVVPEAIHFVNRFEGGIEGIRSRNHEKVIEMGRMLAEAWGTVLGSPPVMCGSMAMVGMPSCLCIESDDDALRVRTMLRKDFKVEVPIYYNSRQVKVQEMAKDNSSDPVTGYVRISHQVYNVKEEYERLRDAVNKLVAEGFTSAELRPAEKQEALA

SEQ ID NO: 14816 - DNA, 1104 bp, Triticum aestivum
  misc_feature (1)..(1104): Ceres Seq. ID no. 12625870
tcccacccctttacctcgtgcgatcactgagaaccataggtagaagaaaccctcgaagagcagctcttaggctcgcactctcgaatcctagcccccttgtccgcttcaattggagtcgcagggtgagggtaccgggtcgagcttctgggccagcatggtgcccagggacatggtgaatgcccccgccgaaaggctgcacgtccaagggtctgtcgtgaacaagaagtgtgagacgaaggtgccaaataaaatccacaagtcggagagggagaagcggaagcgaggcacgcagaatgacctctttaatgagctgggagccatgctagaaccagacaggcagaacaacgggaaggcatgtgtattgggtgacactacacggatactgaaggatttagtttcacaagtggaatctcttcggaaggagaatagcacactgaagaatgaatctcactatgttgtgttggagagaaatgaactgcgtgatgacaacagcatgcttcgcaatgaaatccaggagcttcagaacaagctgagaatgcgtctgcaaagcaaccctatttggagccaggatactactacaagatcagccgttgcagtaccttatcccacaagcggagtgttcccagtacagcattcaccacattcaccagtcatcacctcgacggcactttctctgcaacctgtaatcactgagcaatgctatgctgccccactacgagagctgcagctcttcccagaagtttcacctacatccactgaagatagcgaactgtcacaagaccagtggatttccaatagtgtaacaaggccccaggcacggtacccaacaccagcggcgatgtcgccagtaaatgagttcccaatccttccaaggatgggagaggagcaacaatatagtagtggcactagtgaggaagacggtccacacagggtttaagtacataacacaatttgcttcaccgtttgagaagtttctgtagtgtgagtggagtgtgtttctctgcaacagatacatatgcagacgtgcatgtaaactccaatctgtctccgaatcttgatcttaactggttaaataggtgataataaaaaatgctttacaccctc

SEQ ID NO: 14817 - protein, 260 aa, Triticum aestivum
  peptide (1)..(260): Ceres Seq. ID no. 12625871
  misc_feature (32)..(81): Pfam Name: Pfam Description:  Helix-loop-helix DNA-binding domain
  misc_feature (1)..(255): NCBI GI NO: 34391901 NR Description: putative transcription factor bHLH
  misc_feature (1)..(255): NCBI GI NO: 33146544 NR Description: amelogenin precursor-like protein
  misc_feature (101)..(255): NCBI GI NO: 34913194 NR Description: contains EST C74688
  misc_feature (1)..(100): NCBI GI NO: 34913194 NR Description: contains EST C74688
  misc_feature (9)..(245): NCBI GI NO: 18071393 NR Description: putative amelogenin precursor [Oryza sativa]
  misc_feature (6)..(227): NCBI GI NO: 15228207 NR Description: hypothetical protein; protein id: At3g47640
  misc_feature (32)..(169): NCBI GI NO: 15230975 NR Description: bHLH protein; protein id: At3g19860
  misc_feature (32)..(169): NCBI GI NO: 11994197 NR Description: emb|CAA18500
  misc_feature (35)..(164): NCBI GI NO: 7487183 NR Description: hypothetical protein T19K4
  misc_feature (35)..(194): NCBI GI NO: 22329204 NR Description: putative Myc-type transcription factor
MVPRDMVNAPAERLHVQGSVVNKKCETKVPNKIHKSEREKRKRGTQNDLFNELGAMLEPDRQNNGKACVLGDTTRILKDLVSQVESLRKENSTLKNESHYVVLERNELRDDNSMLRNEIQELQNKLRMRLQSNPIWSQDTTTRSAVAVPYPTSGVFPVQHSPHSPVITSTALSLQPVITEQCYAAPLRELQLFPEVSPTSTEDSELSQDQWISNSVTRPQARYPTPAAMSPVNEFPILPRMGEEQQYSSGTSEEDGPHRV

SEQ ID NO: 14818 - protein, 255 aa, Triticum aestivum
  peptide (1)..(255): Ceres Seq. ID no. 12625872
  misc_feature (27)..(76): Pfam Name: Pfam Description:  Helix-loop-helix DNA-binding domain
  misc_feature (1)..(250): NCBI GI NO: 34391901 NR Description: putative transcription factor bHLH
  misc_feature (1)..(250): NCBI GI NO: 33146544 NR Description: amelogenin precursor-like protein
  misc_feature (96)..(250): NCBI GI NO: 34913194 NR Description: contains EST C74688
  misc_feature (1)..(95): NCBI GI NO: 34913194 NR Description: contains EST C74688
  misc_feature (4)..(240): NCBI GI NO: 18071393 NR Description: putative amelogenin precursor [Oryza sativa]
  misc_feature (1)..(222): NCBI GI NO: 15228207 NR Description: hypothetical protein; protein id: At3g47640
  misc_feature (27)..(164): NCBI GI NO: 15230975 NR Description: bHLH protein; protein id: At3g19860
  misc_feature (27)..(164): NCBI GI NO: 11994197 NR Description: emb|CAA18500
  misc_feature (30)..(159): NCBI GI NO: 7487183 NR Description: hypothetical protein T19K4
  misc_feature (30)..(189): NCBI GI NO: 22329204 NR Description: putative Myc-type transcription factor
MVNAPAERLHVQGSVVNKKCETKVPNKIHKSEREKRKRGTQNDLFNELGAMLEPDRQNNGKACVLGDTTRILKDLVSQVESLRKENSTLKNESHYVVLERNELRDDNSMLRNEIQELQNKLRMRLQSNPIWSQDTTTRSAVAVPYPTSGVFPVQHSPHSPVITSTALSLQPVITEQCYAAPLRELQLFPEVSPTSTEDSELSQDQWISNSVTRPQARYPTPAAMSPVNEFPILPRMGEEQQYSSGTSEEDGPHRV

SEQ ID NO: 14819 - protein, 205 aa, Triticum aestivum
  peptide (1)..(205): Ceres Seq. ID no. 12625873
  misc_feature (1)..(200): NCBI GI NO: 34391901 NR Description: putative transcription factor bHLH
  misc_feature (1)..(200): NCBI GI NO: 33146544 NR Description: amelogenin precursor-like protein
  misc_feature (46)..(200): NCBI GI NO: 34913194 NR Description: contains EST C74688
  misc_feature (1)..(45): NCBI GI NO: 34913194 NR Description: contains EST C74688
  misc_feature (1)..(190): NCBI GI NO: 18071393 NR Description: putative amelogenin precursor [Oryza sativa]
  misc_feature (1)..(172): NCBI GI NO: 15228207 NR Description: hypothetical protein; protein id: At3g47640
  misc_feature (1)..(114): NCBI GI NO: 15230975 NR Description: bHLH protein; protein id: At3g19860
  misc_feature (1)..(114): NCBI GI NO: 11994197 NR Description: emb|CAA18500
  misc_feature (1)..(109): NCBI GI NO: 7487183 NR Description: hypothetical protein T19K4
  misc_feature (1)..(139): NCBI GI NO: 22329204 NR Description: putative Myc-type transcription factor
MLEPDRQNNGKACVLGDTTRILKDLVSQVESLRKENSTLKNESHYVVLERNELRDDNSMLRNEIQELQNKLRMRLQSNPIWSQDTTTRSAVAVPYPTSGVFPVQHSPHSPVITSTALSLQPVITEQCYAAPLRELQLFPEVSPTSTEDSELSQDQWISNSVTRPQARYPTPAAMSPVNEFPILPRMGEEQQYSSGTSEEDGPHRV

SEQ ID NO: 14820 - DNA, 1283 bp, Triticum aestivum
  misc_feature (1)..(1283): Ceres Seq. ID no. 13579918
tatctccctgcagtagacatcgcattcaggcacacataatcagcaattcagcagagtcgccaccatgggcgccaccaatcataccttgcaagcgctgctcccatggctcctcctgttcgtgcagcaggccgccgcggccagcggcgggtgcgagtgcacgaccgccacggacggggcggacaagcagggcgcgatgaagctgaagctggtcgccatcgcgtccatcctcaccgccggggcggctggcgtgctggtgccggtgctcggccgctccatggccgcgctgcgccccgacggcgacatcttcttcgcggtcaaggcgtttgccgctggcgtcatacttgccaccggcatggtgcacatcctgccggcggcgttcgacgggctcacctccccgtgcatccacaaaggcggcggggacaggaacggcttcccttttgccggccttgtggccatgtctgcagccatggccacaatggtgatagactcgctggctgctgggtactaccgccggtctcacttcagcaaggcgcgcccacttgacaacattgacatgcccggagatgaggaagggagggccgatcatccacatatgcacgcgcatggccattcacatggtgaggcaattgttgtcagctcaccggaggaggcggcgatagctgacacaatccggcacagggtggtatctcaggttctagagctgggaatcttggtgcattcagtgataattggtgtgtcattaggagcatctgtgaggccatccaccatcaagcctctggtcggtgccctcagcttccatcaattctttgaaggcataggcttgggtggttgcattgtacaggctaatttcaaggtaagggcaaccatcatcatggcaacgtttttctccctgaccgcacccgtgggcatcgtgctagggattgcgatttcatctagctataatgtgcatagctctactgccttcattattgagggagtcttcaactcagcctcggcagggattttgatctacatgtccctggtggaccttctagcaacagatttcaataacccaaagctacagacaaatacaaagcttcagctgatgacatatcttgcacttttcctaggtgcagggatgatgtccatgcttgccatatgggcatagagatcttcaaagcaattgctaaatttgcacttgtatttcctgctaaagttgaagtatgcattgtattcatccaggggttgtccatttccccaaaataatacacccttggtgaaaaattaaccatattcatccattg

SEQ ID NO: 14821 - protein, 360 aa, Triticum aestivum
  peptide (1)..(360): Ceres Seq. ID no. 13579919
  misc_feature (46)..(357): Pfam Name: Pfam Description:  ZIP Zinc transporter
  misc_feature (1)..(360): NCBI GI NO: 32492894 NR Description: zinc transporter ZIP3
  misc_feature (166)..(360): NCBI GI NO: 40888860 NR Description: TPA: putative ZIP-like protein
  misc_feature (23)..(187): NCBI GI NO: 40888860 NR Description: TPA: putative ZIP-like protein
  misc_feature (8)..(360): NCBI GI NO: 32966053 NR Description: iron transporter Fe2
  misc_feature (8)..(360): NCBI GI NO: 34900456 NR Description: putative zinc transporter protein ZIP1
  misc_feature (22)..(360): NCBI GI NO: 30841912 NR Description: putative zinc transporter OsZIP2 [Oryza sativa]
  misc_feature (15)..(360): NCBI GI NO: 15230588 NR Description: zinc transporter (ZIP1) [Arabidopsis thaliana]
  misc_feature (17)..(360): NCBI GI NO: 15220470 NR Description: metal transporter, putative (ZIP5)
  misc_feature (29)..(360): NCBI GI NO: 15418778 NR Description: zinc transporter protein ZIP1 [Glycine max]
  misc_feature (16)..(360): NCBI GI NO: 12006851 NR Description: putative Zn transport protein
MGATNHTLQALLPWLLLFVQQAAAASGGCECTTATDGADKQGAMKLKLVAIASILTAGAAGVLVPVLGRSMAALRPDGDIFFAVKAFAAGVILATGMVHILPAAFDGLTSPCIHKGGGDRNGFPFAGLVAMSAAMATMVIDSLAAGYYRRSHFSKARPLDNIDMPGDEEGRADHPHMHAHGHSHGEAIVVSSPEEAAIADTIRHRVVSQVLELGILVHSVIIGVSLGASVRPSTIKPLVGALSFHQFFEGIGLGGCIVQANFKVRATIIMATFFSLTAPVGIVLGIAISSSYNVHSSTAFIIEGVFNSASAGILIYMSLVDLLATDFNNPKLQTNTKLQLMTYLALFLGAGMMSMLAIWA

SEQ ID NO: 14822 - protein, 317 aa, Triticum aestivum
  peptide (1)..(317): Ceres Seq. ID no. 13579920
  misc_feature (3)..(314): Pfam Name: Pfam Description:  ZIP Zinc transporter
  misc_feature (1)..(317): NCBI GI NO: 32492894 NR Description: zinc transporter ZIP3
  misc_feature (123)..(317): NCBI GI NO: 40888860 NR Description: TPA: putative ZIP-like protein
  misc_feature (1)..(144): NCBI GI NO: 40888860 NR Description: TPA: putative ZIP-like protein
  misc_feature (1)..(317): NCBI GI NO: 32966053 NR Description: iron transporter Fe2
  misc_feature (1)..(317): NCBI GI NO: 34900456 NR Description: putative zinc transporter protein ZIP1
  misc_feature (1)..(317): NCBI GI NO: 30841912 NR Description: putative zinc transporter OsZIP2 [Oryza sativa]
  misc_feature (1)..(317): NCBI GI NO: 15230588 NR Description: zinc transporter (ZIP1) [Arabidopsis thaliana]
  misc_feature (1)..(317): NCBI GI NO: 15220470 NR Description: metal transporter, putative (ZIP5)
  misc_feature (1)..(317): NCBI GI NO: 15418778 NR Description: zinc transporter protein ZIP1 [Glycine max]
  misc_feature (1)..(317): NCBI GI NO: 12006851 NR Description: putative Zn transport protein
MKLKLVAIASILTAGAAGVLVPVLGRSMAALRPDGDIFFAVKAFAAGVILATGMVHILPAAFDGLTSPCIHKGGGDRNGFPFAGLVAMSAAMATMVIDSLAAGYYRRSHFSKARPLDNIDMPGDEEGRADHPHMHAHGHSHGEAIVVSSPEEAAIADTIRHRVVSQVLELGILVHSVIIGVSLGASVRPSTIKPLVGALSFHQFFEGIGLGGCIVQANFKVRATIIMATFFSLTAPVGIVLGIAISSSYNVHSSTAFIIEGVFNSASAGILIYMSLVDLLATDFNNPKLQTNTKLQLMTYLALFLGAGMMSMLAIWA

SEQ ID NO: 14823 - protein, 290 aa, Triticum aestivum
  peptide (1)..(290): Ceres Seq. ID no. 13579921
  misc_feature (1)..(287): Pfam Name: Pfam Description:  ZIP Zinc transporter
  misc_feature (1)..(290): NCBI GI NO: 32492894 NR Description: zinc transporter ZIP3
  misc_feature (96)..(290): NCBI GI NO: 40888860 NR Description: TPA: putative ZIP-like protein
  misc_feature (1)..(117): NCBI GI NO: 40888860 NR Description: TPA: putative ZIP-like protein
  misc_feature (1)..(290): NCBI GI NO: 32966053 NR Description: iron transporter Fe2
  misc_feature (1)..(290): NCBI GI NO: 34900456 NR Description: putative zinc transporter protein ZIP1
  misc_feature (1)..(290): NCBI GI NO: 30841912 NR Description: putative zinc transporter OsZIP2 [Oryza sativa]
  misc_feature (1)..(290): NCBI GI NO: 15230588 NR Description: zinc transporter (ZIP1) [Arabidopsis thaliana]
  misc_feature (1)..(290): NCBI GI NO: 15220470 NR Description: metal transporter, putative (ZIP5)
  misc_feature (1)..(290): NCBI GI NO: 15418778 NR Description: zinc transporter protein ZIP1 [Glycine max]
  misc_feature (1)..(290): NCBI GI NO: 12006851 NR Description: putative Zn transport protein
MAALRPDGDIFFAVKAFAAGVILATGMVHILPAAFDGLTSPCIHKGGGDRNGFPFAGLVAMSAAMATMVIDSLAAGYYRRSHFSKARPLDNIDMPGDEEGRADHPHMHAHGHSHGEAIVVSSPEEAAIADTIRHRVVSQVLELGILVHSVIIGVSLGASVRPSTIKPLVGALSFHQFFEGIGLGGCIVQANFKVRATIIMATFFSLTAPVGIVLGIAISSSYNVHSSTAFIIEGVFNSASAGILIYMSLVDLLATDFNNPKLQTNTKLQLMTYLALFLGAGMMSMLAIWA

SEQ ID NO: 14824 - DNA, 1499 bp, Triticum aestivum
  misc_feature (1)..(1499): Ceres Seq. ID no. 13597498
ctctcacacggctttccctctctctcctcccgttcgaactaggaatccgaggtgagcacgggcaaagcgatggccgcggccaggccgcaccacagggcgccgccggggcgcgtgcccacgaggtgcgtcgccgcgctctgcgccgcctgcttcctcctcggcgtctgcgtcgtcaaccgctactgggcggttcccgagccacccgattgcccaagcaaggcgaactctgggcgttcgagggccgtgctgagccaagcacaaacccgcgaagtcatcatcgcgttggacagaacgatatcggacatcgagatgcgcctggccgccgccagagccgcgcagatgaggaaccaaggcgtgtcgccgagtgattcagccgctgaccagggaaacatgcgacctagattgcttttcgtcatgggtatcatgaccacattcgataatcggaggcgcagagactctatcaggaagacgtggatgccacaaggtgagcgtttgcgaatgctggagaaggacaagggcattgtcacgcgttttgttattggacgaagtgcaaatcctggtcctgacagtgaagtggagcgtgccatggatgcagaagagaaagaatacaatgatattcttagacttaatcacgttgaaggccaggatgggcttcctttgaagattcagatgtttctttcaagtgctctgtccacgtgggatgctgatttctatgtcaaagttgacgatgatgttcatgtcaacattggtattaccagatcgattttggcacgacataggtcaaaacctcgggtgtacatcggctgcatgaaatccggacctgtgatcgctaacaatgaatctaaatattacgaaccagatcattggaagtttgggactgcgggtaacaactactttaggcacgcaacacggcagctgtatgctataacaagggacttggcgacctacatatcagcaaacaagcatatcttgcacaaatatacaaatgaagatgtatcatttggttcttggttgattgggttggatgttgagcatgttgatgagagaagcctttgttgtggtattcctccagactgcgaatggaaggcgcaggctgggaacccatgtggggcatccttcgactggaactgctccggcgtctgcaatccagcagagagaatggaggaggtgcaccggcgatgctgggaacatcgcgaggctgctctgccacaagcgcaggagtcttgacaatcaaggggtggtggcatccttgtgctgctccatgtaaactcatgtaaattattcggtagacgaagacgcagcagctgtcgtgccgttgtctgggttcttggagctacacatttttgccttccgacgccgtgcatttgcatgaattggaggggaaatttgaacagagctacggcatagtgaaggttttgcatcgtgtatgtaagatatccgatatgtgaaaatgaatgcaggaaagctctgcaaattgtgtcgtcatgattaaatggtcg

SEQ ID NO: 14825 - protein, 385 aa, Triticum aestivum
  peptide (1)..(385): Ceres Seq. ID no. 13597499
  misc_feature (126)..(326): Pfam Name: Pfam Description:  Galactosyltransferase
  misc_feature (46)..(373): NCBI GI NO: 15223337 NR Description: galactosyltransferase family
  misc_feature (46)..(377): NCBI GI NO: 4138265 NR Description: Avr9 elicitor response protein [Nicotiana tabacum]
  misc_feature (47)..(377): NCBI GI NO: 15220440 NR Description: galactosyltransferase family
  misc_feature (46)..(373): NCBI GI NO: 15217544 NR Description: galactosyltransferase family
  misc_feature (5)..(377): NCBI GI NO: 34907342 NR Description: putative elicitor response protein
  misc_feature (63)..(377): NCBI GI NO: 15225684 NR Description: galactosyltransferase family
  misc_feature (43)..(379): NCBI GI NO: 7485336 NR Description: hypothetical protein F10M23
  misc_feature (43)..(379): NCBI GI NO: 18416895 NR Description: galactosyltransferase family
  misc_feature (64)..(377): NCBI GI NO: 18395060 NR Description: galactosyltransferase family
  misc_feature (64)..(373): NCBI GI NO: 12323294 NR Description: putative
MAAARPHHRAPPGRVPTRCVAALCAACFLLGVCVVNRYWAVPEPPDCPSKANSGRSRAVLSQAQTREVIIALDRTISDIEMRLAAARAAQMRNQGVSPSDSAADQGNMRPRLLFVMGIMTTFDNRRRRDSIRKTWMPQGERLRMLEKDKGIVTRFVIGRSANPGPDSEVERAMDAEEKEYNDILRLNHVEGQDGLPLKIQMFLSSALSTWDADFYVKVDDDVHVNIGITRSILARHRSKPRVYIGCMKSGPVIANNESKYYEPDHWKFGTAGNNYFRHATRQLYAITRDLATYISANKHILHKYTNEDVSFGSWLIGLDVEHVDERSLCCGIPPDCEWKAQAGNPCGASFDWNCSGVCNPAERMEEVHRRCWEHREAALPQAQES

SEQ ID NO: 14826 - protein, 305 aa, Triticum aestivum
  peptide (1)..(305): Ceres Seq. ID no. 13597500
  misc_feature (46)..(246): Pfam Name: Pfam Description:  Galactosyltransferase
  misc_feature (1)..(293): NCBI GI NO: 15223337 NR Description: galactosyltransferase family
  misc_feature (1)..(297): NCBI GI NO: 4138265 NR Description: Avr9 elicitor response protein [Nicotiana tabacum]
  misc_feature (1)..(297): NCBI GI NO: 15220440 NR Description: galactosyltransferase family
  misc_feature (1)..(293): NCBI GI NO: 15217544 NR Description: galactosyltransferase family
  misc_feature (1)..(297): NCBI GI NO: 34907342 NR Description: putative elicitor response protein
  misc_feature (1)..(297): NCBI GI NO: 15225684 NR Description: galactosyltransferase family
  misc_feature (1)..(299): NCBI GI NO: 7485336 NR Description: hypothetical protein F10M23
  misc_feature (1)..(299): NCBI GI NO: 18416895 NR Description: galactosyltransferase family
  misc_feature (1)..(297): NCBI GI NO: 18395060 NR Description: galactosyltransferase family
  misc_feature (1)..(293): NCBI GI NO: 12323294 NR Description: putative
MRLAAARAAQMRNQGVSPSDSAADQGNMRPRLLFVMGIMTTFDNRRRRDSIRKTWMPQGERLRMLEKDKGIVTRFVIGRSANPGPDSEVERAMDAEEKEYNDILRLNHVEGQDGLPLKIQMFLSSALSTWDADFYVKVDDDVHVNIGITRSILARHRSKPRVYIGCMKSGPVIANNESKYYEPDHWKFGTAGNNYFRHATRQLYAITRDLATYISANKHILHKYTNEDVSFGSWLIGLDVEHVDERSLCCGIPPDCEWKAQAGNPCGASFDWNCSGVCNPAERMEEVHRRCWEHREAALPQAQES

SEQ ID NO: 14827 - protein, 295 aa, Triticum aestivum
  peptide (1)..(295): Ceres Seq. ID no. 13597501
  misc_feature (36)..(236): Pfam Name: Pfam Description:  Galactosyltransferase
  misc_feature (1)..(283): NCBI GI NO: 15223337 NR Description: galactosyltransferase family
  misc_feature (1)..(287): NCBI GI NO: 4138265 NR Description: Avr9 elicitor response protein [Nicotiana tabacum]
  misc_feature (1)..(287): NCBI GI NO: 15220440 NR Description: galactosyltransferase family
  misc_feature (1)..(283): NCBI GI NO: 15217544 NR Description: galactosyltransferase family
  misc_feature (1)..(287): NCBI GI NO: 34907342 NR Description: putative elicitor response protein
  misc_feature (1)..(287): NCBI GI NO: 15225684 NR Description: galactosyltransferase family
  misc_feature (1)..(289): NCBI GI NO: 7485336 NR Description: hypothetical protein F10M23
  misc_feature (1)..(289): NCBI GI NO: 18416895 NR Description: galactosyltransferase family
  misc_feature (1)..(287): NCBI GI NO: 18395060 NR Description: galactosyltransferase family
  misc_feature (1)..(283): NCBI GI NO: 12323294 NR Description: putative
MRNQGVSPSDSAADQGNMRPRLLFVMGIMTTFDNRRRRDSIRKTWMPQGERLRMLEKDKGIVTRFVIGRSANPGPDSEVERAMDAEEKEYNDILRLNHVEGQDGLPLKIQMFLSSALSTWDADFYVKVDDDVHVNIGITRSILARHRSKPRVYIGCMKSGPVIANNESKYYEPDHWKFGTAGNNYFRHATRQLYAITRDLATYISANKHILHKYTNEDVSFGSWLIGLDVEHVDERSLCCGIPPDCEWKAQAGNPCGASFDWNCSGVCNPAERMEEVHRRCWEHREAALPQAQES

SEQ ID NO: 14828 - DNA, 1230 bp, Triticum aestivum
  misc_feature (1)..(1230): Ceres Seq. ID no. 13590233
tcgagatctccccacgggccaaggccaggagccaacaaacgcaaggccaccgccgcctctgcgcctccgcagtcgccgttctgcgcccttgcccgccaccgcccggagagatggcgaaggcgttttacgcggtgggtttctggatccgggagaccggtcaggccctcgaccgcctcggctgtcgcctccaggggaactacttcttccacgagcagatttcaaggcatcgcacacttatgaacatctttgacaaagcccctcatgttcacaaagaggcatttgtcgctccaagtgcatcccttattggcgatgttgaagttgggcaagggtcttcaatttggtacggatgcattttaagaggtgatgcaaataacgttcaagttggatctgagaccaatatacaggacaattctgttgtgcatgtggcaaaatctaatctaagtggaaaagtctttccaactatcattggagacaatgtcacagtagggcatagtgctgtattacaaggatgcactgttgaggatgaagcttttgttggtatgggggctaccctgttagatggtgttgttgtggaaaagcatgggatggtcgctgctggagcccttgtaagacagaacacgaggatcccttgtggagaggtatggggtggaaaccctgcaaaatttctgaggaagctcacagacgaggagatcgcttttattgcggaatcagctgccaactattccaacttagccaaggcacatgctgttgagaatgctaaacccttggaaaagattgattttgagaaagtgctgcgcaagaaatttgctcaccaggacaatgaacacgattccatgcttagtgtcactcgagaggtccctccagagctggcgccccccagtcctactcctgcccaataagcttttcttatcaccaccttcagtttggattcttatatctctatctgtccagtgagtttggcagtttacttttacttaagtaattttgggtcgagcaatgttctaaagctgaccatgcacttcaatttctgtattccatatgttcaagatccatggaacaaatagatccatttcgcacaaatttaccagtagcatgcgctgcgtgcatagtttactctggctgaaattgcgagatgcactggaggcagcacatgaactgttggcctgtagttaaatgcttaattgaataaatattttgataacaaaaagtactgaaggacaaattttattg

SEQ ID NO: 14829 - protein, 298 aa, Triticum aestivum
  peptide (1)..(298): Ceres Seq. ID no. 13590234
  misc_feature (37)..(293): NCBI GI NO: 34902506 NR Description: P0581F09.11
  misc_feature (35)..(293): NCBI GI NO: 18394761 NR Description: transferase hexapeptide repeat family
  misc_feature (35)..(293): NCBI GI NO: 21537242 NR Description: unknown [Arabidopsis thaliana]
  misc_feature (35)..(292): NCBI GI NO: 15220153 NR Description: transferase hexapeptide repeat family
  misc_feature (35)..(292): NCBI GI NO: 13507025 NR Description: transcription factor APFI [Arabidopsis thaliana]
  misc_feature (35)..(298): NCBI GI NO: 34904754 NR Description: putative transcription factor APFI
  misc_feature (35)..(279): NCBI GI NO: 18425082 NR Description: transferase hexapeptide repeat family
  misc_feature (72)..(293): NCBI GI NO: 8778427 NR Description: F18O14.34 [Arabidopsis thaliana]
  misc_feature (79)..(279): NCBI GI NO: 10177532 NR Description: ferripyochelin-binding protein-like
  misc_feature (86)..(257): NCBI GI NO: 40218049 NR Description: putative gamma carbonic anhydrase
EISPRAKARSQQTQGHRRLCASAVAVLRPCPPPPGEMAKAFYAVGFWIRETGQALDRLGCRLQGNYFFHEQISRHRTLMNIFDKAPHVHKEAFVAPSASLIGDVEVGQGSSIWYGCILRGDANNVQVGSETNIQDNSVVHVAKSNLSGKVFPTIIGDNVTVGHSAVLQGCTVEDEAFVGMGATLLDGVVVEKHGMVAAGALVRQNTRIPCGEVWGGNPAKFLRKLTDEEIAFIAESAANYSNLAKAHAVENAKPLEKIDFEKVLRKKFAHQDNEHDSMLSVTREVPPELAPPSPTPAQ

SEQ ID NO: 14830 - protein, 262 aa, Triticum aestivum
  peptide (1)..(262): Ceres Seq. ID no. 13590235
  misc_feature (1)..(257): NCBI GI NO: 34902506 NR Description: P0581F09.11
  misc_feature (1)..(257): NCBI GI NO: 18394761 NR Description: transferase hexapeptide repeat family
  misc_feature (1)..(257): NCBI GI NO: 21537242 NR Description: unknown [Arabidopsis thaliana]
  misc_feature (1)..(256): NCBI GI NO: 15220153 NR Description: transferase hexapeptide repeat family
  misc_feature (1)..(256): NCBI GI NO: 13507025 NR Description: transcription factor APFI [Arabidopsis thaliana]
  misc_feature (1)..(262): NCBI GI NO: 34904754 NR Description: putative transcription factor APFI
  misc_feature (1)..(243): NCBI GI NO: 18425082 NR Description: transferase hexapeptide repeat family
  misc_feature (36)..(257): NCBI GI NO: 8778427 NR Description: F18O14.34 [Arabidopsis thaliana]
  misc_feature (43)..(243): NCBI GI NO: 10177532 NR Description: ferripyochelin-binding protein-like
  misc_feature (50)..(221): NCBI GI NO: 40218049 NR Description: putative gamma carbonic anhydrase
MAKAFYAVGFWIRETGQALDRLGCRLQGNYFFHEQISRHRTLMNIFDKAPHVHKEAFVAPSASLIGDVEVGQGSSIWYGCILRGDANNVQVGSETNIQDNSVVHVAKSNLSGKVFPTIIGDNVTVGHSAVLQGCTVEDEAFVGMGATLLDGVVVEKHGMVAAGALVRQNTRIPCGEVWGGNPAKFLRKLTDEEIAFIAESAANYSNLAKAHAVENAKPLEKIDFEKVLRKKFAHQDNEHDSMLSVTREVPPELAPPSPTPAQ

SEQ ID NO: 14831 - protein, 220 aa, Triticum aestivum
  peptide (1)..(220): Ceres Seq. ID no. 13590236
  misc_feature (1)..(215): NCBI GI NO: 34902506 NR Description: P0581F09.11
  misc_feature (1)..(215): NCBI GI NO: 18394761 NR Description: transferase hexapeptide repeat family
  misc_feature (1)..(215): NCBI GI NO: 21537242 NR Description: unknown [Arabidopsis thaliana]
  misc_feature (1)..(214): NCBI GI NO: 15220153 NR Description: transferase hexapeptide repeat family
  misc_feature (1)..(214): NCBI GI NO: 13507025 NR Description: transcription factor APFI [Arabidopsis thaliana]
  misc_feature (1)..(220): NCBI GI NO: 34904754 NR Description: putative transcription factor APFI
  misc_feature (1)..(201): NCBI GI NO: 18425082 NR Description: transferase hexapeptide repeat family
  misc_feature (1)..(215): NCBI GI NO: 8778427 NR Description: F18O14.34 [Arabidopsis thaliana]
  misc_feature (1)..(201): NCBI GI NO: 10177532 NR Description: ferripyochelin-binding protein-like
  misc_feature (8)..(179): NCBI GI NO: 40218049 NR Description: putative gamma carbonic anhydrase
MNIFDKAPHVHKEAFVAPSASLIGDVEVGQGSSIWYGCILRGDANNVQVGSETNIQDNSVVHVAKSNLSGKVFPTIIGDNVTVGHSAVLQGCTVEDEAFVGMGATLLDGVVVEKHGMVAAGALVRQNTRIPCGEVWGGNPAKFLRKLTDEEIAFIAESAANYSNLAKAHAVENAKPLEKIDFEKVLRKKFAHQDNEHDSMLSVTREVPPELAPPSPTPAQ

SEQ ID NO: 14832 - DNA, 1300 bp, Triticum aestivum
  misc_feature (1)..(1300): Ceres Seq. ID no. 12617675
aaccacagttcacacggcgcacggcgagctcagtacagtacagcgaggggaaggagcactggggggacagtagctagcgttgcgagttccccggccaatggcaatggcgtggtggaagaacggcgccttggtcgccgcggcgaccctcgccgtggccgcggtggtctgcgccggcgtggcggcggcggcgagcaagttcgacgacgtggtgcagcccagctgggccaacgaccacgtcctctacgaggatgacctcctcaagctccgcctcgacagctcctccggcgggggattcgcgtccaagaacaagttcttgtacggcaaggccaccgccgacctgaagctcgtgccgggggactccgccggcgtcgtcacggctttctatctgtcgtcggcgggggacaagcacaacgagttcgacttcgagttcctgggcaacgtcaccggcgagccgtacctggtgcagaccaacctgtacatcgacggcgtgggcaacccgggagcagcgcatcgacctctggttcgaccccaccgccgacttccacacctacgccgtgctctggaaccccagccaggtcgtcttcctcgtcgacgacacccccatccgcgtctacgacaacaagaacgcctccgccaccaagcccaagggccaccaccgccaccccaacaacgccaccaccgccgccacccagacggcgtccgcgttcccgtcgccgcagcccatggccgtgtacagctccatctggaacgcggacgactgggccacgcgcggcgggctggtcaagacggactggtcgcacgcgccgttcgtggccaccttccgggacgtgcgcgtggagggctgcgcctgggccgccaacgcctccgactcggacgccggcgaggtggcgcgctgcagcggcagctcctggggcaaggagggccgctactggtggaaggagaaggacatgcaggagctgtccgtgcaccagagccaccagctggtgtgggcgcgcgcgcaccacctcgtctacgactactgcgtcgacaccgaccgcttccccgtccagccgcccgagtgcgccggccgctgatccgccgcgtcgtcgccggccgcctccatggaaatcttttattagcactccgtagaatggatccatgacatcgatggatcgtcgtagctgctcgtttcagtttcgatttaggtccgtagcctctccgatgagcttcgatcgtgtttgctatctctgccttgcagttctcttgttcttgttgttatgttggggtgtcctgtataaattcgtccgtggaagtgatgctc

SEQ ID NO: 14833 - protein, 347 aa, Triticum aestivum
  peptide (1)..(347): Ceres Seq. ID no. 12617676
  misc_feature (34)..(133): Pfam Name: Pfam Description:  Glycosyl hydrolases family 16
  misc_feature (11)..(133): NCBI GI NO: 15236265 NR Description: xyloglucan endotransglycosylase, putative
  misc_feature (11)..(133): NCBI GI NO: 21553878 NR Description: putative xyloglucan endotransglycosylase
  misc_feature (13)..(133): NCBI GI NO: 38605539 NR Description: Probable xyloglucan endotransglucosylase/hydrolaseprecursor
  misc_feature (16)..(133): NCBI GI NO: 15240733 NR Description: xyloglucan endotransglycosylase
  misc_feature (17)..(133): NCBI GI NO: 27228078 NR Description: xyloglucan endotransglycosylase precursor
  misc_feature (16)..(133): NCBI GI NO: 950299 NR Description: xyloglucan endotransglycosylase precursor
  misc_feature (17)..(133): NCBI GI NO: 22947847 NR Description: xyloglucan endotransglycosylase
  misc_feature (17)..(133): NCBI GI NO: 3043422 NR Description: endoxyloglucan transferase [Cicer arietinum]
  misc_feature (13)..(133): NCBI GI NO: 1885310 NR Description: Endoxyloglucan transferase (EXT)
  misc_feature (17)..(133): NCBI GI NO: 7447416 NR Description: xyloglucan endo-1,4-beta-D-glucanase (EC 3
MAMAWWKNGALVAAATLAVAAVVCAGVAAAASKFDDVVQPSWANDHVLYEDDLLKLRLDSSSGGGFASKNKFLYGKATADLKLVPGDSAGVVTAFYLSSAGDKHNEFDFEFLGNVTGEPYLVQTNLYIDGVGNPGAAHRPLVRPHRRLPHLRRALEPQPGRLPRRRHPHPRLRQQERLRHQAQGPPPPPQQRHHRRHPDGVRVPVAAAHGRVQLHLERGRLGHARRAGQDGLVARAVRGHLPGRARGGLRLGRQRLRLGRRRGGALQRQLLGQGGPLLVEGEGHAGAVRAPEPPAGVGARAPPRLRLLRRHRPLPRPAARVRRPLIRRVVAGRLHGNLLLALRRMDP

SEQ ID NO: 14834 - protein, 345 aa, Triticum aestivum
  peptide (1)..(345): Ceres Seq. ID no. 12617677
  misc_feature (32)..(131): Pfam Name: Pfam Description:  Glycosyl hydrolases family 16
  misc_feature (9)..(131): NCBI GI NO: 15236265 NR Description: xyloglucan endotransglycosylase, putative
  misc_feature (9)..(131): NCBI GI NO: 21553878 NR Description: putative xyloglucan endotransglycosylase
  misc_feature (11)..(131): NCBI GI NO: 38605539 NR Description: Probable xyloglucan endotransglucosylase/hydrolaseprecursor
  misc_feature (14)..(131): NCBI GI NO: 15240733 NR Description: xyloglucan endotransglycosylase
  misc_feature (15)..(131): NCBI GI NO: 27228078 NR Description: xyloglucan endotransglycosylase precursor
  misc_feature (14)..(131): NCBI GI NO: 950299 NR Description: xyloglucan endotransglycosylase precursor
  misc_feature (15)..(131): NCBI GI NO: 22947847 NR Description: xyloglucan endotransglycosylase
  misc_feature (15)..(131): NCBI GI NO: 3043422 NR Description: endoxyloglucan transferase [Cicer arietinum]
  misc_feature (11)..(131): NCBI GI NO: 1885310 NR Description: Endoxyloglucan transferase (EXT)
  misc_feature (15)..(131): NCBI GI NO: 7447416 NR Description: xyloglucan endo-1,4-beta-D-glucanase (EC 3
MAWWKNGALVAAATLAVAAVVCAGVAAAASKFDDVVQPSWANDHVLYEDDLLKLRLDSSSGGGFASKNKFLYGKATADLKLVPGDSAGVVTAFYLSSAGDKHNEFDFEFLGNVTGEPYLVQTNLYIDGVGNPGAAHRPLVRPHRRLPHLRRALEPQPGRLPRRRHPHPRLRQQERLRHQAQGPPPPPQQRHHRRHPDGVRVPVAAAHGRVQLHLERGRLGHARRAGQDGLVARAVRGHLPGRARGGLRLGRQRLRLGRRRGGALQRQLLGQGGPLLVEGEGHAGAVRAPEPPAGVGARAPPRLRLLRRHRPLPRPAARVRRPLIRRVVAGRLHGNLLLALRRMDP

SEQ ID NO: 14835 - DNA, 1750 bp, Triticum aestivum
  misc_feature (1)..(1750): Ceres Seq. ID no. 15169663
cgcgcgccacgccaagcagagcaaacccacgccgccgccgccgccgccgccgccgtcgtattcgcccacgcgcgcacagaagactccactccctcctctcgcagccatggcggtggcggacaaggcggtcgccgggggcggcgaggcccagcagccggagccggagccggagccggccgccgaggcctcaacgttcgccgagctgggcgtctgccgcgagctggtggaggcctgcgacgccatggggtggaagcagcccaccaagatccaggcgggggccatcccccacgccctccaagggagggacgtgattgggctggggcagacggggtcggggaagacgggcgcgttcgcgctgcccatcatccaggcgctgctcgagcaccgccagcccttcttcgcctgcatcatgtcgcccacgagggagctggcgattcagattgcggagcagtttgaggcgttagggtcagctatcggcttggtttgctcagtgcttgttggaggagttgaccggatgcagcaagtgttatccattgcaaaacgtccacatattgtggttggaactcctggccgtcttttggaccatttgaaagatacaaaaggttttagcctaactaaagtgaaatacctggtacttgatgaagctgataaattacttaatttggagttcaaggaatcacttgatgatattctgaaggtcattcctaaagaaaggagaacttaccttttttcagccacaatgaccaaaaaggtaagcaaactgcaacgtgcttgtctcagaaaccctgttaaggtggaagtatcctccaaatattctacagtggacacacttaaacaagagtggtatttcgttcctgcagattactaggattgttatcttgttcatgttctgaatgagttgccagggagcatgatcatgatcttcgtgcggacctgcgagtcaacaagactccttgctctcactttaaggaatcttggttttaaagctctctctatcagtggccagatgagtcaggacaaaagactaggtgctttaaacaagttcaaagcaaaagatttcaacatccttatctgcaccgacgtggcgagtcgtggtcttgacattcaaggagttgatgtggttatgaattatgatattccaatgaattctaaggattatgtccatcgggttggtaggactgcgcgtgcagggcaatcgggatatgccgtctcttttgtgaatcagtatgaggctgagtggtttaagctgattgagcagctccttggaagggaaattcctgaccggaaggtagatatggatgaaatcctgatacttcgtgagcatatatcagattcaaagaggattgcactgacgaaactgagggaggacggtggtcacaagaagagaaggaaggtggcggaggacgacgatgatgaagaagaggaggctccaagaggccaccgacagaaaccgaggtctttcaagaaatcatcaaggcggtgatagcactcgagtgcagataagtcggaacctcctgcctgatgaccagtagaatccgtacataccgctccacctcgcgaaagctatttatcggaattttgtccttagttcgtccgatgcaccagccatattgttagttactaagttgcaccagcgctatctatgctaccttttgtttgaaagtcaggccactttgagcaaatagccagtatttctctgtttgacacaagattttacatctaatctatatgaatatttcacctttacatc

SEQ ID NO: 14836 - protein, 288 aa, Triticum aestivum
  peptide (1)..(288): Ceres Seq. ID no. 15169664
  misc_feature (76)..(280): Pfam Name: Pfam Description:  DEAD/DEAH box helicase
  misc_feature (36)..(288): NCBI GI NO: 31126733 NR Description: putative RNA helicase
  misc_feature (48)..(288): NCBI GI NO: 34899100 NR Description: ATP-dependent helicase pitchoune
  misc_feature (64)..(288): NCBI GI NO: 18424420 NR Description: DEAD/DEAH box helicase, putative
  misc_feature (64)..(288): NCBI GI NO: 21593647 NR Description: replication protein A1-like [Arabidopsis thaliana]
  misc_feature (64)..(288): NCBI GI NO: 26450667 NR Description: putative replication protein A1
  misc_feature (43)..(288): NCBI GI NO: 27229058 NR Description: DEAD (Asp-Glu-Ala-Asp) box polypeptide 47
  misc_feature (48)..(288): NCBI GI NO: 11121196 NR Description: DEAD box protein [Homo sapiens]
  misc_feature (48)..(288): NCBI GI NO: 20149629 NR Description: DEAD
  misc_feature (48)..(288): NCBI GI NO: 16549139 NR Description: unnamed protein product [Homo sapiens]
  misc_feature (52)..(288): NCBI GI NO: 32406488 NR Description: hypothetical protein [Neurospora crassa]
ARHAKQSKPTPPPPPPPPSYSPTRAQKTPLPPLAAMAVADKAVAGGGEAQQPEPEPEPAAEASTFAELGVCRELVEACDAMGWKQPTKIQAGAIPHALQGRDVIGLGQTGSGKTGAFALPIIQALLEHRQPFFACIMSPTRELAIQIAEQFEALGSAIGLVCSVLVGGVDRMQQVLSIAKRPHIVVGTPGRLLDHLKDTKGFSLTKVKYLVLDEADKLLNLEFKESLDDILKVIPKERRTYLFSATMTKKVSKLQRACLRNPVKVEVSSKYSTVDTLKQEWYFVPADY

SEQ ID NO: 14837 - protein, 253 aa, Triticum aestivum
  peptide (1)..(253): Ceres Seq. ID no. 15169665
  misc_feature (41)..(245): Pfam Name: Pfam Description:  DEAD/DEAH box helicase
  misc_feature (1)..(253): NCBI GI NO: 31126733 NR Description: putative RNA helicase
  misc_feature (13)..(253): NCBI GI NO: 34899100 NR Description: ATP-dependent helicase pitchoune
  misc_feature (29)..(253): NCBI GI NO: 18424420 NR Description: DEAD/DEAH box helicase, putative
  misc_feature (29)..(253): NCBI GI NO: 21593647 NR Description: replication protein A1-like [Arabidopsis thaliana]
  misc_feature (29)..(253): NCBI GI NO: 26450667 NR Description: putative replication protein A1
  misc_feature (8)..(253): NCBI GI NO: 27229058 NR Description: DEAD (Asp-Glu-Ala-Asp) box polypeptide 47
  misc_feature (13)..(253): NCBI GI NO: 11121196 NR Description: DEAD box protein [Homo sapiens]
  misc_feature (13)..(253): NCBI GI NO: 20149629 NR Description: DEAD
  misc_feature (13)..(253): NCBI GI NO: 16549139 NR Description: unnamed protein product [Homo sapiens]
  misc_feature (17)..(253): NCBI GI NO: 32406488 NR Description: hypothetical protein [Neurospora crassa]
MAVADKAVAGGGEAQQPEPEPEPAAEASTFAELGVCRELVEACDAMGWKQPTKIQAGAIPHALQGRDVIGLGQTGSGKTGAFALPIIQALLEHRQPFFACIMSPTRELAIQIAEQFEALGSAIGLVCSVLVGGVDRMQQVLSIAKRPHIVVGTPGRLLDHLKDTKGFSLTKVKYLVLDEADKLLNLEFKESLDDILKVIPKERRTYLFSATMTKKVSKLQRACLRNPVKVEVSSKYSTVDTLKQEWYFVPADY

SEQ ID NO: 14838 - protein, 208 aa, Triticum aestivum
  peptide (1)..(208): Ceres Seq. ID no. 15169666
  misc_feature (1)..(200): Pfam Name: Pfam Description:  DEAD/DEAH box helicase
  misc_feature (1)..(208): NCBI GI NO: 31126733 NR Description: putative RNA helicase
  misc_feature (1)..(208): NCBI GI NO: 34899100 NR Description: ATP-dependent helicase pitchoune
  misc_feature (1)..(208): NCBI GI NO: 18424420 NR Description: DEAD/DEAH box helicase, putative
  misc_feature (1)..(208): NCBI GI NO: 21593647 NR Description: replication protein A1-like [Arabidopsis thaliana]
  misc_feature (1)..(208): NCBI GI NO: 26450667 NR Description: putative replication protein A1
  misc_feature (1)..(208): NCBI GI NO: 27229058 NR Description: DEAD (Asp-Glu-Ala-Asp) box polypeptide 47
  misc_feature (1)..(208): NCBI GI NO: 11121196 NR Description: DEAD box protein [Homo sapiens]
  misc_feature (1)..(208): NCBI GI NO: 20149629 NR Description: DEAD
  misc_feature (1)..(208): NCBI GI NO: 16549139 NR Description: unnamed protein product [Homo sapiens]
  misc_feature (1)..(208): NCBI GI NO: 32406488 NR Description: hypothetical protein [Neurospora crassa]
MGWKQPTKIQAGAIPHALQGRDVIGLGQTGSGKTGAFALPIIQALLEHRQPFFACIMSPTRELAIQIAEQFEALGSAIGLVCSVLVGGVDRMQQVLSIAKRPHIVVGTPGRLLDHLKDTKGFSLTKVKYLVLDEADKLLNLEFKESLDDILKVIPKERRTYLFSATMTKKVSKLQRACLRNPVKVEVSSKYSTVDTLKQEWYFVPADY

SEQ ID NO: 14839 - DNA, 2293 bp, Triticum aestivum
  misc_feature (1)..(2293): Ceres Seq. ID no. 14302243
cccctcccctcccgtgcttctctccaccccgcccccgcgccacagccgaaccctacacccgcgcgcgcgaggggccgccccgatctgcgagatgtggcgcagccgcgtgtcgcggggcctccgggaggccaaggccgccgccgccgccgcgtccaggcgcttctccaccacctcgtcctacacggtggtggatcacacctacgatgcggtcgtggttggcgctggaggcgcggggctcagggccgcgattgggctctcggagcatgggttcaacaccgcctgcatcaccaagctcttccccacgcggtcacataccgtggcagcgcagggaggtataaacgctgctcttggaaacatgagtgaagatgactggaggtggcatatgtatgatacagtcaagggaagtgattggctcggtgaccaagatgctatccagtatatgtgtagagaagcaccaaaggctgttatagagcttgagaactatggattaccattttccagaactgaagatggaaaaatttatcaacgcgcttttggaggccaaagcttagattttggaaaaggtggtcaggcctatcgatgtgcatgcgctgctgacagaacagggcatgctatgctacacacactttatgggcaggcgatgaagcacaatactcagttttttgttgaatattttgcgctggaccttatcatggacaaagaaggcacctgccagggggtaattgcactaaacatggaggatggtacccttcatcgtttccgttcaacaaatactattttagcaacaggaggttatggcagagcttacttctctgctacttcagctcacacatgtactggtgatggcaatgctatggttgcacgtgctgggttaccccttcaggatcttgagtttgtgcagttccatcctacaggcatttacggtgctggatgccttataactgaaggttcccggggcgaaggtggtattcttaggaacagcgaaggtgagaggttcatggaacgatatgcccctaccgctaaagatcttgcatctcgtgatgttgtttcaagatctatgactatggaaattagagaaggacgtggtgtaggaccaatgaaggaccatctctacctgcaccttaatcatcttcctccagaagttctgaaggaaaggcttcctggtatatctgagactgctgctatttttgctggtgttgatgtcaccaaagagcctattcctgttttgccgactgtgcattataatatgggcggtatcccgacaaattatcatgggcaggtggtggatatcaagggtgataacccagacacaattattcctggtctgatggctgctggggaggcagcttgtgcatctgttcatggtgcaaaccgtcttggtgcaaattcacttcttgacattgttgtatttgggagggcttgtgcaaatagggttgctgagatttccaagccaggagagacacagaaacctcttgaaaaagacgcaggggagaagaccattgcttggttggacaagctgagaaatgctaatggatcactgccaacttcgaagatccgcctcaacatgcaacgtattatgcaaaataatgctgcagttttccgcacacaggaaactctaacagaaggttgcgagctgattagtgaagcacagaaaagtttccacgatgtcaagctcagtgacagaagtctcatatggaattcggatttgatagagaccatagaattagaaaacctgctaataaatgcatgcataaccatgcattcagctgaggctcgccaagagagcagaggagctcatgctcgtgaagatttcaagacaagagatgacgacaagtggatgaagcactcgctagggtactgggaggatgaaaaggttagactagaatacaggccagttcacatgaacaccttggatgatgaagtcgagactttcccgccgaaggcacgtgtttactaatccggacaaggctgtcgacgtttcagttgtttgataagggtatagctcacagcgcggtgtcttccgagtagaaataaatttgcaggggccctccattctcccaaagcttcagaactgtaatataatcgggaatcgccaatatactttccctgaccagtgtaaacttgttgaaagcttctgatgattctattttggtcctgtatcacccctttggttggtaggaataaagacgcataccaagttttgaaggtgtttgaatctgtaaataacctttggcgtgagctgtgaacacaatggttcttttgtctattgtggcttctattaagctttaaactt

SEQ ID NO: 14840 - protein, 651 aa, Triticum aestivum
  peptide (1)..(651): Ceres Seq. ID no. 14302244
  misc_feature (167)..(500): Pfam Name: Pfam Description:  FAD binding domain
  misc_feature (31)..(651): NCBI GI NO: 34394418 NR Description: putative succinate dehydrogenase flavoprotein alpha subunit
  misc_feature (31)..(651): NCBI GI NO: 15240075 NR Description: succinate dehydrogenase
  misc_feature (31)..(651): NCBI GI NO: 15224174 NR Description: succinate dehydrogenase
  misc_feature (37)..(651): NCBI GI NO: 19115231 NR Description: probable succinate dehydrogenase flavoprotein subunit precursor
  misc_feature (57)..(651): NCBI GI NO: 32417808 NR Description: hypothetical protein [Neurospora crassa]
  misc_feature (59)..(651): NCBI GI NO: 23011974 NR Description: hypothetical protein
  misc_feature (52)..(651): NCBI GI NO: 6644394 NR Description: SdhA [Dictyostelium discoideum]
  misc_feature (40)..(651): NCBI GI NO: 6322701 NR Description: Yeast succinate dehydrogenase
  misc_feature (59)..(651): NCBI GI NO: 27902658 NR Description: succinate dehydrogenase alpha subunit
  misc_feature (57)..(610): NCBI GI NO: 28374211 NR Description: Similar to succinate dehydrogenase complex
PSPPVLLSTPPPRHSRTLHPRARGAAPICEMWRSRVSRGLREAKAAAAAASRRFSTTSSYTVVDHTYDAVVVGAGGAGLRAAIGLSEHGFNTACITKLFPTRSHTVAAQGGINAALGNMSEDDWRWHMYDTVKGSDWLGDQDAIQYMCREAPKAVIELENYGLPFSRTEDGKIYQRAFGGQSLDFGKGGQAYRCACAADRTGHAMLHTLYGQAMKHNTQFFVEYFALDLIMDKEGTCQGVIALNMEDGTLHRFRSTNTILATGGYGRAYFSATSAHTCTGDGNAMVARAGLPLQDLEFVQFHPTGIYGAGCLITEGSRGEGGILRNSEGERFMERYAPTAKDLASRDVVSRSMTMEIREGRGVGPMKDHLYLHLNHLPPEVLKERLPGISETAAIFAGVDVTKEPIPVLPTVHYNMGGIPTNYHGQVVDIKGDNPDTIIPGLMAAGEAACASVHGANRLGANSLLDIVVFGRACANRVAEISKPGETQKPLEKDAGEKTIAWLDKLRNANGSLPTSKIRLNMQRIMQNNAAVFRTQETLTEGCELISEAQKSFHDVKLSDRSLIWNSDLIETIELENLLINACITMHSAEARQESRGAHAREDFKTRDDDKWMKHSLGYWEDEKVRLEYRPVHMNTLDDEVETFPPKARVY

SEQ ID NO: 14841 - protein, 621 aa, Triticum aestivum
  peptide (1)..(621): Ceres Seq. ID no. 14302245
  misc_feature (137)..(470): Pfam Name: Pfam Description:  FAD binding domain
  misc_feature (1)..(621): NCBI GI NO: 34394418 NR Description: putative succinate dehydrogenase flavoprotein alpha subunit
  misc_feature (1)..(621): NCBI GI NO: 15240075 NR Description: succinate dehydrogenase
  misc_feature (1)..(621): NCBI GI NO: 15224174 NR Description: succinate dehydrogenase
  misc_feature (7)..(621): NCBI GI NO: 19115231 NR Description: probable succinate dehydrogenase flavoprotein subunit precursor
  misc_feature (27)..(621): NCBI GI NO: 32417808 NR Description: hypothetical protein [Neurospora crassa]
  misc_feature (29)..(621): NCBI GI NO: 23011974 NR Description: hypothetical protein
  misc_feature (22)..(621): NCBI GI NO: 6644394 NR Description: SdhA [Dictyostelium discoideum]
  misc_feature (10)..(621): NCBI GI NO: 6322701 NR Description: Yeast succinate dehydrogenase
  misc_feature (29)..(621): NCBI GI NO: 27902658 NR Description: succinate dehydrogenase alpha subunit
  misc_feature (27)..(580): NCBI GI NO: 28374211 NR Description: Similar to succinate dehydrogenase complex
MWRSRVSRGLREAKAAAAAASRRFSTTSSYTVVDHTYDAVVVGAGGAGLRAAIGLSEHGFNTACITKLFPTRSHTVAAQGGINAALGNMSEDDWRWHMYDTVKGSDWLGDQDAIQYMCREAPKAVIELENYGLPFSRTEDGKIYQRAFGGQSLDFGKGGQAYRCACAADRTGHAMLHTLYGQAMKHNTQFFVEYFALDLIMDKEGTCQGVIALNMEDGTLHRFRSTNTILATGGYGRAYFSATSAHTCTGDGNAMVARAGLPLQDLEFVQFHPTGIYGAGCLITEGSRGEGGILRNSEGERFMERYAPTAKDLASRDVVSRSMTMEIREGRGVGPMKDHLYLHLNHLPPEVLKERLPGISETAAIFAGVDVTKEPIPVLPTVHYNMGGIPTNYHGQVVDIKGDNPDTIIPGLMAAGEAACASVHGANRLGANSLLDIVVFGRACANRVAEISKPGETQKPLEKDAGEKTIAWLDKLRNANGSLPTSKIRLNMQRIMQNNAAVFRTQETLTEGCELISEAQKSFHDVKLSDRSLIWNSDLIETIELENLLINACITMHSAEARQESRGAHAREDFKTRDDDKWMKHSLGYWEDEKVRLEYRPVHMNTLDDEVETFPPKARVY

SEQ ID NO: 14842 - protein, 533 aa, Triticum aestivum
  peptide (1)..(533): Ceres Seq. ID no. 14302246
  misc_feature (49)..(382): Pfam Name: Pfam Description:  FAD binding domain
  misc_feature (1)..(533): NCBI GI NO: 34394418 NR Description: putative succinate dehydrogenase flavoprotein alpha subunit
  misc_feature (1)..(533): NCBI GI NO: 15240075 NR Description: succinate dehydrogenase
  misc_feature (1)..(533): NCBI GI NO: 15224174 NR Description: succinate dehydrogenase
  misc_feature (1)..(533): NCBI GI NO: 19115231 NR Description: probable succinate dehydrogenase flavoprotein subunit precursor
  misc_feature (1)..(533): NCBI GI NO: 32417808 NR Description: hypothetical protein [Neurospora crassa]
  misc_feature (1)..(533): NCBI GI NO: 23011974 NR Description: hypothetical protein
  misc_feature (1)..(533): NCBI GI NO: 6644394 NR Description: SdhA [Dictyostelium discoideum]
  misc_feature (1)..(533): NCBI GI NO: 6322701 NR Description: Yeast succinate dehydrogenase
  misc_feature (1)..(533): NCBI GI NO: 27902658 NR Description: succinate dehydrogenase alpha subunit
  misc_feature (1)..(492): NCBI GI NO: 28374211 NR Description: Similar to succinate dehydrogenase complex
MSEDDWRWHMYDTVKGSDWLGDQDAIQYMCREAPKAVIELENYGLPFSRTEDGKIYQRAFGGQSLDFGKGGQAYRCACAADRTGHAMLHTLYGQAMKHNTQFFVEYFALDLIMDKEGTCQGVIALNMEDGTLHRFRSTNTILATGGYGRAYFSATSAHTCTGDGNAMVARAGLPLQDLEFVQFHPTGIYGAGCLITEGSRGEGGILRNSEGERFMERYAPTAKDLASRDVVSRSMTMEIREGRGVGPMKDHLYLHLNHLPPEVLKERLPGISETAAIFAGVDVTKEPIPVLPTVHYNMGGIPTNYHGQVVDIKGDNPDTIIPGLMAAGEAACASVHGANRLGANSLLDIVVFGRACANRVAEISKPGETQKPLEKDAGEKTIAWLDKLRNANGSLPTSKIRLNMQRIMQNNAAVFRTQETLTEGCELISEAQKSFHDVKLSDRSLIWNSDLIETIELENLLINACITMHSAEARQESRGAHAREDFKTRDDDKWMKHSLGYWEDEKVRLEYRPVHMNTLDDEVETFPPKARVY

SEQ ID NO: 14843 - DNA, 2032 bp, Triticum aestivum
  misc_feature (1)..(2032): Ceres Seq. ID no. 12586556
catggccccgccgtcgtcttctcctccccttccggcatgggcggcggcgaacgccctcttccgacgccaccgccgccttctcccgctcctccttcccccggtgtccctctgcgccctcctacccgtcctctcccactgcctcgtttccggcctcgccggcaaccccttcgtcgcctcccgcctcatcctcgcctcctcgcgcctctccctcacattctccctcctcctcctctcccaccttccagcctcttccctctcgcccttctccttcaactcgctcatacgcgcgtcgcctccaggcctcaccctccgcctgttcgaacaaatgcgccgccggggcgttcccacggataactacaccctccccttcttgatccatgcctgttccggcagtgacatggcactgggacagtccctgcacgggaagagcgtccgtcttggttacagctcccacatcttcacgcagacggcgctgatgaacatgtactttgggtgtggcttggctgtttccgccggcagggtgttcgatgaaatgcaggcgagggatgtggttgcatggaccggcatggtctctggttatgtggactctggaatgcaccttcgagctgctgaggtctttaaggagatgagaggcggtgaggaggttacaaggcctaatgtagcaacgttggtgtcggttgcttctgcgtatgccagtcttggctccctggagtatgctaaggggctgcacggctatgtggagaaggtggggttgcgaggcgatttgattctgacgaatgcactgatggatatgtatggaaagtgtggtagcatagagtcagctcgtgctctgtttgatttcatgcatgagaaggacctactttcatggacaacgatgatttcagggttggcttctcatggacatggcaaagaagcggttgctttgtttttaagcatgcgcgaggtgggagtactgccggactcaaccaccttcatcgtggttctgtctgcttgtagccatgctggactggtggatgaggggatatcaatcttcaattccatggcgagtgagtacaaggtcaccccagatattaagcactatggttgcatggtggatcttttcagcagggcaggacttctttcacgtgcttatgagcttattgatagcatgccttttgagccaaacttggcaattcttggagcattgctgagtgcatgcagtgtcaataatgaactggagattggggaactagttctccagaagattgattctgtttgctcctataaaggaggtgctggtgtgcttctgtccaacatctacgctaaccagaacttatggcatgaagttgattccattagaaggaagataagaaatggtaccatacccagaaagccacctggtcagagttcggtggcatcagaagttcctttcatgagtttgtgatttggagcttttagagagaaatccactttgctgtcactgttaaccttgactggcaaaatggctgattttcatgcgaactggtaaggaagtctcatcaattacttttacgacaaggcagcttatgaagtactcccccgttcctaaatatttgtctttttagagattttaaatggactaccacatacggatgtatatagacatattttagagtgtggattcactcattttgcttcgtatgtagtcacttgttgaaatctctagaaagacaaatatttaggaacggagggagtagatatcagcgtattatgtcaaaaaaagtactccctccgagattccagcgtgtcacccattttgttactgtgttgaaattgttgtggcttttactattgagtattaagtagcgagcatattatacctgtggaatcataagcacattgaccgactgaacttctgtttgctttatctaacaggagatgaggtctctcggcagcatatttcgcagattagctttccatagcgcgcacagaaacactaaacttcatacgcaaacttcttcccctcaccaactcccccttatcatttaggagataagacaaagtataccatctc

SEQ ID NO: 14844 - protein, 473 aa, Triticum aestivum
  peptide (1)..(473): Ceres Seq. ID no. 12586557
  misc_feature (257)..(290): Pfam Name: Pfam Description:  PPR repeat
  misc_feature (1)..(464): NCBI GI NO: 29124127 NR Description: hypothetical protein
  misc_feature (85)..(464): NCBI GI NO: 7486979 NR Description: hypothetical protein T13K14
  misc_feature (26)..(464): NCBI GI NO: 34393394 NR Description: putative pentatricopeptide
  misc_feature (35)..(461): NCBI GI NO: 15232648 NR Description: putative protein; protein id: At3g46790.1
  misc_feature (103)..(464): NCBI GI NO: 34911728 NR Description: P0707D10.28
  misc_feature (35)..(464): NCBI GI NO: 15227067 NR Description: hypothetical protein; protein id: At2g02980.1
  misc_feature (35)..(464): NCBI GI NO: 21780142 NR Description: hypothetical protein [Arabidopsis thaliana]
  misc_feature (83)..(462): NCBI GI NO: 15234006 NR Description: putative protein; protein id: At4g18750.1
  misc_feature (103)..(464): NCBI GI NO: 34897084 NR Description: hypothetical protein
  misc_feature (103)..(464): NCBI GI NO: 34897884 NR Description: Similar to Arabidopsis thaliana DNA chromosome 4
MAPPSSSPPLPAWAAANALFRRHRRLLPLLLPPVSLCALLPVLSHCLVSGLAGNPFVASRLILASSRLSLTFSLLLLSHLPASSLSPFSFNSLIRASPPGLTLRLFEQMRRRGVPTDNYTLPFLIHACSGSDMALGQSLHGKSVRLGYSSHIFTQTALMNMYFGCGLAVSAGRVFDEMQARDVVAWTGMVSGYVDSGMHLRAAEVFKEMRGGEEVTRPNVATLVSVASAYASLGSLEYAKGLHGYVEKVGLRGDLILTNALMDMYGKCGSIESARALFDFMHEKDLLSWTTMISGLASHGHGKEAVALFLSMREVGVLPDSTTFIVVLSACSHAGLVDEGISIFNSMASEYKVTPDIKHYGCMVDLFSRAGLLSRAYELIDSMPFEPNLAILGALLSACSVNNELEIGELVLQKIDSVCSYKGGAGVLLSNIYANQNLWHEVDSIRRKIRNGTIPRKPPGQSSVASEVPFMSL

SEQ ID NO: 14845 - protein, 365 aa, Triticum aestivum
  peptide (1)..(365): Ceres Seq. ID no. 12586558
  misc_feature (149)..(182): Pfam Name: Pfam Description:  PPR repeat
  misc_feature (1)..(356): NCBI GI NO: 29124127 NR Description: hypothetical protein
  misc_feature (1)..(356): NCBI GI NO: 7486979 NR Description: hypothetical protein T13K14
  misc_feature (1)..(356): NCBI GI NO: 34393394 NR Description: putative pentatricopeptide
  misc_feature (1)..(353): NCBI GI NO: 15232648 NR Description: putative protein; protein id: At3g46790.1
  misc_feature (1)..(356): NCBI GI NO: 34911728 NR Description: P0707D10.28
  misc_feature (1)..(356): NCBI GI NO: 15227067 NR Description: hypothetical protein; protein id: At2g02980.1
  misc_feature (1)..(356): NCBI GI NO: 21780142 NR Description: hypothetical protein [Arabidopsis thaliana]
  misc_feature (1)..(354): NCBI GI NO: 15234006 NR Description: putative protein; protein id: At4g18750.1
  misc_feature (1)..(356): NCBI GI NO: 34897084 NR Description: hypothetical protein
  misc_feature (1)..(356): NCBI GI NO: 34897884 NR Description: Similar to Arabidopsis thaliana DNA chromosome 4
MRRRGVPTDNYTLPFLIHACSGSDMALGQSLHGKSVRLGYSSHIFTQTALMNMYFGCGLAVSAGRVFDEMQARDVVAWTGMVSGYVDSGMHLRAAEVFKEMRGGEEVTRPNVATLVSVASAYASLGSLEYAKGLHGYVEKVGLRGDLILTNALMDMYGKCGSIESARALFDFMHEKDLLSWTTMISGLASHGHGKEAVALFLSMREVGVLPDSTTFIVVLSACSHAGLVDEGISIFNSMASEYKVTPDIKHYGCMVDLFSRAGLLSRAYELIDSMPFEPNLAILGALLSACSVNNELEIGELVLQKIDSVCSYKGGAGVLLSNIYANQNLWHEVDSIRRKIRNGTIPRKPPGQSSVASEVPFMSL

SEQ ID NO: 14846 - protein, 341 aa, Triticum aestivum
  peptide (1)..(341): Ceres Seq. ID no. 12586559
  misc_feature (125)..(158): Pfam Name: Pfam Description:  PPR repeat
  misc_feature (1)..(332): NCBI GI NO: 29124127 NR Description: hypothetical protein
  misc_feature (1)..(332): NCBI GI NO: 7486979 NR Description: hypothetical protein T13K14
  misc_feature (1)..(332): NCBI GI NO: 34393394 NR Description: putative pentatricopeptide
  misc_feature (1)..(329): NCBI GI NO: 15232648 NR Description: putative protein; protein id: At3g46790.1
  misc_feature (1)..(332): NCBI GI NO: 34911728 NR Description: P0707D10.28
  misc_feature (1)..(332): NCBI GI NO: 15227067 NR Description: hypothetical protein; protein id: At2g02980.1
  misc_feature (1)..(332): NCBI GI NO: 21780142 NR Description: hypothetical protein [Arabidopsis thaliana]
  misc_feature (1)..(330): NCBI GI NO: 15234006 NR Description: putative protein; protein id: At4g18750.1
  misc_feature (1)..(332): NCBI GI NO: 34897084 NR Description: hypothetical protein
  misc_feature (1)..(332): NCBI GI NO: 34897884 NR Description: Similar to Arabidopsis thaliana DNA chromosome 4
MALGQSLHGKSVRLGYSSHIFTQTALMNMYFGCGLAVSAGRVFDEMQARDVVAWTGMVSGYVDSGMHLRAAEVFKEMRGGEEVTRPNVATLVSVASAYASLGSLEYAKGLHGYVEKVGLRGDLILTNALMDMYGKCGSIESARALFDFMHEKDLLSWTTMISGLASHGHGKEAVALFLSMREVGVLPDSTTFIVVLSACSHAGLVDEGISIFNSMASEYKVTPDIKHYGCMVDLFSRAGLLSRAYELIDSMPFEPNLAILGALLSACSVNNELEIGELVLQKIDSVCSYKGGAGVLLSNIYANQNLWHEVDSIRRKIRNGTIPRKPPGQSSVASEVPFMSL

SEQ ID NO: 14847 - DNA, 1201 bp, Triticum aestivum
  misc_feature (1)..(1201): Ceres Seq. ID no. 13598595
gaaattggcgccacctccctcccgtgctcgcccctcgcctgggctctcgacccatccctgctcgaaccctaacctcagatggcgcttcccgcgtgagagaacgctgccgcggcagcagcgttgaggggggcttcgtcgtagtcagcgcgacagatgtataagcagggggcggccggaggtgcggggccggaccggaagcgcatcagcgacgcgctcgataagcacctggagaaggcggccgcgtcgccctccacgtcgagaggctcggcgggtgcccgaggcaaccacaaccgcgtcgtagtgccgtcctccatccccaagggccgctgctccgaaggggagtctgaatctgacagtgaagcatcagatgttagtggctctgatggagaagacacctcatggatttcatggtattgcaacctaagagggaatgagttcttctgtgaagtcgatgatgattacattcaagatgacttcaatctttgtgggcttagcagtcaagttccatattatgattatgctcttgatctcattttagatatcgagtcttctcatggtgatattttcacagaagaacaaaatgagctagtggaatcagctgctgagatgttgtatgggctaattcatgcgcgatacattctgaccagtaaagggttggctgctatgctggagaaatacaagaactatgactttggacgatgtccacgggtttattgctgtggccaaccatgtctaccagttggacaatcggatattcaccgatctagtacagtgaagatatactgtcctaagtgcgaagacatctactatccacggtctaaataccaaggcaatattgatggagcctactttgggacaacatttcctcacctgtttctgatgacgtacgatcacctcaagccccagaagccctcgcagcgctatgttcctcgcgtatttggcttcaagctccacaaccacaagccatgatgcggaggtgaaggaaaagataagaggccccggaagactactgtaagagtgcaatcgccagatcatgctgcccacccatattgtgtgccctgtctggtctatttaacattgaaatattggtataaaagaagacatgagacgatgttgtaacctaattccagctctactggctagtaaatctggacctctgtttccaaaaccagcagctatcgagaaatcaaagttatggtcg

SEQ ID NO: 14848 - protein, 271 aa, Triticum aestivum
  peptide (1)..(271): Ceres Seq. ID no. 13598596
  misc_feature (79)..(257): Pfam Name: Pfam Description:  Casein kinase II regulatory subunit
  misc_feature (1)..(271): NCBI GI NO: 11527004 NR Description: protein kinase CK2 regulatory subunit CK2B3
  misc_feature (5)..(271): NCBI GI NO: 34901776 NR Description: OJ1058_B11.17
  misc_feature (31)..(271): NCBI GI NO: 29367573 NR Description: possible protein kinase CK2 regulatory subunit
  misc_feature (11)..(267): NCBI GI NO: 21261784 NR Description: protein kinase Ck2 regulatory subunit 2
  misc_feature (2)..(267): NCBI GI NO: 37536920 NR Description: putative casein kinase II beta subunit
  misc_feature (13)..(271): NCBI GI NO: 11527002 NR Description: protein kinase CK2 regulatory subunit CK2B2
  misc_feature (8)..(268): NCBI GI NO: 15224934 NR Description: casein kinase II beta chain, putative
  misc_feature (8)..(268): NCBI GI NO: 30689795 NR Description: casein kinase II beta chain, putative
  misc_feature (1)..(271): NCBI GI NO: 15236597 NR Description: casein kinase II beta chain, putative
  misc_feature (13)..(271): NCBI GI NO: 15238013 NR Description: casein kinase II beta chain, putative
MYKQGAAGGAGPDRKRISDALDKHLEKAAASPSTSRGSAGARGNHNRVVVPSSIPKGRCSEGESESDSEASDVSGSDGEDTSWISWYCNLRGNEFFCEVDDDYIQDDFNLCGLSSQVPYYDYALDLILDIESSHGDIFTEEQNELVESAAEMLYGLIHARYILTSKGLAAMLEKYKNYDFGRCPRVYCCGQPCLPVGQSDIHRSSTVKIYCPKCEDIYYPRSKYQGNIDGAYFGTTFPHLFLMTYDHLKPQKPSQRYVPRVFGFKLHNHKP

SEQ ID NO: 14849 - DNA, 1046 bp, Triticum aestivum
  misc_feature (1)..(1046): Ceres Seq. ID no. 13597570
actctccgatcgttcccttcgcctatctgcaggtctgcatccacacaacacaagcccacgcccacgcccacgcccacgcgcccccaaacccaaaaccctaccacgcctccgcgcccatggcccctaccgcgccgcagccgccccgcccctccgccgccgccccctccgcggcgccggtcgacgcgctcttcctccagaacctgatgaaccgcgtccagctccgcccgcccttcctcgacaccaactccttcctcacccaggacctcgacgacttcctcctcaacgagttcgccgcgctctccgccgcggcgggcgagtcctacgacgacgacgacgacgacgaagaaggggaggacggcggcctctccgacggggaggcctccggggaggccaggcggcgccggatgctctcgcgggaggaggccaagctggagaaggagatcgtccggatggtgctcgccggcgacggggacgcccttaagcccaactcgggccagtccgtcgccgtcggcgaccaccacgtgtgcgtcggcttccacgacgaggccggtggggagtaccgcgtgtgggagtggcacggccacgtcatgctctttgacgacgaggacggctactccgccgagtacatctacgggaaccacttcgagccgctcgctgccgccgctgccagggccaagcagaaggagaaggagaagagagagaaggacctcacctcgggccttcgggatttgattgtgggtgatggggacagtgccaatggcttgaatttgaatggcaatggcggaggccccagggtggtgcgcaggaacgtcgtaaatgcccctgcagcagcgcctgcaaggtaatcctttctagcagttccaccgggctgcacgaagtgaatgcatcaataccaggggcagagccaataaagtttaatcttttttcctctaatgcttgtttaagcggtctcttttgatctaaggagaaaggctctgtaattcacttttggcatgatatatacaatgtgcccactggattttgggatggaatttttattcaatact

SEQ ID NO: 14850 - protein, 280 aa, Triticum aestivum
  peptide (1)..(280): Ceres Seq. ID no. 13597571
  misc_feature (105)..(265): NCBI GI NO: 22331772 NR Description: expressed protein [Arabidopsis thaliana]
  misc_feature (105)..(259): NCBI GI NO: 11357797 NR Description: hypothetical protein F4P12
SPIVPFAYLQVCIHTTQAHAHAHAHAPPNPKPYHASAPMAPTAPQPPRPSAAAPSAAPVDALFLQNLMNRVQLRPPFLDTNSFLTQDLDDFLLNEFAALSAAAGESYDDDDDDEEGEDGGLSDGEASGEARRRRMLSREEAKLEKEIVRMVLAGDGDALKPNSGQSVAVGDHHVCVGFHDEAGGEYRVWEWHGHVMLFDDEDGYSAEYIYGNHFEPLAAAAARAKQKEKEKREKDLTSGLRDLIVGDGDSANGLNLNGNGGGPRVVRRNVVNAPAAAPAR

SEQ ID NO: 14851 - protein, 242 aa, Triticum aestivum
  peptide (1)..(242): Ceres Seq. ID no. 13597572
  misc_feature (67)..(227): NCBI GI NO: 22331772 NR Description: expressed protein [Arabidopsis thaliana]
  misc_feature (67)..(221): NCBI GI NO: 11357797 NR Description: hypothetical protein F4P12
MAPTAPQPPRPSAAAPSAAPVDALFLQNLMNRVQLRPPFLDTNSFLTQDLDDFLLNEFAALSAAAGESYDDDDDDEEGEDGGLSDGEASGEARRRRMLSREEAKLEKEIVRMVLAGDGDALKPNSGQSVAVGDHHVCVGFHDEAGGEYRVWEWHGHVMLFDDEDGYSAEYIYGNHFEPLAAAAARAKQKEKEKREKDLTSGLRDLIVGDGDSANGLNLNGNGGGPRVVRRNVVNAPAAAPAR

SEQ ID NO: 14852 - protein, 213 aa, Triticum aestivum
  peptide (1)..(213): Ceres Seq. ID no. 13597573
  misc_feature (38)..(198): NCBI GI NO: 22331772 NR Description: expressed protein [Arabidopsis thaliana]
  misc_feature (38)..(192): NCBI GI NO: 11357797 NR Description: hypothetical protein F4P12
MNRVQLRPPFLDTNSFLTQDLDDFLLNEFAALSAAAGESYDDDDDDEEGEDGGLSDGEASGEARRRRMLSREEAKLEKEIVRMVLAGDGDALKPNSGQSVAVGDHHVCVGFHDEAGGEYRVWEWHGHVMLFDDEDGYSAEYIYGNHFEPLAAAAARAKQKEKEKREKDLTSGLRDLIVGDGDSANGLNLNGNGGGPRVVRRNVVNAPAAAPAR

SEQ ID NO: 14853 - DNA, 1572 bp, Triticum aestivum
  misc_feature (1)..(1572): Ceres Seq. ID no. 13597574
atcaatcacttgccatcctaccaccttgtgacattccaaacacaaacctacactccacaacccgcaccacatatcaacaacgaaagttcttgttgccgacatggacggcgtcacagccaacaccaccacgatcagtccccggaagctgcgggtgatgctctactcgtccccactcatggggcacctcgtccccatgatagagctcgccaagctcttcgccgctcgtgggctagccatcacggtagtcctcatggacccgccgtatgataccggcgccacgggccccttcctcagcggtgtctccgcggccaacccctccatttctttccatcgtctgccacaggtcaagctcccagagtctgacgactccgtgatgccagccttagcgttcgcccgtctctccaacccacacctacattacttcctcgccggcgcatctccggacttcctcgtggtggacttcttctgcagtgccgccatggacgtagccgcggagctcggcatccccgcctacttcttctccacctccggcgcccagatcctggctttctttatgcacctcacggttctgcatgggaaaagcacgaggagcttccgggaaatgggcgaagaactcgtgcacgtaccggggatcaccccgtttccggcgacgcactccatccagccactcatggatcgtgacggtgcgtcctaccaggcattactaaatgtgagcctcaacctattccgatcacagggcatcttcatcaacaccttccgctcgctggaacctcgtgccatggacaccatcctcgcggggcactccgccccagctggcctctcgacgcccccagtctactgcattgggccgctagtcaagtcagaggaggtgggcgtgaagcgtggagacgagtgcctcgcgtggttggacacgcaacccaaggccagtgtggtgttcctgtgctttggcagcctcggccggttcaacgccgaacaaaccagggaagtggcaaccgtgctggaggctagtggacaaaggttcctctgggttgtgcggagcccgccgagcgacgacacgactacagagccggacttggatgtgctgctttcgaagggtttcctggaccggaccaagggcaggggcctcgtcgtgaagtcatgggcaccacaaggtgatgttctagcacatcatgccgtgggaagttttgtgacacactgcgggtggaactcggtgctcgagtctactatggcaggtgtgcctatgctggcctggccattgtacgcggagcaaaagatgaatgcggtgttcctcgagaaagagatggagttggctgtcatgatggaagggtacgataaggagatggtggaggcaaaggagattgccaaaaagatcaggtggatgatggattcggaaggcgggagggtgctccgagagcggactctagcggtgatgtggcaggccaatgaggctctactcgagggtggagaatcagaggcaacattgacagagcttgttgatgtgtgggttaaagcttgacatgtgcaacatcatttatgaatgatcatggaaataaagagtgagcattgggtctt

SEQ ID NO: 14854 - protein, 471 aa, Triticum aestivum
  peptide (1)..(471): Ceres Seq. ID no. 15222131
  misc_feature (18)..(447): Pfam Name: Pfam Description:  UDP-glucoronosyl and UDP-glucosyl transferase
  misc_feature (1)..(471): NCBI GI NO: 22535568 NR Description: putative glucosyltransferase
  misc_feature (11)..(468): NCBI GI NO: 34910208 NR Description: putative flavonol glucosyltransferase
  misc_feature (18)..(466): NCBI GI NO: 34910204 NR Description: putative flavonol glucosyltransferase
  misc_feature (18)..(466): NCBI GI NO: 34910228 NR Description: putative flavonol glucosyltransferase
  misc_feature (17)..(465): NCBI GI NO: 34910218 NR Description: putative flavonol glucosyltransferase
  misc_feature (18)..(466): NCBI GI NO: 34910222 NR Description: putative flavonol glucosyltransferase
  misc_feature (18)..(468): NCBI GI NO: 18401158 NR Description: glycosyltransferase family [Arabidopsis thaliana]
  misc_feature (18)..(468): NCBI GI NO: 21593785 NR Description: putative glucosyltransferase
  misc_feature (18)..(453): NCBI GI NO: 18401155 NR Description: glycosyltransferase family [Arabidopsis thaliana]
  misc_feature (18)..(453): NCBI GI NO: 30684106 NR Description: glycosyltransferase family [Arabidopsis thaliana]
MDGVTANTTTISPRKLRVMLYSSPLMGHLVPMIELAKLFAARGLAITVVLMDPPYDTGATGPFLSGVSAANPSISFHRLPQVKLPESDDSVMPALAFARLSNPHLHYFLAGASPDFLVVDFFCSAAMDVAAELGIPAYFFSTSGAQILAFFMHLTVLHGKSTRSFREMGEELVHVPGITPFPATHSIQPLMDRDGASYQALLNVSLNLFRSQGIFINTFRSLEPRAMDTILAGHSAPAGLSTPPVYCIGPLVKSEEVGVKRGDECLAWLDTQPKASVVFLCFGSLGRFNAEQTREVATVLEASGQRFLWVVRSPPSDDTTTEPDLDVLLSKGFLDRTKGRGLVVKSWAPQGDVLAHHAVGSFVTHCGWNSVLESTMAGVPMLAWPLYAEQKMNAVFLEKEMELAVMMEGYDKEMVEAKEIAKKIRWMMDSEGGRVLRERTLAVMWQANEALLEGGESEATLTELVDVWVKA

SEQ ID NO: 14855 - protein, 453 aa, Triticum aestivum
  peptide (1)..(453): Ceres Seq. ID no. 15222132
  misc_feature (1)..(429): Pfam Name: Pfam Description:  UDP-glucoronosyl and UDP-glucosyl transferase
  misc_feature (1)..(453): NCBI GI NO: 22535568 NR Description: putative glucosyltransferase
  misc_feature (1)..(450): NCBI GI NO: 34910208 NR Description: putative flavonol glucosyltransferase
  misc_feature (1)..(448): NCBI GI NO: 34910204 NR Description: putative flavonol glucosyltransferase
  misc_feature (1)..(448): NCBI GI NO: 34910228 NR Description: putative flavonol glucosyltransferase
  misc_feature (1)..(447): NCBI GI NO: 34910218 NR Description: putative flavonol glucosyltransferase
  misc_feature (1)..(448): NCBI GI NO: 34910222 NR Description: putative flavonol glucosyltransferase
  misc_feature (1)..(450): NCBI GI NO: 18401158 NR Description: glycosyltransferase family [Arabidopsis thaliana]
  misc_feature (1)..(450): NCBI GI NO: 21593785 NR Description: putative glucosyltransferase
  misc_feature (1)..(435): NCBI GI NO: 18401155 NR Description: glycosyltransferase family [Arabidopsis thaliana]
  misc_feature (1)..(435): NCBI GI NO: 30684106 NR Description: glycosyltransferase family [Arabidopsis thaliana]
MLYSSPLMGHLVPMIELAKLFAARGLAITVVLMDPPYDTGATGPFLSGVSAANPSISFHRLPQVKLPESDDSVMPALAFARLSNPHLHYFLAGASPDFLVVDFFCSAAMDVAAELGIPAYFFSTSGAQILAFFMHLTVLHGKSTRSFREMGEELVHVPGITPFPATHSIQPLMDRDGASYQALLNVSLNLFRSQGIFINTFRSLEPRAMDTILAGHSAPAGLSTPPVYCIGPLVKSEEVGVKRGDECLAWLDTQPKASVVFLCFGSLGRFNAEQTREVATVLEASGQRFLWVVRSPPSDDTTTEPDLDVLLSKGFLDRTKGRGLVVKSWAPQGDVLAHHAVGSFVTHCGWNSVLESTMAGVPMLAWPLYAEQKMNAVFLEKEMELAVMMEGYDKEMVEAKEIAKKIRWMMDSEGGRVLRERTLAVMWQANEALLEGGESEATLTELVDVWVKA

SEQ ID NO: 14856 - protein, 446 aa, Triticum aestivum
  peptide (1)..(446): Ceres Seq. ID no. 15222133
  misc_feature (1)..(422): Pfam Name: Pfam Description:  UDP-glucoronosyl and UDP-glucosyl transferase
  misc_feature (1)..(446): NCBI GI NO: 22535568 NR Description: putative glucosyltransferase
  misc_feature (1)..(443): NCBI GI NO: 34910208 NR Description: putative flavonol glucosyltransferase
  misc_feature (1)..(441): NCBI GI NO: 34910204 NR Description: putative flavonol glucosyltransferase
  misc_feature (1)..(441): NCBI GI NO: 34910228 NR Description: putative flavonol glucosyltransferase
  misc_feature (1)..(440): NCBI GI NO: 34910218 NR Description: putative flavonol glucosyltransferase
  misc_feature (1)..(441): NCBI GI NO: 34910222 NR Description: putative flavonol glucosyltransferase
  misc_feature (1)..(443): NCBI GI NO: 18401158 NR Description: glycosyltransferase family [Arabidopsis thaliana]
  misc_feature (1)..(443): NCBI GI NO: 21593785 NR Description: putative glucosyltransferase
  misc_feature (1)..(428): NCBI GI NO: 18401155 NR Description: glycosyltransferase family [Arabidopsis thaliana]
  misc_feature (1)..(428): NCBI GI NO: 30684106 NR Description: glycosyltransferase family [Arabidopsis thaliana]
MGHLVPMIELAKLFAARGLAITVVLMDPPYDTGATGPFLSGVSAANPSISFHRLPQVKLPESDDSVMPALAFARLSNPHLHYFLAGASPDFLVVDFFCSAAMDVAAELGIPAYFFSTSGAQILAFFMHLTVLHGKSTRSFREMGEELVHVPGITPFPATHSIQPLMDRDGASYQALLNVSLNLFRSQGIFINTFRSLEPRAMDTILAGHSAPAGLSTPPVYCIGPLVKSEEVGVKRGDECLAWLDTQPKASVVFLCFGSLGRFNAEQTREVATVLEASGQRFLWVVRSPPSDDTTTEPDLDVLLSKGFLDRTKGRGLVVKSWAPQGDVLAHHAVGSFVTHCGWNSVLESTMAGVPMLAWPLYAEQKMNAVFLEKEMELAVMMEGYDKEMVEAKEIAKKIRWMMDSEGGRVLRERTLAVMWQANEALLEGGESEATLTELVDVWVKA

SEQ ID NO: 14857 - DNA, 1511 bp, Triticum aestivum
  misc_feature (1)..(1511): Ceres Seq. ID no. 13597502
  misc_feature (1420)..(1420): n is a, c, t, g, unknown, or other
  misc_feature (1467)..(1467): n is a, c, t, g, unknown, or other
  misc_feature (1442)..(1442): n is a, c, t, g, unknown, or other
  misc_feature (1426)..(1426): n is a, c, t, g, unknown, or other
  misc_feature (1418)..(1418): n is a, c, t, g, unknown, or other
  misc_feature (1501)..(1501): n is a, c, t, g, unknown, or other
aaagctaaagaaacaaggtagtgtagccagccatcaagtacaccgcagtgctgcaccgagcggctctaggctagcggagttgagtgtcgtcagacagccaccaccttccagttccagccatggccacggcgtcggcggcgcggatagtgccggtgctgctggccctcgcggccctcatctgcgcggcggcggaggcgtcgccagcgaaggtgccggcgatgtacgtgttcggggactcaacggccgacgtcggcagcaacaactacctgcctggcagcgcggtgccgcgggccaacttcccgcacaacggcgtcgacttccccacctcgcgccccaccggccgcttcagcaatggcttcaacggcatcgacttcttagctctgaacatgggcttcaagcgcagccccccgccgttcctctcggtggccaacagaaccaacaggcagatcgcgcgagggctgctgggagcaaacttcgcctccgcaggatcaggcgttcttgacacgacgggtgactccatcgtctcgatgagcaagcaggtcgagcagttcgccattctgcgatgcaacatctctgcgcgcatcggcaaagaggcggccgacaccgtgctgtcgaggtccctgtttgtcatcagcaccggcggcaacgacatcttcgccttcttctcggcgaacagcacgccgacggccgcgcagatgcagctgttcaccgccaacctggtttcgcagtacaaaaatcatgtgaaggctctgttcggcctcggggcgaggaagttggccgtgatcgacgtcccgccgatcgggtgctgcccctacccgagaagcctgcaccctctcggtgcctgtatcgacgtcctcaacgagctgacccgtgggctcaacaagggcgtcaaggacgccatgcatggcctcagcgtcagcttgggtggcctcaagtactccatcgggagctcccacgccgtcgtgcaaagcatcatgaagcacccccaaagactagggttcaaggaggtgaccatggcgtgctgcggctccggcaagttcaacggcaagtcgggctgcacgcccaacgccacgctgtgcgacaaccggcacgagtacctcttctgggacctgctgcacccgactcacgccacgtccaagctcgccgccgcggccatctacaacggctcgctgcacttcgcagcgcccataaacttcaggcagctagcggaggaccagtgctagatagactgatagagcacgcacggccgcgtgcgcggtcgtgtctgctgcgttattaggtttgcttcacgtgtctgtgatggtgatgtttgtgtgtaggatatgtatgcacagtggtgttcgtctgtggtttcatttgtgtattgttaggtgggtgcctggcgtagtgtggaacctaaagatcaaaatggtaccatntntgtaangcaggttaattacttntcgaggtttgtatgtagtactgtanatccgaatgaactaaaatttaattaaatatattntagtattttt

SEQ ID NO: 14858 - protein, 367 aa, Triticum aestivum
  peptide (1)..(367): Ceres Seq. ID no. 13597503
  misc_feature (34)..(340): Pfam Name: Pfam Description:  GDSL-like Lipase/Acylhydrolase
  misc_feature (9)..(363): NCBI GI NO: 29837765 NR Description: putative GDSL-like lipase/acylhydrolase
  misc_feature (1)..(364): NCBI GI NO: 38345853 NR Description: OSJNBa0084K11.17
  misc_feature (23)..(362): NCBI GI NO: 15240452 NR Description: GDSL-motif lipase/hydrolase protein
  misc_feature (26)..(366): NCBI GI NO: 38345537 NR Description: OSJNBa0020J04.12
  misc_feature (14)..(364): NCBI GI NO: 22758315 NR Description: putative early nodulin gene (Enod) related protein
  misc_feature (14)..(364): NCBI GI NO: 37535146 NR Description: putative early nodulin gene (Enod) related protein
  misc_feature (26)..(358): NCBI GI NO: 15229265 NR Description: GDSL-motif lipase/hydrolase protein
  misc_feature (12)..(362): NCBI GI NO: 15224005 NR Description: GDSL-motif lipase/hydrolase protein
  misc_feature (1)..(358): NCBI GI NO: 15235421 NR Description: GDSL-motif lipase/hydrolase protein
  misc_feature (10)..(364): NCBI GI NO: 34909504 NR Description: putative GDSL-motif lipase/hydrolase-like protein
MATASAARIVPVLLALAALICAAAEASPAKVPAMYVFGDSTADVGSNNYLPGSAVPRANFPHNGVDFPTSRPTGRFSNGFNGIDFLALNMGFKRSPPPFLSVANRTNRQIARGLLGANFASAGSGVLDTTGDSIVSMSKQVEQFAILRCNISARIGKEAADTVLSRSLFVISTGGNDIFAFFSANSTPTAAQMQLFTANLVSQYKNHVKALFGLGARKLAVIDVPPIGCCPYPRSLHPLGACIDVLNELTRGLNKGVKDAMHGLSVSLGGLKYSIGSSHAVVQSIMKHPQRLGFKEVTMACCGSGKFNGKSGCTPNATLCDNRHEYLFWDLLHPTHATSKLAAAAIYNGSLHFAAPINFRQLAEDQC

SEQ ID NO: 14859 - protein, 334 aa, Triticum aestivum
  peptide (1)..(334): Ceres Seq. ID no. 13597504
  misc_feature (1)..(307): Pfam Name: Pfam Description:  GDSL-like Lipase/Acylhydrolase
  misc_feature (1)..(330): NCBI GI NO: 29837765 NR Description: putative GDSL-like lipase/acylhydrolase
  misc_feature (1)..(331): NCBI GI NO: 38345853 NR Description: OSJNBa0084K11.17
  misc_feature (1)..(329): NCBI GI NO: 15240452 NR Description: GDSL-motif lipase/hydrolase protein
  misc_feature (1)..(333): NCBI GI NO: 38345537 NR Description: OSJNBa0020J04.12
  misc_feature (1)..(331): NCBI GI NO: 22758315 NR Description: putative early nodulin gene (Enod) related protein
  misc_feature (1)..(331): NCBI GI NO: 37535146 NR Description: putative early nodulin gene (Enod) related protein
  misc_feature (1)..(325): NCBI GI NO: 15229265 NR Description: GDSL-motif lipase/hydrolase protein
  misc_feature (1)..(329): NCBI GI NO: 15224005 NR Description: GDSL-motif lipase/hydrolase protein
  misc_feature (1)..(325): NCBI GI NO: 15235421 NR Description: GDSL-motif lipase/hydrolase protein
  misc_feature (1)..(331): NCBI GI NO: 34909504 NR Description: putative GDSL-motif lipase/hydrolase-like protein
MYVFGDSTADVGSNNYLPGSAVPRANFPHNGVDFPTSRPTGRFSNGFNGIDFLALNMGFKRSPPPFLSVANRTNRQIARGLLGANFASAGSGVLDTTGDSIVSMSKQVEQFAILRCNISARIGKEAADTVLSRSLFVISTGGNDIFAFFSANSTPTAAQMQLFTANLVSQYKNHVKALFGLGARKLAVIDVPPIGCCPYPRSLHPLGACIDVLNELTRGLNKGVKDAMHGLSVSLGGLKYSIGSSHAVVQSIMKHPQRLGFKEVTMACCGSGKFNGKSGCTPNATLCDNRHEYLFWDLLHPTHATSKLAAAAIYNGSLHFAAPINFRQLAEDQC

SEQ ID NO: 14860 - protein, 278 aa, Triticum aestivum
  peptide (1)..(278): Ceres Seq. ID no. 13597505
  misc_feature (1)..(251): Pfam Name: Pfam Description:  GDSL-like Lipase/Acylhydrolase
  misc_feature (1)..(274): NCBI GI NO: 29837765 NR Description: putative GDSL-like lipase/acylhydrolase
  misc_feature (1)..(275): NCBI GI NO: 38345853 NR Description: OSJNBa0084K11.17
  misc_feature (1)..(273): NCBI GI NO: 15240452 NR Description: GDSL-motif lipase/hydrolase protein
  misc_feature (1)..(277): NCBI GI NO: 38345537 NR Description: OSJNBa0020J04.12
  misc_feature (1)..(275): NCBI GI NO: 22758315 NR Description: putative early nodulin gene (Enod) related protein
  misc_feature (1)..(275): NCBI GI NO: 37535146 NR Description: putative early nodulin gene (Enod) related protein
  misc_feature (1)..(269): NCBI GI NO: 15229265 NR Description: GDSL-motif lipase/hydrolase protein
  misc_feature (1)..(273): NCBI GI NO: 15224005 NR Description: GDSL-motif lipase/hydrolase protein
  misc_feature (1)..(269): NCBI GI NO: 15235421 NR Description: GDSL-motif lipase/hydrolase protein
  misc_feature (1)..(275): NCBI GI NO: 34909504 NR Description: putative GDSL-motif lipase/hydrolase-like protein
MGFKRSPPPFLSVANRTNRQIARGLLGANFASAGSGVLDTTGDSIVSMSKQVEQFAILRCNISARIGKEAADTVLSRSLFVISTGGNDIFAFFSANSTPTAAQMQLFTANLVSQYKNHVKALFGLGARKLAVIDVPPIGCCPYPRSLHPLGACIDVLNELTRGLNKGVKDAMHGLSVSLGGLKYSIGSSHAVVQSIMKHPQRLGFKEVTMACCGSGKFNGKSGCTPNATLCDNRHEYLFWDLLHPTHATSKLAAAAIYNGSLHFAAPINFRQLAEDQC

SEQ ID NO: 14861 - DNA, 1041 bp, Triticum aestivum
  misc_feature (1)..(1041): Ceres Seq. ID no. 13584519
cgcgttccgtaggtagcgagctccgccccggatctggccgtcgagcgatggcctcgacgagggatctcgccatagcgtccatctcggtcgccgcaggcgccgtagccgccgcggccgcgctcctgtactcctactcggcaaccaattccaagccccagagcccgcccccgcccccgccgtgcaccgagccactccccgtcaacggctgcgccgccaggcatccgccagcgcaggaccccttcaaaaccaccaagagggaagggttcatctcatgggacgactacttcatggcgattgcgttcctttcagccgagcgttcaaaggatcctaaccggcaggttggcgcatgcttggttagccaagagggcattatcctaggtataggttacaatggattcccaagaggctgttcagatgataagcttccttgggcaaagaaatctgcaagaggggatccattggagacaaaatatccttatgttgttcatgctgaagttaatgctattttaaatacaaaccatgcttcagcggctggacagaagttatacgtcactatgttcccctgtaatgagtgtgctaagattatcatccagtcaggtgtatctgaagtcatctattttgtagagaaaaggattgacaactcagatcatgtttatgttgcttctcacaacttattatcaatggctggtgtgaaggtcaggaagcatcagccacaaatggcacaaataccaatcaactttcaggatccaagggtytaatgaatgaactgtgcgcccttaggtaatgcaaatgtgcaccaatgccttaacaattatgtcagtcattcaaaggctgtcatgctgggttatatactcccccggggggcctagctgttgtatattgtaatcagtcgaattactagatcgagaaaagcacctgtaactagttgcatcctgttgcgaaatttgtatgtgctcagcatcatgaaccattyttctgtaaactgtggctgcaccatgatttaactctcactacggtcgattcttgctgtagtaaatcgtg

SEQ ID NO: 14862 - protein, 251 aa, Triticum aestivum
  peptide (1)..(251): Ceres Seq. ID no. 15222794
  misc_feature (89)..(205): Pfam Name: Pfam Description:  Cytidine and deoxycytidylate deaminase zinc-binding region
  misc_feature (84)..(246): NCBI GI NO: 23503055 NR Description: Deoxycytidylate deaminase (dCMP deaminase)
  misc_feature (84)..(246): NCBI GI NO: 4503277 NR Description: dCMP deaminase [Homo sapiens]
  misc_feature (84)..(246): NCBI GI NO: 12654885 NR Description: Similar to dCMP deaminase [Homo sapiens]
  misc_feature (84)..(246): NCBI GI NO: 21619349 NR Description: 6030466N05Rik protein [Mus musculus]
  misc_feature (18)..(126): NCBI GI NO: 15228398 NR Description: hypothetical protein [Arabidopsis thaliana]
  misc_feature (179)..(234): NCBI GI NO: 15228398 NR Description: hypothetical protein [Arabidopsis thaliana]
  misc_feature (84)..(246): NCBI GI NO: 24667298 NR Description: CG6951-PA [Drosophila melanogaster]
  misc_feature (84)..(246): NCBI GI NO: 30520263 NR Description: RIKEN cDNA 6030466N05 gene [Mus musculus]
  misc_feature (83)..(233): NCBI GI NO: 18310048 NR Description: deoxycytidylate deaminase
  misc_feature (85)..(247): NCBI GI NO: 34762517 NR Description: Deoxycytidylate deaminase
  misc_feature (251)..(251): Xaa is any aa, unknown or other
RSVGSELRPGSGRRAMASTRDLAIASISVAAGAVAAAAALLYSYSATNSKPQSPPPPPPCTEPLPVNGCAARHPPAQDPFKTTKREGFISWDDYFMAIAFLSAERSKDPNRQVGACLVSQEGIILGIGYNGFPRGCSDDKLPWAKKSARGDPLETKYPYVVHAEVNAILNTNHASAAGQKLYVTMFPCNECAKIIIQSGVSEVIYFVEKRIDNSDHVYVASHNLLSMAGVKVRKHQPQMAQIPINFQDPRX

SEQ ID NO: 14863 - protein, 236 aa, Triticum aestivum
  peptide (1)..(236): Ceres Seq. ID no. 15222795
  misc_feature (74)..(190): Pfam Name: Pfam Description:  Cytidine and deoxycytidylate deaminase zinc-binding region
  misc_feature (69)..(231): NCBI GI NO: 23503055 NR Description: Deoxycytidylate deaminase (dCMP deaminase)
  misc_feature (69)..(231): NCBI GI NO: 4503277 NR Description: dCMP deaminase [Homo sapiens]
  misc_feature (69)..(231): NCBI GI NO: 12654885 NR Description: Similar to dCMP deaminase [Homo sapiens]
  misc_feature (69)..(231): NCBI GI NO: 21619349 NR Description: 6030466N05Rik protein [Mus musculus]
  misc_feature (3)..(111): NCBI GI NO: 15228398 NR Description: hypothetical protein [Arabidopsis thaliana]
  misc_feature (164)..(219): NCBI GI NO: 15228398 NR Description: hypothetical protein [Arabidopsis thaliana]
  misc_feature (69)..(231): NCBI GI NO: 24667298 NR Description: CG6951-PA [Drosophila melanogaster]
  misc_feature (69)..(231): NCBI GI NO: 30520263 NR Description: RIKEN cDNA 6030466N05 gene [Mus musculus]
  misc_feature (68)..(218): NCBI GI NO: 18310048 NR Description: deoxycytidylate deaminase
  misc_feature (70)..(232): NCBI GI NO: 34762517 NR Description: Deoxycytidylate deaminase
  misc_feature (236)..(236): Xaa is any aa, unknown or other
MASTRDLAIASISVAAGAVAAAAALLYSYSATNSKPQSPPPPPPCTEPLPVNGCAARHPPAQDPFKTTKREGFISWDDYFMAIAFLSAERSKDPNRQVGACLVSQEGIILGIGYNGFPRGCSDDKLPWAKKSARGDPLETKYPYVVHAEVNAILNTNHASAAGQKLYVTMFPCNECAKIIIQSGVSEVIYFVEKRIDNSDHVYVASHNLLSMAGVKVRKHQPQMAQIPINFQDPRX

SEQ ID NO: 14864 - protein, 156 aa, Triticum aestivum
  peptide (1)..(156): Ceres Seq. ID no. 15222796
  misc_feature (1)..(110): Pfam Name: Pfam Description:  Cytidine and deoxycytidylate deaminase zinc-binding region
  misc_feature (1)..(151): NCBI GI NO: 23503055 NR Description: Deoxycytidylate deaminase (dCMP deaminase)
  misc_feature (1)..(151): NCBI GI NO: 4503277 NR Description: dCMP deaminase [Homo sapiens]
  misc_feature (1)..(151): NCBI GI NO: 12654885 NR Description: Similar to dCMP deaminase [Homo sapiens]
  misc_feature (1)..(151): NCBI GI NO: 21619349 NR Description: 6030466N05Rik protein [Mus musculus]
  misc_feature (1)..(31): NCBI GI NO: 15228398 NR Description: hypothetical protein [Arabidopsis thaliana]
  misc_feature (84)..(139): NCBI GI NO: 15228398 NR Description: hypothetical protein [Arabidopsis thaliana]
  misc_feature (1)..(151): NCBI GI NO: 24667298 NR Description: CG6951-PA [Drosophila melanogaster]
  misc_feature (1)..(151): NCBI GI NO: 30520263 NR Description: RIKEN cDNA 6030466N05 gene [Mus musculus]
  misc_feature (1)..(138): NCBI GI NO: 18310048 NR Description: deoxycytidylate deaminase
  misc_feature (1)..(152): NCBI GI NO: 34762517 NR Description: Deoxycytidylate deaminase
  misc_feature (156)..(156): Xaa is any aa, unknown or other
MAIAFLSAERSKDPNRQVGACLVSQEGIILGIGYNGFPRGCSDDKLPWAKKSARGDPLETKYPYVVHAEVNAILNTNHASAAGQKLYVTMFPCNECAKIIIQSGVSEVIYFVEKRIDNSDHVYVASHNLLSMAGVKVRKHQPQMAQIPINFQDPRX

SEQ ID NO: 14865 - DNA, 1535 bp, Triticum aestivum
  misc_feature (1)..(1535): Ceres Seq. ID no. 15225423
cactgaattttgttggcgttgagttggaggcgccattggccttttcttgccctctctcatggtgtccattgtgcagctgcagagaaggcgaacagaagcagcagcgtcagcgagaggcatccttccggacagggaggagaggatggatctttctgtgccccgaggcgagttcccgatcccaatgcacgccgccgcctcgccctacgggggcatcggcggcgggggcgtcgccgtcgccgaccatgccatggagctccaccatgaccacgccaaccacaacggccagtcccagtcccaggcgcaggacatgccgtcgcctcccgctgctgtgtctgaggacagctccgggaagaagcgcgcggcggccattgccggcggagcgggagggccggcggtcaagtaccgggagtgcctcaagaaccacgcggcggccatcggcggcaacgccaccgacgggtgcggcgagttcatgcccagcggcgaggagggctcgctggaggcgctcaagtgctccgcctgcggctgccaccgcaatttccaccgcaaggagctcgacgacttcgacggcgacagctgcgcctcgcacggctacggctacggccaccacgccgtccgccgcctgctcggccccgccgtgccgcaccaccacaagagcagcgggggcctcctcgtcaccgcggaccactacggcgcctacgccgcggcgcgcgcgctccctccgccgccgcccccgccgctgggacaccaccaccagatcatcatgccgctcaacatgatccagacgtccgagtcggacgagatggacggcagcggcggcggcggtatcatgggcgacggcagaggcgggctagcctcaggcggcggcggcggctcctcctcgtccaagaagcgcttccgcaccaagttcaccgccgagcagaaggggcgcatgctggagttcgcggagaacgtggggtggcgtctccagaagctggacgacgccatggtgcagcacttctgccaggagatcggcgtcaagcgccgggtcctcaaggtctggatgcacaacaacaagcacaacctcgccagcaggccgctccctacctcgcctgcgcagccgcagtcacagtcgatgccgctggcgatgtcaatgccgatgccgatgcaagtgccgccgtcgcagcccgggccttcgggccaccgcggccccagctccccgcatgcgcagggggagctcaagctcgactgacggcacaaagaagccctggtgtctgtcaacggcgccatggtggctgattctgctagcgttagtaagccgcattgccattaatttcactgttccatcggagcgatcgatcgaagcagagagaagagaagagaaccaaaaaacaaacccgagtctatcaccatctccatttttttcctttctctgtttatcttgtcataaggttggggagcaagcatgagaggggggacataggcgaaccggactgagctccactcaatttcaatttatttttcctggacctagtttttttcgaaaaaaaaaaaaaaaa

SEQ ID NO: 14866 - protein, 389 aa, Triticum aestivum
  peptide (1)..(389): Ceres Seq. ID no. 15225424
  misc_feature (111)..(166): Pfam Name: Pfam Description:  ZF-HD protein dimerisation region
  misc_feature (51)..(343): NCBI GI NO: 18410804 NR Description: expressed protein [Arabidopsis thaliana]
  misc_feature (31)..(166): NCBI GI NO: 15226993 NR Description: expressed protein [Arabidopsis thaliana]
  misc_feature (31)..(166): NCBI GI NO: 20148768 NR Description: hypothetical protein At2g02540/T822.16
  misc_feature (220)..(338): NCBI GI NO: 15226993 NR Description: expressed protein [Arabidopsis thaliana]
  misc_feature (220)..(338): NCBI GI NO: 20148768 NR Description: hypothetical protein At2g02540/T822.16
  misc_feature (37)..(189): NCBI GI NO: 15223757 NR Description: expressed protein [Arabidopsis thaliana]
  misc_feature (274)..(338): NCBI GI NO: 15223757 NR Description: expressed protein [Arabidopsis thaliana]
  misc_feature (74)..(170): NCBI GI NO: 15233925 NR Description: expressed protein [Arabidopsis thaliana]
  misc_feature (272)..(339): NCBI GI NO: 15233925 NR Description: expressed protein [Arabidopsis thaliana]
  misc_feature (210)..(351): NCBI GI NO: 15238445 NR Description: expressed protein [Arabidopsis thaliana]
MVSIVQLQRRRTEAAASARGILPDREERMDLSVPRGEFPIPMHAAASPYGGIGGGGVAVADHAMELHHDHANHNGQSQSQAQDMPSPPAAVSEDSSGKKRAAAIAGGAGGPAVKYRECLKNHAAAIGGNATDGCGEFMPSGEEGSLEALKCSACGCHRNFHRKELDDFDGDSCASHGYGYGHHAVRRLLGPAVPHHHKSSGGLLVTADHYGAYAAARALPPPPPPPLGHHHQIIMPLNMIQTSESDEMDGSGGGGIMGDGRGGLASGGGGGSSSSKKRFRTKFTAEQKGRMLEFAENVGWRLQKLDDAMVQHFCQEIGVKRRVLKVWMHNNKHNLASRPLPTSPAQPQSQSMPLAMSMPMPMQVPPSQPGPSGHRGPSSPHAQGELKLD

SEQ ID NO: 14867 - protein, 361 aa, Triticum aestivum
  peptide (1)..(361): Ceres Seq. ID no. 15225425
  misc_feature (83)..(138): Pfam Name: Pfam Description:  ZF-HD protein dimerisation region
  misc_feature (23)..(315): NCBI GI NO: 18410804 NR Description: expressed protein [Arabidopsis thaliana]
  misc_feature (3)..(138): NCBI GI NO: 15226993 NR Description: expressed protein [Arabidopsis thaliana]
  misc_feature (3)..(138): NCBI GI NO: 20148768 NR Description: hypothetical protein At2g02540/T822.16
  misc_feature (192)..(310): NCBI GI NO: 15226993 NR Description: expressed protein [Arabidopsis thaliana]
  misc_feature (192)..(310): NCBI GI NO: 20148768 NR Description: hypothetical protein At2g02540/T822.16
  misc_feature (9)..(161): NCBI GI NO: 15223757 NR Description: expressed protein [Arabidopsis thaliana]
  misc_feature (246)..(310): NCBI GI NO: 15223757 NR Description: expressed protein [Arabidopsis thaliana]
  misc_feature (46)..(142): NCBI GI NO: 15233925 NR Description: expressed protein [Arabidopsis thaliana]
  misc_feature (244)..(311): NCBI GI NO: 15233925 NR Description: expressed protein [Arabidopsis thaliana]
  misc_feature (182)..(323): NCBI GI NO: 15238445 NR Description: expressed protein [Arabidopsis thaliana]
MDLSVPRGEFPIPMHAAASPYGGIGGGGVAVADHAMELHHDHANHNGQSQSQAQDMPSPPAAVSEDSSGKKRAAAIAGGAGGPAVKYRECLKNHAAAIGGNATDGCGEFMPSGEEGSLEALKCSACGCHRNFHRKELDDFDGDSCASHGYGYGHHAVRRLLGPAVPHHHKSSGGLLVTADHYGAYAAARALPPPPPPPLGHHHQIIMPLNMIQTSESDEMDGSGGGGIMGDGRGGLASGGGGGSSSSKKRFRTKFTAEQKGRMLEFAENVGWRLQKLDDAMVQHFCQEIGVKRRVLKVWMHNNKHNLASRPLPTSPAQPQSQSMPLAMSMPMPMQVPPSQPGPSGHRGPSSPHAQGELKLD

SEQ ID NO: 14868 - protein, 348 aa, Triticum aestivum
  peptide (1)..(348): Ceres Seq. ID no. 15225426
  misc_feature (70)..(125): Pfam Name: Pfam Description:  ZF-HD protein dimerisation region
  misc_feature (10)..(302): NCBI GI NO: 18410804 NR Description: expressed protein [Arabidopsis thaliana]
  misc_feature (1)..(125): NCBI GI NO: 15226993 NR Description: expressed protein [Arabidopsis thaliana]
  misc_feature (1)..(125): NCBI GI NO: 20148768 NR Description: hypothetical protein At2g02540/T822.16
  misc_feature (179)..(297): NCBI GI NO: 15226993 NR Description: expressed protein [Arabidopsis thaliana]
  misc_feature (179)..(297): NCBI GI NO: 20148768 NR Description: hypothetical protein At2g02540/T822.16
  misc_feature (1)..(148): NCBI GI NO: 15223757 NR Description: expressed protein [Arabidopsis thaliana]
  misc_feature (233)..(297): NCBI GI NO: 15223757 NR Description: expressed protein [Arabidopsis thaliana]
  misc_feature (33)..(129): NCBI GI NO: 15233925 NR Description: expressed protein [Arabidopsis thaliana]
  misc_feature (231)..(298): NCBI GI NO: 15233925 NR Description: expressed protein [Arabidopsis thaliana]
  misc_feature (169)..(310): NCBI GI NO: 15238445 NR Description: expressed protein [Arabidopsis thaliana]
MHAAASPYGGIGGGGVAVADHAMELHHDHANHNGQSQSQAQDMPSPPAAVSEDSSGKKRAAAIAGGAGGPAVKYRECLKNHAAAIGGNATDGCGEFMPSGEEGSLEALKCSACGCHRNFHRKELDDFDGDSCASHGYGYGHHAVRRLLGPAVPHHHKSSGGLLVTADHYGAYAAARALPPPPPPPLGHHHQIIMPLNMIQTSESDEMDGSGGGGIMGDGRGGLASGGGGGSSSSKKRFRTKFTAEQKGRMLEFAENVGWRLQKLDDAMVQHFCQEIGVKRRVLKVWMHNNKHNLASRPLPTSPAQPQSQSMPLAMSMPMPMQVPPSQPGPSGHRGPSSPHAQGELKLD

SEQ ID NO: 14869 - DNA, 2159 bp, Triticum aestivum
  misc_feature (1)..(2159): Ceres Seq. ID no. 13584520
atcaacggtgaccctcgatagggtttcatcgtcagagaggaaaagccgaaaaggggatctgaggtcagagtgatgcgccgcctgccttctgccgagctccagcctcgcgccgccgcccttgcctgaggcctcctatgaggatcgagtggtgcttcagaagagacgaccggggagctgcagttcccaatcgaagtagcagctccttttcgagctgccatccgcagtcgaaggaatcaagcggctcctctccgagtcgtggtccgcaatccaagcggctccttttttcagcggcaatccggattcaaagcagtccttcccgggctgcaatcagaaacaggtcctgtttcagttttaataaagtctacgagctgttggctccctcacgtggcaggaacgtagctgctataaatctggcctggcggcaaccgtggtacccgccagttttaagaggatacgatcatctcccttcggcgagcgatggccaaaccatccgtggacggcctaggcaaatcctccctcgatatggtggaggacaatggagttgacaggctcagcaagttgcctgatgacgttttgctcaacattgtggagcgacttgatatcgctgatgttgcacgaaccaccatcctctccagacgttggaagcagatccctgctatactctcaaagatttttataatggttgcttcttttcaacccaagcatgaaggtaggaagttaacctcagatgatatagttcgggccaacaccaacgtgctggaagcaaccaggagcatactggtaaagagggctggaggtccacacaccattcacctgctgcgcatgcaattctacttgggagatgagtccattttcattggtcatgctgttgccaacaccatagcaacacacaaggttgcttcagttgagtttacaatcttgaccaaggtgcgcacaaagtttaccaataatgacctgctcactcatgggaggcagttcatgtcattccttgattcgtgtccaaacacatttggtggtcttgcacgcctcacgctagagaatttgaggttaggagaatcagactttcccaaaattttcagtatatgcaagcaactcgaggtcctctgcctctaccactgtgatatgggcattgagtctttgctggaagtggaacactcacaactcagtgaactggtgattggccgtagcgtgcttattaagagggttgatctgaagtgggtaccaaaactcacagtactgaaatttaatatgtttcgatctcaagatgaccccttctgtcttggctatgtcccacttctccagactgtgagcatcattaatactggtttttcttggcacaagatgctcaagataagcgagttgctgggtgaaaccgccataagcaacctgcatttgaacttcaaaagtgaaaagatttgggtcaagccggaaggtcgaagacaattgttaccagtgttacacaagctaaggcttgtgaatttgattaacatttctgaagaatgcgatctgacttggataatgttcatacttcaaggtgcacccacccttaaggaactacgcatcttggtgcgggaccatttatgtgaaatggtaactggggagcggagaaaaaagtatgcctttagcgaggagaaggacaagggactagagtgggaaccatctgcatctgatttcaagcaccacaaccttgctgagctcagaatctatgggaggtttgaagcagaagaaaaaatcgtgcgctttgccaggaatatcatggaagcagcggtgaatctcgaggacataaaactttataagagtccagtgtgtgagaattgcaagcacatgctccaggagtggacgttgaaggagaagtcgttgcttagctacaaactcagcaaggggatgctgtcttcgctcgtccggattcagttcccaagtttaggggaaatttttacttggccaaagtactggtcttagctgcaagctgtggttttttttttgaggggttgcaagctgcagttcacaggagttgttgtatgcatcgattaattctcactagtcaaccttttaaattattcctgttttgagattgtactgagtcgaggaggataaggagtaactcttgacattagtgtgaagtattttggcaaatgaaagtttcggatgtgttattcgtg

SEQ ID NO: 14870 - protein, 493 aa, Triticum aestivum
  peptide (1)..(493): Ceres Seq. ID no. 13584521
  misc_feature (10)..(380): NCBI GI NO: 21741445 NR Description: OJ000223_09.1
  misc_feature (21)..(473): NCBI GI NO: 38345336 NR Description: OSJNBa0081L15.9
  misc_feature (243)..(479): NCBI GI NO: 38345337 NR Description: OSJNBa0081L15.10
  misc_feature (25)..(135): NCBI GI NO: 38345337 NR Description: OSJNBa0081L15.10
  misc_feature (23)..(448): NCBI GI NO: 34395313 NR Description: hypothetical protein
  misc_feature (23)..(448): NCBI GI NO: 34898872 NR Description: hypothetical protein~similar to Oryza sativachromosome7
  misc_feature (25)..(313): NCBI GI NO: 38345335 NR Description: OSJNBa0081L15.8
  misc_feature (181)..(477): NCBI GI NO: 34912106 NR Description: OSJNBb0024F06.4
  misc_feature (40)..(407): NCBI GI NO: 34393595 NR Description: unknown protein
  misc_feature (110)..(448): NCBI GI NO: 34904800 NR Description: hypothetical protein~predicted by GeneMark
MAKPSVDGLGKSSLDMVEDNGVDRLSKLPDDVLLNIVERLDIADVARTTILSRRWKQIPAILSKIFIMVASFQPKHEGRKLTSDDIVRANTNVLEATRSILVKRAGGPHTIHLLRMQFYLGDESIFIGHAVANTIATHKVASVEFTILTKVRTKFTNNDLLTHGRQFMSFLDSCPNTFGGLARLTLENLRLGESDFPKIFSICKQLEVLCLYHCDMGIESLLEVEHSQLSELVIGRSVLIKRVDLKWVPKLTVLKFNMFRSQDDPFCLGYVPLLQTVSIINTGFSWHKMLKISELLGETAISNLHLNFKSEKIWVKPEGRRQLLPVLHKLRLVNLINISEECDLTWIMFILQGAPTLKELRILVRDHLCEMVTGERRKKYAFSEEKDKGLEWEPSASDFKHHNLAELRIYGRFEAEEKIVRFARNIMEAAVNLEDIKLYKSPVCENCKHMLQEWTLKEKSLLSYKLSKGMLSSLVRIQFPSLGEIFTWPKYWS

SEQ ID NO: 14871 - protein, 478 aa, Triticum aestivum
  peptide (1)..(478): Ceres Seq. ID no. 13584522
  misc_feature (1)..(365): NCBI GI NO: 21741445 NR Description: OJ000223_09.1
  misc_feature (6)..(458): NCBI GI NO: 38345336 NR Description: OSJNBa0081L15.9
  misc_feature (228)..(464): NCBI GI NO: 38345337 NR Description: OSJNBa0081L15.10
  misc_feature (10)..(120): NCBI GI NO: 38345337 NR Description: OSJNBa0081L15.10
  misc_feature (8)..(433): NCBI GI NO: 34395313 NR Description: hypothetical protein
  misc_feature (8)..(433): NCBI GI NO: 34898872 NR Description: hypothetical protein~similar to Oryza sativachromosome7
  misc_feature (10)..(298): NCBI GI NO: 38345335 NR Description: OSJNBa0081L15.8
  misc_feature (166)..(462): NCBI GI NO: 34912106 NR Description: OSJNBb0024F06.4
  misc_feature (25)..(392): NCBI GI NO: 34393595 NR Description: unknown protein
  misc_feature (95)..(433): NCBI GI NO: 34904800 NR Description: hypothetical protein~predicted by GeneMark
MVEDNGVDRLSKLPDDVLLNIVERLDIADVARTTILSRRWKQIPAILSKIFIMVASFQPKHEGRKLTSDDIVRANTNVLEATRSILVKRAGGPHTIHLLRMQFYLGDESIFIGHAVANTIATHKVASVEFTILTKVRTKFTNNDLLTHGRQFMSFLDSCPNTFGGLARLTLENLRLGESDFPKIFSICKQLEVLCLYHCDMGIESLLEVEHSQLSELVIGRSVLIKRVDLKWVPKLTVLKFNMFRSQDDPFCLGYVPLLQTVSIINTGFSWHKMLKISELLGETAISNLHLNFKSEKIWVKPEGRRQLLPVLHKLRLVNLINISEECDLTWIMFILQGAPTLKELRILVRDHLCEMVTGERRKKYAFSEEKDKGLEWEPSASDFKHHNLAELRIYGRFEAEEKIVRFARNIMEAAVNLEDIKLYKSPVCENCKHMLQEWTLKEKSLLSYKLSKGMLSSLVRIQFPSLGEIFTWPKYWS

SEQ ID NO: 14872 - protein, 426 aa, Triticum aestivum
  peptide (1)..(426): Ceres Seq. ID no. 13584523
  misc_feature (1)..(313): NCBI GI NO: 21741445 NR Description: OJ000223_09.1
  misc_feature (1)..(406): NCBI GI NO: 38345336 NR Description: OSJNBa0081L15.9
  misc_feature (176)..(412): NCBI GI NO: 38345337 NR Description: OSJNBa0081L15.10
  misc_feature (1)..(68): NCBI GI NO: 38345337 NR Description: OSJNBa0081L15.10
  misc_feature (1)..(381): NCBI GI NO: 34395313 NR Description: hypothetical protein
  misc_feature (1)..(381): NCBI GI NO: 34898872 NR Description: hypothetical protein~similar to Oryza sativachromosome7
  misc_feature (1)..(246): NCBI GI NO: 38345335 NR Description: OSJNBa0081L15.8
  misc_feature (114)..(410): NCBI GI NO: 34912106 NR Description: OSJNBb0024F06.4
  misc_feature (1)..(340): NCBI GI NO: 34393595 NR Description: unknown protein
  misc_feature (43)..(381): NCBI GI NO: 34904800 NR Description: hypothetical protein~predicted by GeneMark
MVASFQPKHEGRKLTSDDIVRANTNVLEATRSILVKRAGGPHTIHLLRMQFYLGDESIFIGHAVANTIATHKVASVEFTILTKVRTKFTNNDLLTHGRQFMSFLDSCPNTFGGLARLTLENLRLGESDFPKIFSICKQLEVLCLYHCDMGIESLLEVEHSQLSELVIGRSVLIKRVDLKWVPKLTVLKFNMFRSQDDPFCLGYVPLLQTVSIINTGFSWHKMLKISELLGETAISNLHLNFKSEKIWVKPEGRRQLLPVLHKLRLVNLINISEECDLTWIMFILQGAPTLKELRILVRDHLCEMVTGERRKKYAFSEEKDKGLEWEPSASDFKHHNLAELRIYGRFEAEEKIVRFARNIMEAAVNLEDIKLYKSPVCENCKHMLQEWTLKEKSLLSYKLSKGMLSSLVRIQFPSLGEIFTWPKYWS

SEQ ID NO: 14873 - DNA, 1200 bp, Triticum aestivum
  misc_feature (1)..(1200): Ceres Seq. ID no. 12617527
cttccccactatacttccaagcaaaggcgagaaccctagcctcacgagcaccgtgcagcggagatcccgaccatcaccgcgatgcaggccccgacgaacccccccgtcgacctcccgccgctggtggcgccgccgccgcgggtgaaggcgccgaccccgcgcccccctccgccggcctcgctccagcccgactccccgggcgtcttcttcaccaacgccgccgcagccgccccactgggctccgcccaccgccgcatcgccatcgccgtcgatctgtcagacgagtccgcctacgccgtaagctgggccgtcgccaactacctccggcccggggacgccgtcatcctcctgcacgtccgctccaccaatgtcctctacggcgccgattggggctccgtcacccccacatcccccgaggacgacgctgaggtcgccgcgcgcaagatggaggaggacttcgacgccctcaccgcttccaaggccgacgacctggccaagccactcgaggaggccaagatcccctacaagatccacatcgtcaaggatcacgacatgaaggagagactctgcctcgaggtggagaggctagggcttagcgccgtgatcatggggagcaaggggtttggtgcggcgcggcgggccagcaagggaaggctcgggagtatgagtgattactgcgtccaccactgtatttgccccgtggtggtggtgcgttcccctgatgatgctgtagcagagggcggggagtctgccactacgatggaggcggcggttggtgcagacgacgtgctgcaccctgtgccagaggaggatgctgagtaccatgacgccgctgaggagcacaaggatacttgattggatctatgcatcgatgtcctgttggatccagcatgtaaaggttctagcagtcgactgttggctgagtgctacctcgtggtttctgctgagcacattagctgttcgttagactttactgttcatgtcgatctgtgcttccactctgttgtatttggtgaacatttgttctctagaacttttgtgcttctttggatatcaaattatatgttgctgatgagacagtttgactacttagagaaccacatgattgcctgctatacttactcggttttgctaaaaaaaaaaaaaaaaaaaaaaaaaaaaagaaaaaaaaaaaaaaaaaagcttatcgataccgtcgac

SEQ ID NO: 14874 - protein, 257 aa, Triticum aestivum
  peptide (1)..(257): Ceres Seq. ID no. 12617528
  misc_feature (56)..(211): Pfam Name: Pfam Description:  Universal stress protein family
  misc_feature (1)..(257): NCBI GI NO: 33146953 NR Description: CHP-rich zinc finger protein-like
  misc_feature (1)..(255): NCBI GI NO: 28971968 NR Description: OSJNBb0041B22.10
  misc_feature (17)..(255): NCBI GI NO: 34910112 NR Description: B1100D10.31
  misc_feature (14)..(253): NCBI GI NO: 25402657 NR Description: protein T23J18.3 [imported] - Arabidopsis thaliana
  misc_feature (27)..(253): NCBI GI NO: 30682187 NR Description: expressed protein [Arabidopsis thaliana]
  misc_feature (6)..(250): NCBI GI NO: 7486798 NR Description: hypothetical protein M4I22
  misc_feature (6)..(250): NCBI GI NO: 18416966 NR Description: putative protein; protein id: At4g27320
  misc_feature (19)..(249): NCBI GI NO: 8885586 NR Description: gene_id:F24B18
  misc_feature (19)..(249): NCBI GI NO: 18423628 NR Description: putative protein; protein id: At5g54430
  misc_feature (127)..(220): NCBI GI NO: 34100044 NR Description: anti-bacterial protein [Solanum tuberosum]
MQAPTNPPVDLPPLVAPPPRVKAPTPRPPPPASLQPDSPGVFFTNAAAAAPLGSAHRRIAIAVDLSDESAYAVSWAVANYLRPGDAVILLHVRSTNVLYGADWGSVTPTSPEDDAEVAARKMEEDFDALTASKADDLAKPLEEAKIPYKIHIVKDHDMKERLCLEVERLGLSAVIMGSKGFGAARRASKGRLGSMSDYCVHHCICPVVVVRSPDDAVAEGGESATTMEAAVGADDVLHPVPEEDAEYHDAAEEHKDT

SEQ ID NO: 14875 - protein, 141 aa, Triticum aestivum
  peptide (1)..(141): Ceres Seq. ID no. 12617529
SPLYFQAKARTLASRAPCSGDPDHHRDAGPDEPPRRPPAAGGAAAAGEGADPAPPSAGLAPARLPGRLLHQRRRSRPTGLRPPPHRHRRRSVRRVRLRRKLGRRQLPPARGRRHPPARPLHQCPLRRRLGLRHPHIPRGRR

SEQ ID NO: 14876 - protein, 136 aa, Triticum aestivum
  peptide (1)..(136): Ceres Seq. ID no. 12617530
  misc_feature (1)..(90): Pfam Name: Pfam Description:  Universal stress protein family
  misc_feature (1)..(136): NCBI GI NO: 33146953 NR Description: CHP-rich zinc finger protein-like
  misc_feature (1)..(134): NCBI GI NO: 28971968 NR Description: OSJNBb0041B22.10
  misc_feature (1)..(134): NCBI GI NO: 34910112 NR Description: B1100D10.31
  misc_feature (1)..(132): NCBI GI NO: 25402657 NR Description: protein T23J18.3 [imported] - Arabidopsis thaliana
  misc_feature (1)..(132): NCBI GI NO: 30682187 NR Description: expressed protein [Arabidopsis thaliana]
  misc_feature (1)..(129): NCBI GI NO: 7486798 NR Description: hypothetical protein M4I22
  misc_feature (1)..(129): NCBI GI NO: 18416966 NR Description: putative protein; protein id: At4g27320
  misc_feature (1)..(128): NCBI GI NO: 8885586 NR Description: gene_id:F24B18
  misc_feature (1)..(128): NCBI GI NO: 18423628 NR Description: putative protein; protein id: At5g54430
  misc_feature (6)..(99): NCBI GI NO: 34100044 NR Description: anti-bacterial protein [Solanum tuberosum]
MEEDFDALTASKADDLAKPLEEAKIPYKIHIVKDHDMKERLCLEVERLGLSAVIMGSKGFGAARRASKGRLGSMSDYCVHHCICPVVVVRSPDDAVAEGGESATTMEAAVGADDVLHPVPEEDAEYHDAAEEHKDT

SEQ ID NO: 14877 - DNA, 1875 bp, Triticum aestivum
  misc_feature (1)..(1875): Ceres Seq. ID no. 14302263
aaaatccaaatctcatcgtcatccccccgcacccccaacccaacccctcccaccccacctccggcgaccggatcggcagggcgcgatggcgaacatcgacatggcggcggtgctggcggacatggaccgggacgcggcggcggacgcgcggacgccgcggaccaagctcgtgtgcacgctcggcccggcctcccgctccgtgcccatgctcgagaagctgctccgcgccgggatgaacgtcgcgcgcttcaacttctcccacggcacccacgagtaccacaaggagaccctcgacgccctccgccaggccatgcacaacaccggcatcctctgcgccgtcatgctcgacaccaagggacctgagattcgtactggatttttgaaggatggtaaaccaatcaaactgacaaagggtcaagaaatcactgtttccactgactacgatatcaagggcgacacgaacaccatctccatgagctacaagaaacttcctcaggatgtgaagcctgggcatgtcatactatgtgctgatggtaccatctccttgtctgttctgtcttgcgacccagcagctggaactgtcagatgtaggtgtgagaacactgcaatgcttggagagaggaagaattgtaatctgccaggaattgtcgtggaccttcctacgctgacggagaaggataaggaggacattttgggatggggtgtgcctaatgacattgacatgattgctttgtcatttgtccgcaaaggatcagatttggtgaccgtcaggcagcttcttggacagcatgcaaagcgcatcaagttaatgtcaaaggttgaaaaccaagagggcattgtaaactttgatgacattctgagggaaaccgatgcctttatggttgccagaggtgatcttggaatggagattccagttgagaagatattccttgcacagaaaatgatgatctacaagtgcaaccttgctggcaagcctgtggtcacagcgacccagatgcttgagtcaatgatcaagtccccgaggccaacccgtgccgaggctactgacgtcgcaaatgcggtgcttgatggaactgactgtgtcatgctcagtggtgaaagcgctgccggagcataccctgaggtggctgtgaagatcatggcgcgcatctgcgtggaggcggagtcttccctggacaacgacgccgtcttcaaggagatgatcaaggccgcgcccctcccgatgagcccgctggagtccctcgcgtcctcggccgtgcgaaccgccaacaaggccagggccactctgatcgtcgtcctgacccgtggcggcaccacggcgaagctggtggccaagtaccggcccagggtgccgatcctgtcggtggtcgtcccggtgctgacgaccgactcgttcgactggaccgtcagctccgagggccccgccaggcacagcctgatctacaggggcctgatcccgctcctcgccgagggctccgccaaggccaccgactcggagtcgacggaggagatcctccaggcggcgctcaagtcggccgtgaagaagcagctctgcaaggctggtgacgccgtcgtcgtcctgcaccgcatcggcgtcgcctccgtcatcaagatctgcaccgtcaagtgagcgccatcgccgggcgctcggcggcccttgctgccgtggcgaactctctgttcttgtggagacgaattgataatcgccgtaccgtccgttgcagtttgttgcatagatccgatccgagctggtaaattaggagggagaggactccgttaatatagagctcttttattattattaccgttggttgatatgatatgccccctgtagtatggtgtttggcaggtgtcatgcctgcacaaatttttctc

SEQ ID NO: 14878 - protein, 542 aa, Triticum aestivum
  peptide (1)..(542): Ceres Seq. ID no. 14302264
  misc_feature (411)..(542): Pfam Name: Pfam Description:  Pyruvate kinase, alpha/beta domain
  misc_feature (29)..(542): NCBI GI NO: 7271955 NR Description: cytosolic pyruvate kinase [Lilium longiflorum]
  misc_feature (29)..(542): NCBI GI NO: 125606 NR Description: Pyruvate kinase, cytosolic isozyme
  misc_feature (29)..(542): NCBI GI NO: 2497538 NR Description: Pyruvate kinase, cytosolic isozyme
  misc_feature (29)..(542): NCBI GI NO: 322787 NR Description: pyruvate kinase (EC 2.7.1.40), cytosolic - potato
  misc_feature (29)..(542): NCBI GI NO: 22296818 NR Description: pyruvate kinase [Glycine max]
  misc_feature (29)..(542): NCBI GI NO: 15242313 NR Description: pyruvate kinase, putative [Arabidopsis thaliana]
  misc_feature (29)..(542): NCBI GI NO: 22296820 NR Description: pyruvate kinase [Glycine max]
  misc_feature (29)..(542): NCBI GI NO: 15242863 NR Description: pyruvate kinase, putative [Arabidopsis thaliana]
  misc_feature (52)..(542): NCBI GI NO: 15241190 NR Description: pyruvate kinase, putative [Arabidopsis thaliana]
  misc_feature (27)..(455): NCBI GI NO: 13928580 NR Description: pyruvate kinase [Toxoplasma gondii]
KSKSHRHPPAPPTQPLPPHLRRPDRQGAMANIDMAAVLADMDRDAAADARTPRTKLVCTLGPASRSVPMLEKLLRAGMNVARFNFSHGTHEYHKETLDALRQAMHNTGILCAVMLDTKGPEIRTGFLKDGKPIKLTKGQEITVSTDYDIKGDTNTISMSYKKLPQDVKPGHVILCADGTISLSVLSCDPAAGTVRCRCENTAMLGERKNCNLPGIVVDLPTLTEKDKEDILGWGVPNDIDMIALSFVRKGSDLVTVRQLLGQHAKRIKLMSKVENQEGIVNFDDILRETDAFMVARGDLGMEIPVEKIFLAQKMMIYKCNLAGKPVVTATQMLESMIKSPRPTRAEATDVANAVLDGTDCVMLSGESAAGAYPEVAVKIMARICVEAESSLDNDAVFKEMIKAAPLPMSPLESLASSAVRTANKARATLIVVLTRGGTTAKLVAKYRPRVPILSVVVPVLTTDSFDWTVSSEGPARHSLIYRGLIPLLAEGSAKATDSESTEEILQAALKSAVKKQLCKAGDAVVVLHRIGVASVIKICTVK

SEQ ID NO: 14879 - protein, 514 aa, Triticum aestivum
  peptide (1)..(514): Ceres Seq. ID no. 14302265
  misc_feature (383)..(514): Pfam Name: Pfam Description:  Pyruvate kinase, alpha/beta domain
  misc_feature (1)..(514): NCBI GI NO: 7271955 NR Description: cytosolic pyruvate kinase [Lilium longiflorum]
  misc_feature (1)..(514): NCBI GI NO: 125606 NR Description: Pyruvate kinase, cytosolic isozyme
  misc_feature (1)..(514): NCBI GI NO: 2497538 NR Description: Pyruvate kinase, cytosolic isozyme
  misc_feature (1)..(514): NCBI GI NO: 322787 NR Description: pyruvate kinase (EC 2.7.1.40), cytosolic - potato
  misc_feature (1)..(514): NCBI GI NO: 22296818 NR Description: pyruvate kinase [Glycine max]
  misc_feature (1)..(514): NCBI GI NO: 15242313 NR Description: pyruvate kinase, putative [Arabidopsis thaliana]
  misc_feature (1)..(514): NCBI GI NO: 22296820 NR Description: pyruvate kinase [Glycine max]
  misc_feature (1)..(514): NCBI GI NO: 15242863 NR Description: pyruvate kinase, putative [Arabidopsis thaliana]
  misc_feature (24)..(514): NCBI GI NO: 15241190 NR Description: pyruvate kinase, putative [Arabidopsis thaliana]
  misc_feature (1)..(427): NCBI GI NO: 13928580 NR Description: pyruvate kinase [Toxoplasma gondii]
MANIDMAAVLADMDRDAAADARTPRTKLVCTLGPASRSVPMLEKLLRAGMNVARFNFSHGTHEYHKETLDALRQAMHNTGILCAVMLDTKGPEIRTGFLKDGKPIKLTKGQEITVSTDYDIKGDTNTISMSYKKLPQDVKPGHVILCADGTISLSVLSCDPAAGTVRCRCENTAMLGERKNCNLPGIVVDLPTLTEKDKEDILGWGVPNDIDMIALSFVRKGSDLVTVRQLLGQHAKRIKLMSKVENQEGIVNFDDILRETDAFMVARGDLGMEIPVEKIFLAQKMMIYKCNLAGKPVVTATQMLESMIKSPRPTRAEATDVANAVLDGTDCVMLSGESAAGAYPEVAVKIMARICVEAESSLDNDAVFKEMIKAAPLPMSPLESLASSAVRTANKARATLIVVLTRGGTTAKLVAKYRPRVPILSVVVPVLTTDSFDWTVSSEGPARHSLIYRGLIPLLAEGSAKATDSESTEEILQAALKSAVKKQLCKAGDAVVVLHRIGVASVIKICTVK

SEQ ID NO: 14880 - protein, 509 aa, Triticum aestivum
  peptide (1)..(509): Ceres Seq. ID no. 14302266
  misc_feature (378)..(509): Pfam Name: Pfam Description:  Pyruvate kinase, alpha/beta domain
  misc_feature (1)..(509): NCBI GI NO: 7271955 NR Description: cytosolic pyruvate kinase [Lilium longiflorum]
  misc_feature (1)..(509): NCBI GI NO: 125606 NR Description: Pyruvate kinase, cytosolic isozyme
  misc_feature (1)..(509): NCBI GI NO: 2497538 NR Description: Pyruvate kinase, cytosolic isozyme
  misc_feature (1)..(509): NCBI GI NO: 322787 NR Description: pyruvate kinase (EC 2.7.1.40), cytosolic - potato
  misc_feature (1)..(509): NCBI GI NO: 22296818 NR Description: pyruvate kinase [Glycine max]
  misc_feature (1)..(509): NCBI GI NO: 15242313 NR Description: pyruvate kinase, putative [Arabidopsis thaliana]
  misc_feature (1)..(509): NCBI GI NO: 22296820 NR Description: pyruvate kinase [Glycine max]
  misc_feature (1)..(509): NCBI GI NO: 15242863 NR Description: pyruvate kinase, putative [Arabidopsis thaliana]
  misc_feature (19)..(509): NCBI GI NO: 15241190 NR Description: pyruvate kinase, putative [Arabidopsis thaliana]
  misc_feature (1)..(422): NCBI GI NO: 13928580 NR Description: pyruvate kinase [Toxoplasma gondii]
MAAVLADMDRDAAADARTPRTKLVCTLGPASRSVPMLEKLLRAGMNVARFNFSHGTHEYHKETLDALRQAMHNTGILCAVMLDTKGPEIRTGFLKDGKPIKLTKGQEITVSTDYDIKGDTNTISMSYKKLPQDVKPGHVILCADGTISLSVLSCDPAAGTVRCRCENTAMLGERKNCNLPGIVVDLPTLTEKDKEDILGWGVPNDIDMIALSFVRKGSDLVTVRQLLGQHAKRIKLMSKVENQEGIVNFDDILRETDAFMVARGDLGMEIPVEKIFLAQKMMIYKCNLAGKPVVTATQMLESMIKSPRPTRAEATDVANAVLDGTDCVMLSGESAAGAYPEVAVKIMARICVEAESSLDNDAVFKEMIKAAPLPMSPLESLASSAVRTANKARATLIVVLTRGGTTAKLVAKYRPRVPILSVVVPVLTTDSFDWTVSSEGPARHSLIYRGLIPLLAEGSAKATDSESTEEILQAALKSAVKKQLCKAGDAVVVLHRIGVASVIKICTVK

SEQ ID NO: 14881 - DNA, 959 bp, Triticum aestivum
  misc_feature (1)..(959): Ceres Seq. ID no. 13597898
gcactactacagtccaagccgcaccgctctctcgctagccacctccctctcgtccgccaccgcattaactcttcgcccaccgcttcccaacaaacccgccgcccgcccttgaccgcggcagccatggcgctcgcagcggcacaacgccagcggtcggcgtcggccgtgctggtcgcggcggtgctgctatcgctttcactctcactctcatgcgtgcaggcgcaggcgccgcacgtggcggtgccaccttcggctcccccgaaggcggcggcggcgcctgggccggccgcggggttgagcgcggcgtgcctcaactcgctgctcaacatgtcggactgcctgccgtacgtgcaggccgggagcaaggcgcgggcgccggacaagccgtgctgcccggagctggccggcatggtgggctccaaccccgtctgcctctgcgagctcctctccggggccgccgactccctcggcatcgccgtcgactacgcccgcgcgctcgcgctccccggcgtctgccgcgtcgccaccccgcccatcaccacctgcgcagcaatgggatacaacgttcgtctgggcccgtctccggcgcccgcgccgggatctccctcgcccatgtcgcccggcggcagcccacagtaccccgctggtccttcgccgttcgcctcgccgccggagtcgcccaagcccagccacgcggcgcgccgcttccacgccgccggcgccctygtcgccctcgccgcctccttygccgtcgggatggccttcttytaagcggacaaggccagcgagactgttaaccgttcgataaaaatctgtcgcgtgaatgtcatggacatgctttctccgtctctagtctgtgcgctagtactccagtatgatgattctaggtagataagataatacagtaccagttatttcccgccaatatgttatgtgctatgctaatcaattgatctgtc

SEQ ID NO: 14882 - protein, 256 aa, Triticum aestivum
  peptide (1)..(256): Ceres Seq. ID no. 15222229
  misc_feature (103)..(182): Pfam Name: Pfam Description:  Protease inhibitor/seed storage/LTP family
  misc_feature (60)..(253): NCBI GI NO: 34909226 NR Description: P0432B10.23
  misc_feature (53)..(227): NCBI GI NO: 15229756 NR Description: protease inhibitor/seed storage/lipid transfer
  misc_feature (53)..(227): NCBI GI NO: 21617892 NR Description: lipid-transfer protein-like protein
  misc_feature (67)..(255): NCBI GI NO: 25553588 NR Description: OJ1656_E11.14
  misc_feature (52)..(221): NCBI GI NO: 28269449 NR Description: putative protease inhibitor
  misc_feature (60)..(210): NCBI GI NO: 18401329 NR Description: protease inhibitor/seed storage/lipid transfer
  misc_feature (96)..(245): NCBI GI NO: 25553596 NR Description: OJ1656_E11.27
  misc_feature (90)..(233): NCBI GI NO: 15225509 NR Description: protease inhibitor/seed storage/lipid transfer
  misc_feature (90)..(233): NCBI GI NO: 27765012 NR Description: At2g13820 [Arabidopsis thaliana]
  misc_feature (60)..(210): NCBI GI NO: 21618293 NR Description: unknown [Arabidopsis thaliana]
  misc_feature (242)..(242): Xaa is any aa, unknown or other
  misc_feature (249)..(249): Xaa is any aa, unknown or other
  misc_feature (256)..(256): Xaa is any aa, unknown or other
ALLQSKPHRSLASHLPLVRHRINSSPTASQQTRRPPLTAAAMALAAAQRQRSASAVLVAAVLLSLSLSLSCVQAQAPHVAVPPSAPPKAAAAPGPAAGLSAACLNSLLNMSDCLPYVQAGSKARAPDKPCCPELAGMVGSNPVCLCELLSGAADSLGIAVDYARALALPGVCRVATPPITTCAAMGYNVRLGPSPAPAPGSPSPMSPGGSPQYPAGPSPFASPPESPKPSHAARRFHAAGAXVALAASXAVGMAFX

SEQ ID NO: 14883 - protein, 215 aa, Triticum aestivum
  peptide (1)..(215): Ceres Seq. ID no. 15222230
  misc_feature (62)..(141): Pfam Name: Pfam Description:  Protease inhibitor/seed storage/LTP family
  misc_feature (19)..(212): NCBI GI NO: 34909226 NR Description: P0432B10.23
  misc_feature (12)..(186): NCBI GI NO: 15229756 NR Description: protease inhibitor/seed storage/lipid transfer
  misc_feature (12)..(186): NCBI GI NO: 21617892 NR Description: lipid-transfer protein-like protein
  misc_feature (26)..(214): NCBI GI NO: 25553588 NR Description: OJ1656_E11.14
  misc_feature (11)..(180): NCBI GI NO: 28269449 NR Description: putative protease inhibitor
  misc_feature (19)..(169): NCBI GI NO: 18401329 NR Description: protease inhibitor/seed storage/lipid transfer
  misc_feature (55)..(204): NCBI GI NO: 25553596 NR Description: OJ1656_E11.27
  misc_feature (49)..(192): NCBI GI NO: 15225509 NR Description: protease inhibitor/seed storage/lipid transfer
  misc_feature (49)..(192): NCBI GI NO: 27765012 NR Description: At2g13820 [Arabidopsis thaliana]
  misc_feature (19)..(169): NCBI GI NO: 21618293 NR Description: unknown [Arabidopsis thaliana]
  misc_feature (201)..(201): Xaa is any aa, unknown or other
  misc_feature (208)..(208): Xaa is any aa, unknown or other
  misc_feature (215)..(215): Xaa is any aa, unknown or other
MALAAAQRQRSASAVLVAAVLLSLSLSLSCVQAQAPHVAVPPSAPPKAAAAPGPAAGLSAACLNSLLNMSDCLPYVQAGSKARAPDKPCCPELAGMVGSNPVCLCELLSGAADSLGIAVDYARALALPGVCRVATPPITTCAAMGYNVRLGPSPAPAPGSPSPMSPGGSPQYPAGPSPFASPPESPKPSHAARRFHAAGAXVALAASXAVGMAFX

SEQ ID NO: 14884 - protein, 195 aa, Triticum aestivum
  peptide (1)..(195): Ceres Seq. ID no. 15222231
  misc_feature (173)..(173): Xaa is any aa, unknown or other
  misc_feature (180)..(180): Xaa is any aa, unknown or other
  misc_feature (187)..(187): Xaa is any aa, unknown or other
MRAGAGAARGGATFGSPEGGGGAWAGRGVERGVPQLAAQHVGLPAVRAGREQGAGAGQAVLPGAGRHGGLQPRLPLRAPLRGRRLPRHRRRLRPRARAPRRLPRRHPAHHHLRSNGIQRSSGPVSGARAGISLAHVARRQPTVPRWSFAVRLAAGVAQAQPRGAPLPRRRRPXRPRRLLXRRDGLLXSGQGQRDC

SEQ ID NO: 14885 - DNA, 1342 bp, Triticum aestivum
  misc_feature (1)..(1342): Ceres Seq. ID no. 13656196
atcccggtccggggcgcacatccatctcccatgcccgcacctccacctgagctggactccctggtatagcgagcgcgccgaccaactccatagctggggcttctccaatcaatccagccggccagagcgcagctcccgcccacccttccccggtccccgtctcttccgcaaaggagcagccgcgccattgccgtgggaggaagcaatgggggcgacacgcgcggacgccgacgagaaggaggaaggcgtgatggcgacggacttcttttggtcgtacacggacgaaccgcacgcgtcccgccgccgggagatcctggccaagtacccgcagatcaaggagctcttcggctcggatcctctcgccttcatcaagatagccgcagttgtttcgcttcagctatggaccgccacgctcctgcgagatgcaggctggtcgaagatactgccggtcgcttacttcttcggttcctttctgaatcacaatctcttccttgcgatccacgagctcagccacaacctcgccttcgccaccccatccctgaaccgctggctaggcatcttcgcaaacctgcccatcggcgtcccaatgtcggtgacattccagaaataccacctggagcaccaccggttccaaggcgtggacgggatcgacatggacatccccagccagacagaggcgcacgtcgtaaagaacaccgtcagcaaatccatctgggtcgtgctccagctcttcttctacgcgctcaggccgctcttcctgaagccgaagcccccgggcctgtgggagttcaccaacctgacgatccaggtcgcgctcgacgcggcaatggtgtacctctacggctggaagtcgctggcctacctcatcctgtctacgttcctcggtggcggcatgcacccgatggccggccacttcatctcggagcactacgtcttcagcccggagcaggagacctactcgtactacgggccgctgaacctgatgacgtggcacgtcgggtaccacaacgagcaccacgacttccccaggatccccggcgccaagctgcacaaggtgaaggagatcgcgccggagtactatgacagtctgaaatcatacaggtcctggagccaggtgatatacatgtacgtcatggaccagacggtaggccctttcagccggatgaagcggaaggcgcccaagaaagatttgtagaagaaacctctgcctgtaggttaagttttgccacacatagctgttttagatgatgttttgatcccctgggccactgtctcactgaactactgaagtgttaactcgaaggtattttgcttgtgtgttcagggaacttgcacttgttcc

SEQ ID NO: 14886 - protein, 397 aa, Triticum aestivum
  peptide (1)..(397): Ceres Seq. ID no. 13656197
  misc_feature (151)..(360): Pfam Name: Pfam Description:  Fatty acid desaturase
  misc_feature (78)..(395): NCBI GI NO: 20147520 NR Description: putative sphingolipid delta 4 desaturase DES-1
  misc_feature (70)..(396): NCBI GI NO: 15234510 NR Description: fatty acid desaturase family protein
  misc_feature (83)..(391): NCBI GI NO: 17136246 NR Description: infertile crescent CG9078-PA
  misc_feature (83)..(392): NCBI GI NO: 31240007 NR Description: ENSANGP00000016966 [Anopheles gambiae]
  misc_feature (83)..(394): NCBI GI NO: 34304727 NR Description: fatty acid desaturase [Microtus fortis]
  misc_feature (83)..(390): NCBI GI NO: 4505193 NR Description: sphingolipid delta 4 desaturase
  misc_feature (83)..(394): NCBI GI NO: 16758022 NR Description: degenerative spermatocyte homolog
  misc_feature (83)..(394): NCBI GI NO: 6681175 NR Description: degenerative spermatocyte homolog [Mus musculus]
  misc_feature (83)..(394): NCBI GI NO: 20147516 NR Description: sphingolipid delta 4 desaturase protein DES1
  misc_feature (60)..(397): NCBI GI NO: 19113199 NR Description: putative fatty acid desaturase
SRSGAHIHLPCPHLHLSWTPWYSERADQLHSWGFSNQSSRPERSSRPPFPGPRLFRKGAAAPLPWEEAMGATRADADEKEEGVMATDFFWSYTDEPHASRRREILAKYPQIKELFGSDPLAFIKIAAVVSLQLWTATLLRDAGWSKILPVAYFFGSFLNHNLFLAIHELSHNLAFATPSLNRWLGIFANLPIGVPMSVTFQKYHLEHHRFQGVDGIDMDIPSQTEAHVVKNTVSKSIWVVLQLFFYALRPLFLKPKPPGLWEFTNLTIQVALDAAMVYLYGWKSLAYLILSTFLGGGMHPMAGHFISEHYVFSPEQETYSYYGPLNLMTWHVGYHNEHHDFPRIPGAKLHKVKEIAPEYYDSLKSYRSWSQVIYMYVMDQTVGPFSRMKRKAPKKDL

SEQ ID NO: 14887 - protein, 329 aa, Triticum aestivum
  peptide (1)..(329): Ceres Seq. ID no. 13656198
  misc_feature (83)..(292): Pfam Name: Pfam Description:  Fatty acid desaturase
  misc_feature (10)..(327): NCBI GI NO: 20147520 NR Description: putative sphingolipid delta 4 desaturase DES-1
  misc_feature (2)..(328): NCBI GI NO: 15234510 NR Description: fatty acid desaturase family protein
  misc_feature (15)..(323): NCBI GI NO: 17136246 NR Description: infertile crescent CG9078-PA
  misc_feature (15)..(324): NCBI GI NO: 31240007 NR Description: ENSANGP00000016966 [Anopheles gambiae]
  misc_feature (15)..(326): NCBI GI NO: 34304727 NR Description: fatty acid desaturase [Microtus fortis]
  misc_feature (15)..(322): NCBI GI NO: 4505193 NR Description: sphingolipid delta 4 desaturase
  misc_feature (15)..(326): NCBI GI NO: 16758022 NR Description: degenerative spermatocyte homolog
  misc_feature (15)..(326): NCBI GI NO: 6681175 NR Description: degenerative spermatocyte homolog [Mus musculus]
  misc_feature (15)..(326): NCBI GI NO: 20147516 NR Description: sphingolipid delta 4 desaturase protein DES1
  misc_feature (1)..(329): NCBI GI NO: 19113199 NR Description: putative fatty acid desaturase
MGATRADADEKEEGVMATDFFWSYTDEPHASRRREILAKYPQIKELFGSDPLAFIKIAAVVSLQLWTATLLRDAGWSKILPVAYFFGSFLNHNLFLAIHELSHNLAFATPSLNRWLGIFANLPIGVPMSVTFQKYHLEHHRFQGVDGIDMDIPSQTEAHVVKNTVSKSIWVVLQLFFYALRPLFLKPKPPGLWEFTNLTIQVALDAAMVYLYGWKSLAYLILSTFLGGGMHPMAGHFISEHYVFSPEQETYSYYGPLNLMTWHVGYHNEHHDFPRIPGAKLHKVKEIAPEYYDSLKSYRSWSQVIYMYVMDQTVGPFSRMKRKAPKKDL

SEQ ID NO: 14888 - protein, 314 aa, Triticum aestivum
  peptide (1)..(314): Ceres Seq. ID no. 13656199
  misc_feature (68)..(277): Pfam Name: Pfam Description:  Fatty acid desaturase
  misc_feature (1)..(312): NCBI GI NO: 20147520 NR Description: putative sphingolipid delta 4 desaturase DES-1
  misc_feature (1)..(313): NCBI GI NO: 15234510 NR Description: fatty acid desaturase family protein
  misc_feature (1)..(308): NCBI GI NO: 17136246 NR Description: infertile crescent CG9078-PA
  misc_feature (1)..(309): NCBI GI NO: 31240007 NR Description: ENSANGP00000016966 [Anopheles gambiae]
  misc_feature (1)..(311): NCBI GI NO: 34304727 NR Description: fatty acid desaturase [Microtus fortis]
  misc_feature (1)..(307): NCBI GI NO: 4505193 NR Description: sphingolipid delta 4 desaturase
  misc_feature (1)..(311): NCBI GI NO: 16758022 NR Description: degenerative spermatocyte homolog
  misc_feature (1)..(311): NCBI GI NO: 6681175 NR Description: degenerative spermatocyte homolog [Mus musculus]
  misc_feature (1)..(311): NCBI GI NO: 20147516 NR Description: sphingolipid delta 4 desaturase protein DES1
  misc_feature (1)..(314): NCBI GI NO: 19113199 NR Description: putative fatty acid desaturase
MATDFFWSYTDEPHASRRREILAKYPQIKELFGSDPLAFIKIAAVVSLQLWTATLLRDAGWSKILPVAYFFGSFLNHNLFLAIHELSHNLAFATPSLNRWLGIFANLPIGVPMSVTFQKYHLEHHRFQGVDGIDMDIPSQTEAHVVKNTVSKSIWVVLQLFFYALRPLFLKPKPPGLWEFTNLTIQVALDAAMVYLYGWKSLAYLILSTFLGGGMHPMAGHFISEHYVFSPEQETYSYYGPLNLMTWHVGYHNEHHDFPRIPGAKLHKVKEIAPEYYDSLKSYRSWSQVIYMYVMDQTVGPFSRMKRKAPKKDL

SEQ ID NO: 14889 - DNA, 1099 bp, Triticum aestivum
  misc_feature (1)..(1099): Ceres Seq. ID no. 13597506
actagtagcagctatagctagcctacgagccacacacatcacatcaaagcgcatccagcaggcaatggcgtcctcctcctcgtctccgctgctcatgttgctgctgctgccgctcctgcgcgccatggcgcgcccgtgctccgccgtcgacgccatcggcacctactgcgccaagaacggcaccagcgcggagacgcaggccagcatcgaccaggtcctcgcggcgctcgtcccgcgcgcctcggccgcctactacgccacggccaccgccggccgctcctcgtccgcggtctggggcctcgcgcagtgccgcggcgacgtgccgcgccaggactgctcgctctgcctcgccgccgcggccaaggaggtcgcgtcgtcctgccgcggcagctccgacggccgggtcttctacgactactgcctgctccggtactccacctccaacttcgtcggcctcgcggacacgggctacacgctcatcctcctcaacacccagaacgccaccggcgtcgacctggccgcgttcgaccgggcgcaggggaaactcatgtcccgcgtcgcctccgaggccggcgacgccgccaacaaggggcttgcgacggacacgacgaggctcggcagcgagggcggcggagccaagacgaccatctacgggctcggctggtgcaccagggacatcacggcggcggactgcgggctttgcgtggcgcaggcggtggcggagctgcccaactactgccggtaccggcgtgggtgccgcgtcatctacagcagctgcatggcgcgctacgaggtgtaccccttcttcttccccctcgacggcgccgacgagtcggccgacgagctcggacagtgcgacaagatcgtcttgaactacccgtgatgggtggagtacagctacgtagtcaactacggtgctagtatctactgtacgtagcactctagctcgttgtgcgtacctggtggtggcgaatccatttgtagtgtatggctagctcgtagctagcctagaatccaagcagggtcaaaataattttcgttaagtgcaaaataataagcgaaaaactagccttgtgttcctcgcacatgtttgcttgcg

SEQ ID NO: 14890 - protein, 293 aa, Triticum aestivum
  peptide (1)..(293): Ceres Seq. ID no. 15222116
  misc_feature (97)..(151): Pfam Name: Pfam Description:  Domain of unknown function DUF26
  misc_feature (38)..(291): NCBI GI NO: 15239000 NR Description: 33 kDa secretory protein-related
  misc_feature (22)..(291): NCBI GI NO: 3643271 NR Description: 33 kDa secretory protein [Oryza sativa]
  misc_feature (22)..(291): NCBI GI NO: 23450951 NR Description: 33-kDa secretory protein [Oryza sativa]
  misc_feature (22)..(291): NCBI GI NO: 38636830 NR Description: putative 33 kDa secretory protein
  misc_feature (31)..(291): NCBI GI NO: 38636827 NR Description: putative 33-kDa secretory protein
  misc_feature (38)..(269): NCBI GI NO: 34898846 NR Description: OJ1058_A12.21
  misc_feature (38)..(269): NCBI GI NO: 34393282 NR Description: putative serine/threonine kinase receptor precursor
  misc_feature (35)..(269): NCBI GI NO: 34898854 NR Description: OJ1058_A12.25
  misc_feature (46)..(268): NCBI GI NO: 18403247 NR Description: receptor protein kinase-related
  misc_feature (33)..(269): NCBI GI NO: 34898856 NR Description: OJ1058_A12.26
LVAAIASLRATHITSKRIQQAMASSSSSPLLMLLLLPLLRAMARPCSAVDAIGTYCAKNGTSAETQASIDQVLAALVPRASAAYYATATAGRSSSAVWGLAQCRGDVPRQDCSLCLAAAAKEVASSCRGSSDGRVFYDYCLLRYSTSNFVGLADTGYTLILLNTQNATGVDLAAFDRAQGKLMSRVASEAGDAANKGLATDTTRLGSEGGGAKTTIYGLGWCTRDITAADCGLCVAQAVAELPNYCRYRRGCRVIYSSCMARYEVYPFFFPLDGADESADELGQCDKIVLNYP

SEQ ID NO: 14891 - protein, 272 aa, Triticum aestivum
  peptide (1)..(272): Ceres Seq. ID no. 15222117
  misc_feature (76)..(130): Pfam Name: Pfam Description:  Domain of unknown function DUF26
  misc_feature (17)..(270): NCBI GI NO: 15239000 NR Description: 33 kDa secretory protein-related
  misc_feature (1)..(270): NCBI GI NO: 3643271 NR Description: 33 kDa secretory protein [Oryza sativa]
  misc_feature (1)..(270): NCBI GI NO: 23450951 NR Description: 33-kDa secretory protein [Oryza sativa]
  misc_feature (1)..(270): NCBI GI NO: 38636830 NR Description: putative 33 kDa secretory protein
  misc_feature (10)..(270): NCBI GI NO: 38636827 NR Description: putative 33-kDa secretory protein
  misc_feature (17)..(248): NCBI GI NO: 34898846 NR Description: OJ1058_A12.21
  misc_feature (17)..(248): NCBI GI NO: 34393282 NR Description: putative serine/threonine kinase receptor precursor
  misc_feature (14)..(248): NCBI GI NO: 34898854 NR Description: OJ1058_A12.25
  misc_feature (25)..(247): NCBI GI NO: 18403247 NR Description: receptor protein kinase-related
  misc_feature (12)..(248): NCBI GI NO: 34898856 NR Description: OJ1058_A12.26
MASSSSSPLLMLLLLPLLRAMARPCSAVDAIGTYCAKNGTSAETQASIDQVLAALVPRASAAYYATATAGRSSSAVWGLAQCRGDVPRQDCSLCLAAAAKEVASSCRGSSDGRVFYDYCLLRYSTSNFVGLADTGYTLILLNTQNATGVDLAAFDRAQGKLMSRVASEAGDAANKGLATDTTRLGSEGGGAKTTIYGLGWCTRDITAADCGLCVAQAVAELPNYCRYRRGCRVIYSSCMARYEVYPFFFPLDGADESADELGQCDKIVLNYP

SEQ ID NO: 14892 - protein, 262 aa, Triticum aestivum
  peptide (1)..(262): Ceres Seq. ID no. 15222118
  misc_feature (66)..(120): Pfam Name: Pfam Description:  Domain of unknown function DUF26
  misc_feature (7)..(260): NCBI GI NO: 15239000 NR Description: 33 kDa secretory protein-related
  misc_feature (1)..(260): NCBI GI NO: 3643271 NR Description: 33 kDa secretory protein [Oryza sativa]
  misc_feature (1)..(260): NCBI GI NO: 23450951 NR Description: 33-kDa secretory protein [Oryza sativa]
  misc_feature (1)..(260): NCBI GI NO: 38636830 NR Description: putative 33 kDa secretory protein
  misc_feature (1)..(260): NCBI GI NO: 38636827 NR Description: putative 33-kDa secretory protein
  misc_feature (7)..(238): NCBI GI NO: 34898846 NR Description: OJ1058_A12.21
  misc_feature (7)..(238): NCBI GI NO: 34393282 NR Description: putative serine/threonine kinase receptor precursor
  misc_feature (4)..(238): NCBI GI NO: 34898854 NR Description: OJ1058_A12.25
  misc_feature (15)..(237): NCBI GI NO: 18403247 NR Description: receptor protein kinase-related
  misc_feature (2)..(238): NCBI GI NO: 34898856 NR Description: OJ1058_A12.26
MLLLLPLLRAMARPCSAVDAIGTYCAKNGTSAETQASIDQVLAALVPRASAAYYATATAGRSSSAVWGLAQCRGDVPRQDCSLCLAAAAKEVASSCRGSSDGRVFYDYCLLRYSTSNFVGLADTGYTLILLNTQNATGVDLAAFDRAQGKLMSRVASEAGDAANKGLATDTTRLGSEGGGAKTTIYGLGWCTRDITAADCGLCVAQAVAELPNYCRYRRGCRVIYSSCMARYEVYPFFFPLDGADESADELGQCDKIVLNYP

SEQ ID NO: 14893 - DNA, 1682 bp, Triticum aestivum
  misc_feature (1)..(1682): Ceres Seq. ID no. 12625948
ccatcaagacaggcagacagttccgtgggcaccagaaccacaccccttcccgttcagacgcggcggaagatcgaatcggccgcgcacggcgatggcgacgactccaccgccgccgccgcttcctctcctcctccttcccctcctcctgctcgcggccttctccgccgccgaggagtttccgcgcgacgggaaggtgatagacctggacgacagcaacttcgaggcggccctcagctccatcgatttcctcttcgtcgacttctacgcgccatggtgcggccactgcaagcgcctcgcccccgagttagatgaagctgcaccggtgttggtgggattgagtgagcccatcatggttgccaaagtaaatgccgacaagtacaggaagcttggatcaaaatatggagtggatgggttccctactctaatgctctttatacatggggtccctattgaatacactggttcaaggaaagctgacttgcttgtccgcaatcttaagaagtttgttgcgcctgatgtttctactcttgagtcggattctgcaatcaagagctttgttgagaatgccggcacaagctttccgatgttcatcggttttggggtcaacgagtcattgattgctgaatatggaggaaaatacaagaaaagagcatggtttgccgtcgcaaaagatttttctgaggactggatggcgacatatgattttaataagatcccagcattggttgcagttcatccaaagtataatgaacaaagtgtgttctatggcccatttgaaggacgtttcttggaggattttgtaaggcaatcgctgctgcctttgactgtccccatcaacaccgagacactgaaattgctggatgatgatgacagaaaagttgtcctcgcaattttggaggatgactcggatgtaaattctacccagctggtaaaaattttgaggtctgctgctcatgcgaaccgtgatttggtgtttggatatgttggagtcaaacaatgggaggagtttgtggagacttttgatgtttccaagagctcacaattgccaaagctgctagtgtgggacagaaatgaagagtatgaactagtggagggttcagagaagttagaagaaggcgaccaagcatcccaattaagccaattccttgagggatatagagcagggagaacaataaagaagaaagtcagtggcccttccttcatgggtttcatgcactctcttgtcagcatgaactcattatacattctcatgtttgttgttgctcttctcggtgtcatgatgtactttactggccaagatgatactcagccaagacgggttcatgacgagtgatagcttcttgcatgaaaagaaggttatcaaccaggagttctagctcggaggtcgtattgccacctttgaactgttgttagccctgaagaggtcaggttttagcggttgcttgtgatattcgccgtttctctgtcagcaatcatcaggtcctgcattttctctgcccccgtttctgtttgttggttagagcttagcaactagcccccatgtaaagctagaaacacttcctaattttgccacttgtgtggagtttttatttattttattgcgagggttatatggtgtatcatactctgccaaacttttgtacaactgaactgatacaagtattaataatgtgtgaattgtg

SEQ ID NO: 14894 - protein, 443 aa, Triticum aestivum
  peptide (1)..(443): Ceres Seq. ID no. 12625949
  misc_feature (42)..(322): Pfam Name: Pfam Description:  Calsequestrin
  misc_feature (32)..(439): NCBI GI NO: 38344940 NR Description: OSJNBa0084A10.16
  misc_feature (45)..(432): NCBI GI NO: 8778373 NR Description: F15O4.20 [Arabidopsis thaliana]
  misc_feature (45)..(432): NCBI GI NO: 18399786 NR Description: protein disulfide isomerase, putative
  misc_feature (43)..(384): NCBI GI NO: 27819775 NR Description: RH09122p [Drosophila melanogaster]
  misc_feature (44)..(290): NCBI GI NO: 20805285 NR Description: protein disulfide isomerase-like PDI-H
  misc_feature (43)..(384): NCBI GI NO: 129731 NR Description: PROTEIN DISULFIDE ISOMERASE PRECURSOR
  misc_feature (44)..(384): NCBI GI NO: 27806501 NR Description: procollagen-proline, 2-oxoglutarate 4-dioxygenase
  misc_feature (42)..(394): NCBI GI NO: 14494995 NR Description: putative protein disulfide isomerase
  misc_feature (43)..(384): NCBI GI NO: 20913929 NR Description: prolyl 4-hydroxylase, beta polypeptide
  misc_feature (43)..(295): NCBI GI NO: 20805287 NR Description: protein disulfide isomerase-like PDI-M
HQDRQTVPWAPEPHPFPFRRGGRSNRPRTAMATTPPPPPLPLLLLPLLLLAAFSAAEEFPRDGKVIDLDDSNFEAALSSIDFLFVDFYAPWCGHCKRLAPELDEAAPVLVGLSEPIMVAKVNADKYRKLGSKYGVDGFPTLMLFIHGVPIEYTGSRKADLLVRNLKKFVAPDVSTLESDSAIKSFVENAGTSFPMFIGFGVNESLIAEYGGKYKKRAWFAVAKDFSEDWMATYDFNKIPALVAVHPKYNEQSVFYGPFEGRFLEDFVRQSLLPLTVPINTETLKLLDDDDRKVVLAILEDDSDVNSTQLVKILRSAAHANRDLVFGYVGVKQWEEFVETFDVSKSSQLPKLLVWDRNEEYELVEGSEKLEEGDQASQLSQFLEGYRAGRTIKKKVSGPSFMGFMHSLVSMNSLYILMFVVALLGVMMYFTGQDDTQPRRVHDE

SEQ ID NO: 14895 - protein, 413 aa, Triticum aestivum
  peptide (1)..(413): Ceres Seq. ID no. 12625950
  misc_feature (12)..(292): Pfam Name: Pfam Description:  Calsequestrin
  misc_feature (2)..(409): NCBI GI NO: 38344940 NR Description: OSJNBa0084A10.16
  misc_feature (15)..(402): NCBI GI NO: 8778373 NR Description: F15O4.20 [Arabidopsis thaliana]
  misc_feature (15)..(402): NCBI GI NO: 18399786 NR Description: protein disulfide isomerase, putative
  misc_feature (13)..(354): NCBI GI NO: 27819775 NR Description: RH09122p [Drosophila melanogaster]
  misc_feature (14)..(260): NCBI GI NO: 20805285 NR Description: protein disulfide isomerase-like PDI-H
  misc_feature (13)..(354): NCBI GI NO: 129731 NR Description: PROTEIN DISULFIDE ISOMERASE PRECURSOR
  misc_feature (14)..(354): NCBI GI NO: 27806501 NR Description: procollagen-proline, 2-oxoglutarate 4-dioxygenase
  misc_feature (12)..(364): NCBI GI NO: 14494995 NR Description: putative protein disulfide isomerase
  misc_feature (13)..(354): NCBI GI NO: 20913929 NR Description: prolyl 4-hydroxylase, beta polypeptide
  misc_feature (13)..(265): NCBI GI NO: 20805287 NR Description: protein disulfide isomerase-like PDI-M
MATTPPPPPLPLLLLPLLLLAAFSAAEEFPRDGKVIDLDDSNFEAALSSIDFLFVDFYAPWCGHCKRLAPELDEAAPVLVGLSEPIMVAKVNADKYRKLGSKYGVDGFPTLMLFIHGVPIEYTGSRKADLLVRNLKKFVAPDVSTLESDSAIKSFVENAGTSFPMFIGFGVNESLIAEYGGKYKKRAWFAVAKDFSEDWMATYDFNKIPALVAVHPKYNEQSVFYGPFEGRFLEDFVRQSLLPLTVPINTETLKLLDDDDRKVVLAILEDDSDVNSTQLVKILRSAAHANRDLVFGYVGVKQWEEFVETFDVSKSSQLPKLLVWDRNEEYELVEGSEKLEEGDQASQLSQFLEGYRAGRTIKKKVSGPSFMGFMHSLVSMNSLYILMFVVALLGVMMYFTGQDDTQPRRVHDE

SEQ ID NO: 14896 - protein, 327 aa, Triticum aestivum
  peptide (1)..(327): Ceres Seq. ID no. 12625951
  misc_feature (1)..(206): Pfam Name: Pfam Description:  Calsequestrin
  misc_feature (1)..(323): NCBI GI NO: 38344940 NR Description: OSJNBa0084A10.16
  misc_feature (1)..(316): NCBI GI NO: 8778373 NR Description: F15O4.20 [Arabidopsis thaliana]
  misc_feature (1)..(316): NCBI GI NO: 18399786 NR Description: protein disulfide isomerase, putative
  misc_feature (1)..(268): NCBI GI NO: 27819775 NR Description: RH09122p [Drosophila melanogaster]
  misc_feature (1)..(174): NCBI GI NO: 20805285 NR Description: protein disulfide isomerase-like PDI-H
  misc_feature (1)..(268): NCBI GI NO: 129731 NR Description: PROTEIN DISULFIDE ISOMERASE PRECURSOR
  misc_feature (1)..(268): NCBI GI NO: 27806501 NR Description: procollagen-proline, 2-oxoglutarate 4-dioxygenase
  misc_feature (1)..(278): NCBI GI NO: 14494995 NR Description: putative protein disulfide isomerase
  misc_feature (1)..(268): NCBI GI NO: 20913929 NR Description: prolyl 4-hydroxylase, beta polypeptide
  misc_feature (1)..(179): NCBI GI NO: 20805287 NR Description: protein disulfide isomerase-like PDI-M
MVAKVNADKYRKLGSKYGVDGFPTLMLFIHGVPIEYTGSRKADLLVRNLKKFVAPDVSTLESDSAIKSFVENAGTSFPMFIGFGVNESLIAEYGGKYKKRAWFAVAKDFSEDWMATYDFNKIPALVAVHPKYNEQSVFYGPFEGRFLEDFVRQSLLPLTVPINTETLKLLDDDDRKVVLAILEDDSDVNSTQLVKILRSAAHANRDLVFGYVGVKQWEEFVETFDVSKSSQLPKLLVWDRNEEYELVEGSEKLEEGDQASQLSQFLEGYRAGRTIKKKVSGPSFMGFMHSLVSMNSLYILMFVVALLGVMMYFTGQDDTQPRRVHDE

SEQ ID NO: 14897 - DNA, 509 bp, Triticum aestivum
  misc_feature (1)..(509): Ceres Seq. ID no. 13656047
aggaaaatagacattccaacgcagttcccccacccccacctcgcctgagcaggtcgccggcgaccgacaggccttcagctcgcccccaacctccccacccctcccgcgacgacccggggggaggcgccgagcgagcaggggggatggagttcacggaggcgtacaagcagacgggcccgtgctgcttctctcccgacgcccgcttcctcgccgtcgcctgcgactaccgcctcgtggtccgcgacgtcgtcaccctcaaggtggtgcagttgttttcatgtgtagacaagataaactttttggagtgggcaccagattcagaatacattctatgtggactttacaagcggccaatggtgcaggcttggtcgctgagccagcctgactggacctgtaagattgatgaaggatctgcagggattgcttatgctcgctggagtcctgacagtcgtcatatactcactacatcagagttccaactccgtttgactgtatggtctcttgtaaat

SEQ ID NO: 14898 - protein, 169 aa, Triticum aestivum
  peptide (1)..(169): Ceres Seq. ID no. 13656048
  misc_feature (48)..(168): NCBI GI NO: 37536890 NR Description: putative WD-40 protein
  misc_feature (48)..(168): NCBI GI NO: 15240819 NR Description: WD-40 repeat protein family [Arabidopsis thaliana]
  misc_feature (48)..(167): NCBI GI NO: 10946908 NR Description: WD repeat domain 8; DD57 [Mus musculus]
  misc_feature (48)..(167): NCBI GI NO: 26342120 NR Description: unnamed protein product [Mus musculus]
  misc_feature (48)..(167): NCBI GI NO: 16507946 NR Description: Wdr8 protein [Mus musculus]
  misc_feature (48)..(167): NCBI GI NO: 29791584 NR Description: Similar to WD repeat domain 8 [Danio rerio]
  misc_feature (48)..(167): NCBI GI NO: 38174120 NR Description: Unknown (protein for MGC:75994)
  misc_feature (48)..(167): NCBI GI NO: 7020525 NR Description: unnamed protein product [Homo sapiens]
  misc_feature (48)..(167): NCBI GI NO: 17380347 NR Description: WD-repeat protein 8
  misc_feature (48)..(167): NCBI GI NO: 16445434 NR Description: WD repeat domain 8 protein
ENRHSNAVPPPPPRLSRSPATDRPSARPQPPHPSRDDPGGGAERAGGMEFTEAYKQTGPCCFSPDARFLAVACDYRLVVRDVVTLKVVQLFSCVDKINFLEWAPDSEYILCGLYKRPMVQAWSLSQPDWTCKIDEGSAGIAYARWSPDSRHILTTSEFQLRLTVWSLVN

SEQ ID NO: 14899 - protein, 122 aa, Triticum aestivum
  peptide (1)..(122): Ceres Seq. ID no. 13656049
  misc_feature (1)..(121): NCBI GI NO: 37536890 NR Description: putative WD-40 protein
  misc_feature (1)..(121): NCBI GI NO: 15240819 NR Description: WD-40 repeat protein family [Arabidopsis thaliana]
  misc_feature (1)..(120): NCBI GI NO: 10946908 NR Description: WD repeat domain 8; DD57 [Mus musculus]
  misc_feature (1)..(120): NCBI GI NO: 16507946 NR Description: Wdr8 protein [Mus musculus]
  misc_feature (1)..(120): NCBI GI NO: 26342120 NR Description: unnamed protein product [Mus musculus]
  misc_feature (1)..(120): NCBI GI NO: 29791584 NR Description: Similar to WD repeat domain 8 [Danio rerio]
  misc_feature (1)..(120): NCBI GI NO: 38174120 NR Description: Unknown (protein for MGC:75994)
  misc_feature (1)..(120): NCBI GI NO: 7020525 NR Description: unnamed protein product [Homo sapiens]
  misc_feature (1)..(120): NCBI GI NO: 17380347 NR Description: WD-repeat protein 8
  misc_feature (1)..(120): NCBI GI NO: 16445434 NR Description: WD repeat domain 8 protein
MEFTEAYKQTGPCCFSPDARFLAVACDYRLVVRDVVTLKVVQLFSCVDKINFLEWAPDSEYILCGLYKRPMVQAWSLSQPDWTCKIDEGSAGIAYARWSPDSRHILTTSEFQLRLTVWSLVN

SEQ ID NO: 14900 - DNA, 1296 bp, Triticum aestivum
  misc_feature (1)..(1296): Ceres Seq. ID no. 13656050
aagatcaacaccaaacctctagatatagctggtatctttacctcgcgccgcccgaagacatggtatccgcgacgacgatgcaccaccggcgccgctccattctccagctggccctcctactactggcggcgtcaccggcggcaatgctggcggccggcggagcctgcgagagagaggagttcccggccggcaggagctacgcgacgtgcgcggatctccctgccctcggcgcctcgctgcactggacgtacgacgcggcggcctcgtcgttgtccctggcattcgcggccaagccgcccggcgcgagcggcgccggctgggtggcttggggggtcaaccccaccggcgatggcatgaagggcgcgcagacgctcctcgccttcaagagcaaaggcgcatacgtcgtcaacacgtacaacctcaccgggtaccgcccgctcagcgcggcgtccacgccgatcgcgttcgaggccaccgagctcgccgccgacgagggcgccgacgggaaggtgcggctctacggcacgctgcagctgcccaagggcatggaggccgtgaaccacatctggcaggtagggtcgacggtggccaatggggtgccggccaagcacgcgttcgcgcaggagaacctcgaggcgaagggcagtcttgtgctcaccggtgccggagcgacggaggccgcgccagctccggtgtttatctctcacgactatctcgattaaccagtagcagtagtgtttgggatacaaaattcaagagagaaagagagagtggggaaggagaaggaagtaggtaaggaagaacagagctggcaacaatctgcaaaaaaaaacacacacacacacacacacaccaatcttggggatgatccgtcgggaaagaaaattaagagtattaagaaaactaagaatactatgagcacttctaattcagatgatttcacaatagttcccccacaaaaaacatcaacatgagtgacaacaatgtgagtgatcatgagcataattttaatttgtctactataaagtatgcaaattcggtgagaaccaatttttgataatatgtgttctgggcgtcaatctccgttcaattgcaatcaaccgcccatattatgcttcaagggttggatgtacaacagtagtgttttttctagagaaaatttggagcgttctccttgtttgggtgatgtaccatgtaaaaaattactttcactgatatatctgcgtacaataaaaatctttatagaggaaaaaacataacaaatgtattttttatgatcaaataatatgttgatac

SEQ ID NO: 14901 - protein, 239 aa, Triticum aestivum
  peptide (1)..(239): Ceres Seq. ID no. 13656051
  misc_feature (118)..(223): Pfam Name: DUF568 Pfam Description: Protein of unknown function
  misc_feature (26)..(231): NCBI GI NO: 29647484 NR Description: OJ1191_A10.2
  misc_feature (33)..(230): NCBI GI NO: 30680258 NR Description: auxin-induced protein (AIR12)
  misc_feature (33)..(230): NCBI GI NO: 11357190 NR Description: auxin-induced protein AIR12
  misc_feature (36)..(216): NCBI GI NO: 38424013 NR Description: auxin-induced protein-like
  misc_feature (32)..(220): NCBI GI NO: 15235545 NR Description: auxin-induced protein, putative
  misc_feature (32)..(220): NCBI GI NO: 21593814 NR Description: unknown [Arabidopsis thaliana]
  misc_feature (31)..(224): NCBI GI NO: 18404500 NR Description: auxin-induced protein family
  misc_feature (37)..(216): NCBI GI NO: 18421491 NR Description: auxin-induced protein family
  misc_feature (37)..(216): NCBI GI NO: 21592781 NR Description: putative membrane protein [Arabidopsis thaliana]
  misc_feature (54)..(227): NCBI GI NO: 15239696 NR Description: auxin-induced protein, putative
DQHQTSRYSWYLYLAPPEDMVSATTMHHRRRSILQLALLLLAASPAAMLAAGGACEREEFPAGRSYATCADLPALGASLHWTYDAAASSLSLAFAAKPPGASGAGWVAWGVNPTGDGMKGAQTLLAFKSKGAYVVNTYNLTGYRPLSAASTPIAFEATELAADEGADGKVRLYGTLQLPKGMEAVNHIWQVGSTVANGVPAKHAFAQENLEAKGSLVLTGAGATEAAPAPVFISHDYLD

SEQ ID NO: 14902 - protein, 220 aa, Triticum aestivum
  peptide (1)..(220): Ceres Seq. ID no. 13656052
  misc_feature (99)..(204): Pfam Name: DUF568 Pfam Description: Protein of unknown function
  misc_feature (7)..(212): NCBI GI NO: 29647484 NR Description: OJ1191_A10.2
  misc_feature (14)..(211): NCBI GI NO: 30680258 NR Description: auxin-induced protein (AIR12)
  misc_feature (14)..(211): NCBI GI NO: 11357190 NR Description: auxin-induced protein AIR12
  misc_feature (17)..(197): NCBI GI NO: 38424013 NR Description: auxin-induced protein-like
  misc_feature (13)..(201): NCBI GI NO: 15235545 NR Description: auxin-induced protein, putative
  misc_feature (13)..(201): NCBI GI NO: 21593814 NR Description: unknown [Arabidopsis thaliana]
  misc_feature (12)..(205): NCBI GI NO: 18404500 NR Description: auxin-induced protein family
  misc_feature (18)..(197): NCBI GI NO: 18421491 NR Description: auxin-induced protein family
  misc_feature (18)..(197): NCBI GI NO: 21592781 NR Description: putative membrane protein [Arabidopsis thaliana]
  misc_feature (35)..(208): NCBI GI NO: 15239696 NR Description: auxin-induced protein, putative
MVSATTMHHRRRSILQLALLLLAASPAAMLAAGGACEREEFPAGRSYATCADLPALGASLHWTYDAAASSLSLAFAAKPPGASGAGWVAWGVNPTGDGMKGAQTLLAFKSKGAYVVNTYNLTGYRPLSAASTPIAFEATELAADEGADGKVRLYGTLQLPKGMEAVNHIWQVGSTVANGVPAKHAFAQENLEAKGSLVLTGAGATEAAPAPVFISHDYLD

SEQ ID NO: 14903 - protein, 214 aa, Triticum aestivum
  peptide (1)..(214): Ceres Seq. ID no. 13656053
  misc_feature (93)..(198): Pfam Name: DUF568 Pfam Description: Protein of unknown function
  misc_feature (1)..(206): NCBI GI NO: 29647484 NR Description: OJ1191_A10.2
  misc_feature (8)..(205): NCBI GI NO: 30680258 NR Description: auxin-induced protein (AIR12)
  misc_feature (8)..(205): NCBI GI NO: 11357190 NR Description: auxin-induced protein AIR12
  misc_feature (11)..(191): NCBI GI NO: 38424013 NR Description: auxin-induced protein-like
  misc_feature (7)..(195): NCBI GI NO: 15235545 NR Description: auxin-induced protein, putative
  misc_feature (7)..(195): NCBI GI NO: 21593814 NR Description: unknown [Arabidopsis thaliana]
  misc_feature (6)..(199): NCBI GI NO: 18404500 NR Description: auxin-induced protein family
  misc_feature (12)..(191): NCBI GI NO: 18421491 NR Description: auxin-induced protein family
  misc_feature (12)..(191): NCBI GI NO: 21592781 NR Description: putative membrane protein [Arabidopsis thaliana]
  misc_feature (29)..(202): NCBI GI NO: 15239696 NR Description: auxin-induced protein, putative
MHHRRRSILQLALLLLAASPAAMLAAGGACEREEFPAGRSYATCADLPALGASLHWTYDAAASSLSLAFAAKPPGASGAGWVAWGVNPTGDGMKGAQTLLAFKSKGAYVVNTYNLTGYRPLSAASTPIAFEATELAADEGADGKVRLYGTLQLPKGMEAVNHIWQVGSTVANGVPAKHAFAQENLEAKGSLVLTGAGATEAAPAPVFISHDYLD

SEQ ID NO: 14904 - DNA, 1375 bp, Triticum aestivum
  misc_feature (1)..(1375): Ceres Seq. ID no. 13656028
acctagaacatcctaatcgaaaagatattttcctcctctccgtgcggacaactccactccactcgtccactcctactaccagcttctcactcccactcccgcaggcgggtgatccatggccacggcgctccgcctcccgtctctcctctcctcccgcgccgcccctaccaccgccgctcgcgctaccatccgagggaatcggacaggatcgttcactcacagggtcgccgcgcagcctgacgacaccaccgccaccacctccacctccaccacgccggctccgcccgccgggttcacgcctccggttcccaagcggttcgaggtcaagcccggccagtcaaacaacatcgccggcgccgccctcgctttgcccttccgcctcggcaccggcgtcttcgtcctaggatatggagtgacacttgttgatgctaacgagatatcaccagatcaatatgctttggatttccaaggtcggaaggtgaaagaaacgtcgaaggtggggcagtgccctcgacctgctaagcctattgaaatatacgagtttgaaggatgtccattttgtcgaaaggtcagagagatggtatccgtcctggaccttgatgttttatattacccttgtcctaaaggcagcccaaccttccggccaaaggttctagagatgggtggaaagaaacagtttccttacatggtcgatccaaacacaggagttgctatgtatgaatcagatgacatcataaattacctggcaaaaacttacggtgatggaagtgttccaattatgctaaaacttggtctattgacaacaataacggcagggcttgcattgagtgggcgtagcgggaaggggtcttcctacagtcctgcaaagcttccatctcagccaatagagatatgggcatacgagggatctcctttctgtaaaatagcgcgtgagacccttgtcgaattggagttgccacacttgctacacagctgtgcgcgtggcagccccaagcgacaggatttttttgagaaatatggtcttttccaggcgccttatatcgaggatcctaacacgggggtaaagatgttcgaaagcgccgacatcgtagagtatctgagggcaacatatgctgcttgagaatccctgtcactgtcttttctcagtaaataactaaatattgagctcatagctgccatgtctcttctcatgtagtagatcacattctttactaggaaaaatggtgcatactagatatgtaaggtgtaaattatattcgctgcagctgagacagcgtctttgctatctaagagacactgaatctgaggccgtagaaaagggaaaaaaaaaaaaaaaaaagcttatcgataccgtcgacctcgagggggggcccgg

SEQ ID NO: 14905 - protein, 334 aa, Triticum aestivum
  peptide (1)..(334): Ceres Seq. ID no. 13656029
  misc_feature (7)..(334): NCBI GI NO: 18414386 NR Description: auxin-regulated protein [Arabidopsis thaliana]
  misc_feature (7)..(334): NCBI GI NO: 21593275 NR Description: unknown [Arabidopsis thaliana]
  misc_feature (7)..(334): NCBI GI NO: 11282317 NR Description: hypothetical protein F8F6
  misc_feature (134)..(334): NCBI GI NO: 18413285 NR Description: expressed protein [Arabidopsis thaliana]
  misc_feature (134)..(334): NCBI GI NO: 21593568 NR Description: unknown [Arabidopsis thaliana]
  misc_feature (134)..(334): NCBI GI NO: 7487730 NR Description: hypothetical protein T5L19
  misc_feature (133)..(259): NCBI GI NO: 15488040 NR Description: unknown [Photobacterium profundum]
MATALRLPSLLSSRAAPTTAARATIRGNRTGSFTHRVAAQPDDTTATTSTSTTPAPPAGFTPPVPKRFEVKPGQSNNIAGAALALPFRLGTGVFVLGYGVTLVDANEISPDQYALDFQGRKVKETSKVGQCPRPAKPIEIYEFEGCPFCRKVREMVSVLDLDVLYYPCPKGSPTFRPKVLEMGGKKQFPYMVDPNTGVAMYESDDIINYLAKTYGDGSVPIMLKLGLLTTITAGLALSGRSGKGSSYSPAKLPSQPIEIWAYEGSPFCKIARETLVELELPHLLHSCARGSPKRQDFFEKYGLFQAPYIEDPNTGVKMFESADIVEYLRATYAA

SEQ ID NO: 14906 - protein, 180 aa, Triticum aestivum
  peptide (1)..(180): Ceres Seq. ID no. 13656030
  misc_feature (1)..(180): NCBI GI NO: 18414386 NR Description: auxin-regulated protein [Arabidopsis thaliana]
  misc_feature (1)..(180): NCBI GI NO: 21593275 NR Description: unknown [Arabidopsis thaliana]
  misc_feature (1)..(180): NCBI GI NO: 11282317 NR Description: hypothetical protein F8F6
  misc_feature (1)..(180): NCBI GI NO: 18413285 NR Description: expressed protein [Arabidopsis thaliana]
  misc_feature (1)..(180): NCBI GI NO: 21593568 NR Description: unknown [Arabidopsis thaliana]
  misc_feature (1)..(180): NCBI GI NO: 7487730 NR Description: hypothetical protein T5L19
  misc_feature (1)..(105): NCBI GI NO: 15488040 NR Description: unknown [Photobacterium profundum]
MVSVLDLDVLYYPCPKGSPTFRPKVLEMGGKKQFPYMVDPNTGVAMYESDDIINYLAKTYGDGSVPIMLKLGLLTTITAGLALSGRSGKGSSYSPAKLPSQPIEIWAYEGSPFCKIARETLVELELPHLLHSCARGSPKRQDFFEKYGLFQAPYIEDPNTGVKMFESADIVEYLRATYAA

SEQ ID NO: 14907 - DNA, 1379 bp, Triticum aestivum
  misc_feature (1)..(1379): Ceres Seq. ID no. 15169674
ccattccgactctctctccaccgaaacagaaacaccaacctcccctcggccggcgaccatggcggaggccgcggccgcaggagcgacgcctctcctccgcaacctccccgatgagatcgtgctctgggagatcctcgcccgccttgaccccagatcgctcatccgctgccgcgccgtccgccgcgcctggcgccgcgccacctccacccgtcgcttcctcctggcccaccacgcacgccagcccgcattccccatcgccgccgacaacaggtaccgtaacttcctcgccttcgaccaccggtccgccgccaccgccgacgcccagttccacaccgtcgcccggcttggcgggtccttcagtctggagctctgctgcgacggcctcctcctcgtcgccaagtctggcatgcttggcaatcgcgcccgcctcgccgtctgcaacccggtaacgcgtcagcacgcctccctcccgcccctgccggacttcaacatcctggggatgtacctacacggacctaccgacgagtaccggctgttactgcaatggaggggcgcaatggactggggggacgacagtgactttgactcgcctacaggcaaaaatggctgctatgtctttgcgctgggatccgaccagccaccgaggtacatcgggttgtcggagcccaaattctcgtcggcttacttccacggacctgcccgggtgcgtgatagcctgcattggtgcctgttttatcgcccaggcgagaccccactggaggattgtgaggctggatgggaactggtggtatttgacaccatagctgagtcatttcggcagatgcatgctccagttgatcccaccaagtcatgcatccttgagatggatgacatgcttggcatctattgctgtaacaaggctgcggaagttgttgatatatgggtgttgccgaactacgacagtgaggtttgggacttgaagtaccgggttgcattgccgatcgcagaaatcaggggaaagcttgaaggccatgatggtgagtgctattggtatgtgaccgttgcttcgggtggtggtgacgagctcttgctggccagttttggtcgttcgctgttttacattgacactcatggcaaactggttgctagcttccaagacatctttccctctaggcatcggctcaaacaaactcttgttccgcatgatttcttcagaacagtaaaaggtcaggctgtcgacgcttcacctttcatctgacggatgttgagagaggcggtgcttcttaacaggctagttttcatatcctcgtgagttgtaatgtctatgtattggatcaagtatgggcctgctgatttcttctttttgtgtcaatcagaagtgactgtcatgtggttgcatg

SEQ ID NO: 14908 - protein, 411 aa, Triticum aestivum
  peptide (1)..(411): Ceres Seq. ID no. 15169675
  misc_feature (35)..(77): Pfam Name: Pfam Description:  F-box domain
  misc_feature (23)..(241): NCBI GI NO: 38346536 NR Description: OSJNBa0040D17.11
  misc_feature (203)..(411): NCBI GI NO: 38346536 NR Description: OSJNBa0040D17.11
  misc_feature (20)..(411): NCBI GI NO: 38346045 NR Description: OSJNBa0059D20.17
  misc_feature (19)..(411): NCBI GI NO: 38346527 NR Description: OSJNBa0040D17.2
  misc_feature (10)..(398): NCBI GI NO: 37530720 NR Description: unknown protein
  misc_feature (18)..(410): NCBI GI NO: 38344215 NR Description: OSJNBb0026E15.3
  misc_feature (136)..(398): NCBI GI NO: 37533944 NR Description: hypothetical protein
  misc_feature (35)..(248): NCBI GI NO: 37533944 NR Description: hypothetical protein
HSDSLSTETETPTSPRPATMAEAAAAGATPLLRNLPDEIVLWEILARLDPRSLIRCRAVRRAWRRATSTRRFLLAHHARQPAFPIAADNRYRNFLAFDHRSAATADAQFHTVARLGGSFSLELCCDGLLLVAKSGMLGNRARLAVCNPVTRQHASLPPLPDFNILGMYLHGPTDEYRLLLQWRGAMDWGDDSDFDSPTGKNGCYVFALGSDQPPRYIGLSEPKFSSAYFHGPARVRDSLHWCLFYRPGETPLEDCEAGWELVVFDTIAESFRQMHAPVDPTKSCILEMDDMLGIYCCNKAAEVVDIWVLPNYDSEVWDLKYRVALPIAEIRGKLEGHDGECYWYVTVASGGGDELLLASFGRSLFYIDTHGKLVASFQDIFPSRHRLKQTLVPHDFFRTVKGQAVDASPFI

SEQ ID NO: 14909 - protein, 392 aa, Triticum aestivum
  peptide (1)..(392): Ceres Seq. ID no. 15169676
  misc_feature (16)..(58): Pfam Name: Pfam Description:  F-box domain
  misc_feature (4)..(222): NCBI GI NO: 38346536 NR Description: OSJNBa0040D17.11
  misc_feature (184)..(392): NCBI GI NO: 38346536 NR Description: OSJNBa0040D17.11
  misc_feature (1)..(392): NCBI GI NO: 38346045 NR Description: OSJNBa0059D20.17
  misc_feature (1)..(392): NCBI GI NO: 38346527 NR Description: OSJNBa0040D17.2
  misc_feature (1)..(379): NCBI GI NO: 37530720 NR Description: unknown protein
  misc_feature (1)..(391): NCBI GI NO: 38344215 NR Description: OSJNBb0026E15.3
  misc_feature (117)..(379): NCBI GI NO: 37533944 NR Description: hypothetical protein
  misc_feature (16)..(229): NCBI GI NO: 37533944 NR Description: hypothetical protein
MAEAAAAGATPLLRNLPDEIVLWEILARLDPRSLIRCRAVRRAWRRATSTRRFLLAHHARQPAFPIAADNRYRNFLAFDHRSAATADAQFHTVARLGGSFSLELCCDGLLLVAKSGMLGNRARLAVCNPVTRQHASLPPLPDFNILGMYLHGPTDEYRLLLQWRGAMDWGDDSDFDSPTGKNGCYVFALGSDQPPRYIGLSEPKFSSAYFHGPARVRDSLHWCLFYRPGETPLEDCEAGWELVVFDTIAESFRQMHAPVDPTKSCILEMDDMLGIYCCNKAAEVVDIWVLPNYDSEVWDLKYRVALPIAEIRGKLEGHDGECYWYVTVASGGGDELLLASFGRSLFYIDTHGKLVASFQDIFPSRHRLKQTLVPHDFFRTVKGQAVDASPFI

SEQ ID NO: 14910 - protein, 276 aa, Triticum aestivum
  peptide (1)..(276): Ceres Seq. ID no. 15169677
  misc_feature (1)..(106): NCBI GI NO: 38346536 NR Description: OSJNBa0040D17.11
  misc_feature (68)..(276): NCBI GI NO: 38346536 NR Description: OSJNBa0040D17.11
  misc_feature (1)..(276): NCBI GI NO: 38346045 NR Description: OSJNBa0059D20.17
  misc_feature (1)..(276): NCBI GI NO: 38346527 NR Description: OSJNBa0040D17.2
  misc_feature (1)..(263): NCBI GI NO: 37530720 NR Description: unknown protein
  misc_feature (1)..(275): NCBI GI NO: 38344215 NR Description: OSJNBb0026E15.3
  misc_feature (1)..(263): NCBI GI NO: 37533944 NR Description: hypothetical protein
  misc_feature (1)..(113): NCBI GI NO: 37533944 NR Description: hypothetical protein
MLGNRARLAVCNPVTRQHASLPPLPDFNILGMYLHGPTDEYRLLLQWRGAMDWGDDSDFDSPTGKNGCYVFALGSDQPPRYIGLSEPKFSSAYFHGPARVRDSLHWCLFYRPGETPLEDCEAGWELVVFDTIAESFRQMHAPVDPTKSCILEMDDMLGIYCCNKAAEVVDIWVLPNYDSEVWDLKYRVALPIAEIRGKLEGHDGECYWYVTVASGGGDELLLASFGRSLFYIDTHGKLVASFQDIFPSRHRLKQTLVPHDFFRTVKGQAVDASPFI

SEQ ID NO: 14911 - DNA, 699 bp, Triticum aestivum
  misc_feature (1)..(699): Ceres Seq. ID no. 13597511
aaaaaaaacacaccgactccactgcatctgcttcgccgcgggcgagtccggccgccggcgatgcggggcccgcacaaccgcccccagtgcacgccggcccaccaggcgggcgccctcctcctggtcgccgtcaccttcctcctcacccgcctcctctccgcccctccccctgccccgcccttccccacccccggcccccggctctccgccgcggccgaccacctccgcgtctacgtctacgccgaggacgaggtcgacggcctgcgcgcgctgctccgcggccgcgacggcgccgtctccgccgccacctgcctcaagggccagtggggaacgcaggtgaagatccaccagcttctcctgaggtcaaggtataggacactggacaaggacgaagcgcatctcttctttgttcccagctacgtcaaatgtgttcgcatgaccggagctctcacagacaaggaaatcaatcagacatatgtcaaggttctgagtcagatgtcatatttccgcagatcgggtgggcgtgaccacatttttgtcttcccaagtggtgctggagctcacctgtttcgctcgtgggcaacttttctgaatcgatccatcatcctcactccagagggtgaccgtactgacaagcgaggtataagcgcatttaatacatggaaagacattattatcccggggaatgtggatgattct

SEQ ID NO: 14912 - protein, 233 aa, Triticum aestivum
  peptide (1)..(233): Ceres Seq. ID no. 13597512
  misc_feature (77)..(232): Pfam Name: Pfam Description:  Exostosin family
  misc_feature (75)..(232): NCBI GI NO: 18394994 NR Description: Exostosin family [Arabidopsis thaliana]
  misc_feature (75)..(232): NCBI GI NO: 25518706 NR Description: hypothetical protein F24J8
  misc_feature (25)..(51): NCBI GI NO: 18394994 NR Description: Exostosin family [Arabidopsis thaliana]
  misc_feature (25)..(51): NCBI GI NO: 25518706 NR Description: hypothetical protein F24J8
  misc_feature (75)..(232): NCBI GI NO: 18650643 NR Description: At1g21480/F24J8_23 [Arabidopsis thaliana]
  misc_feature (75)..(232): NCBI GI NO: 21537341 NR Description: unknown [Arabidopsis thaliana]
  misc_feature (12)..(187): NCBI GI NO: 34902390 NR Description: Unknown protein
KKNTPTPLHLLRRGRVRPPAMRGPHNRPQCTPAHQAGALLLVAVTFLLTRLLSAPPPAPPFPTPGPRLSAAADHLRVYVYAEDEVDGLRALLRGRDGAVSAATCLKGQWGTQVKIHQLLLRSRYRTLDKDEAHLFFVPSYVKCVRMTGALTDKEINQTYVKVLSQMSYFRRSGGRDHIFVFPSGAGAHLFRSWATFLNRSIILTPEGDRTDKRGISAFNTWKDIIIPGNVDDS

SEQ ID NO: 14913 - protein, 213 aa, Triticum aestivum
  peptide (1)..(213): Ceres Seq. ID no. 13597513
  misc_feature (57)..(212): Pfam Name: Pfam Description:  Exostosin family
  misc_feature (55)..(212): NCBI GI NO: 18394994 NR Description: Exostosin family [Arabidopsis thaliana]
  misc_feature (55)..(212): NCBI GI NO: 25518706 NR Description: hypothetical protein F24J8
  misc_feature (5)..(31): NCBI GI NO: 18394994 NR Description: Exostosin family [Arabidopsis thaliana]
  misc_feature (5)..(31): NCBI GI NO: 25518706 NR Description: hypothetical protein F24J8
  misc_feature (55)..(212): NCBI GI NO: 18650643 NR Description: At1g21480/F24J8_23 [Arabidopsis thaliana]
  misc_feature (55)..(212): NCBI GI NO: 21537341 NR Description: unknown [Arabidopsis thaliana]
  misc_feature (1)..(167): NCBI GI NO: 34902390 NR Description: Unknown protein
MRGPHNRPQCTPAHQAGALLLVAVTFLLTRLLSAPPPAPPFPTPGPRLSAAADHLRVYVYAEDEVDGLRALLRGRDGAVSAATCLKGQWGTQVKIHQLLLRSRYRTLDKDEAHLFFVPSYVKCVRMTGALTDKEINQTYVKVLSQMSYFRRSGGRDHIFVFPSGAGAHLFRSWATFLNRSIILTPEGDRTDKRGISAFNTWKDIIIPGNVDDS

SEQ ID NO: 14914 - protein, 123 aa, Triticum aestivum
  peptide (1)..(123): Ceres Seq. ID no. 13597514
  misc_feature (5)..(104): Pfam Name: rhodopsin family Pfam Description: 7 transmembrane receptor
  misc_feature (10)..(119): NCBI GI NO: 15145797 NR Description: basic proline-rich protein [Sus scrofa]
  misc_feature (10)..(119): NCBI GI NO: 15145795 NR Description: basic proline-rich protein [Sus scrofa]
  misc_feature (10)..(119): NCBI GI NO: 15145793 NR Description: basic proline-rich protein [Sus scrofa]
  misc_feature (10)..(119): NCBI GI NO: 15145797 NR Description: basic proline-rich protein [Sus scrofa]
  misc_feature (6)..(119): NCBI GI NO: 15145797 NR Description: basic proline-rich protein [Sus scrofa]
  misc_feature (10)..(119): NCBI GI NO: 15145797 NR Description: basic proline-rich protein [Sus scrofa]
  misc_feature (10)..(119): NCBI GI NO: 15145797 NR Description: basic proline-rich protein [Sus scrofa]
  misc_feature (10)..(119): NCBI GI NO: 15145795 NR Description: basic proline-rich protein [Sus scrofa]
  misc_feature (10)..(119): NCBI GI NO: 15145795 NR Description: basic proline-rich protein [Sus scrofa]
  misc_feature (10)..(119): NCBI GI NO: 15145793 NR Description: basic proline-rich protein [Sus scrofa]
KKHTDSTASASPRASPAAGDAGPAQPPPVHAGPPGGRPPPGRRHLPPHPPPLRPSPCPALPHPRPPALRRGRPPPRLRLRRGRGRRPARAAPRPRRRRLRRHLPQGPVGNAGEDPPASPEVKV

SEQ ID NO: 14915 - DNA, 1953 bp, Triticum aestivum
  misc_feature (1)..(1953): Ceres Seq. ID no. 13584538
aatccgccgactgctccgtttatttaaccgagccgtcccattcttggagagcaagaagcacgccaccacctcgcgtccccaaagaatccccatcccttcccctcccctcccctccccggccgcacacagatccggcgaccgacaacaagccatggtgtccaacggggagctgtcgcagccgcaggcgggggagtacggcctcgccgtcatgcgccgccggcccaagaccaagatcgtctgcacgctcggcccggcctcccgctccgtcgacatgatcgagaagctgctgcgcgccggcatgtgcgtcgcccgcttcaacttctcccacggctcccacgactaccaccaggagacgctcgacaacctgcacgccgccatggaccgcaccgggatcctctgcgccgtcatgctcgacaccaagggtccagagatccgtactggatttttgaaagatgggaagcctatccagttgaggaagggccaagaaattgtgatctccacagattatagcataaagggggacgacaagatgatatcgatgagctataagaagctagcagttgatctgaagccaggcagtgtcatattatgcgctgatggtaccatcactcttacagtgcttcattgtgacaaagagcaaggtctcgttcgctgctgttgtgagaacactgctatgcttggtgagaggaagaatgtcaatcttccaggggtcgttgttgatctgccaacactcactgaaaaggacagggaggatatccttcaatggggcgtcccgaacaagattgacatgattgctttgtcgtttgtccgcaaaggttcagatcttgtggaggtcaggaaggtacttggggagcatgccaagtcaataatgctgatgtcaaaggttgagaaccaggaaggagtagctaactttgacgatatcctggcacagtctgatgcttttatggtggcaagaggtgatttggggatggaaattcctgtagagaagatcttttatgcacagaaggtgatgattttcaagtgcaacattcagggcaagccagttgtgactgcaacccagatgttggagtctatgatcaagtctcctcggcctactcgagcggaagcaactgatgtggccaacgcagttcttgatggcactgactgtgtgatgctcagtggtgagacagcggctggggcttatccagaactggcagtgcaaactatggccaagatctgcttgcaggccgagtcatgcgtggactattctgctgtttttaaatcaatcatgtcatcagccccgattcccatgagcccattggagagccttgcctcatcagctgtccgcacagccaactcagccaaggcgacgcttatcttggtactgaccaggggaggaacaactgcaaggcttgtagccaagtacaggccatccatgccgatactgtctgtggtggttcctgagctcaagacggtcgagtttgactggatctgcagcgacgaggggcctgccaggcaaagcctcatcgtgaggggcgtgatccctatgctcagtgctggcactgccaaggcgtttgacagcgaagccacggaagaggcactgaggtttgccatgaagaacgccaaggagatgggcctttgcaacgctggtgactccattgtggcccttcaccgcatcgggaatgcatctgtcatcaagctcttgaccgtgtaagctagtggcagcgaagcgacaatgcaacaccattttgcccggggattttcccttctttctttttgcgaggctacgcatacccacagttttttgctgccaagattgcggcagtgcaacctggttaaaactttgtgttatcaagttgtggctgtttactctttatgagagggtttagccaccaaaactattatcgcagcagcttgttttgctactactactataacttatatgcaacgattgaactacctgatagttgctcc

SEQ ID NO: 14916 - protein, 563 aa, Triticum aestivum
  peptide (1)..(563): Ceres Seq. ID no. 13584539
  misc_feature (433)..(562): Pfam Name: Pfam Description:  Pyruvate kinase, alpha/beta domain
  misc_feature (72)..(563): NCBI GI NO: 2497543 NR Description: Pyruvate kinase, cytosolic isozyme
  misc_feature (67)..(563): NCBI GI NO: 15241190 NR Description: pyruvate kinase, putative [Arabidopsis thaliana]
  misc_feature (72)..(563): NCBI GI NO: 22296820 NR Description: pyruvate kinase [Glycine max]
  misc_feature (72)..(563): NCBI GI NO: 22296818 NR Description: pyruvate kinase [Glycine max]
  misc_feature (70)..(563): NCBI GI NO: 15236190 NR Description: pyruvate kinase, putative [Arabidopsis thaliana]
  misc_feature (72)..(563): NCBI GI NO: 2497538 NR Description: Pyruvate kinase, cytosolic isozyme
  misc_feature (72)..(563): NCBI GI NO: 15242313 NR Description: pyruvate kinase, putative [Arabidopsis thaliana]
  misc_feature (72)..(563): NCBI GI NO: 15242863 NR Description: pyruvate kinase, putative [Arabidopsis thaliana]
  misc_feature (72)..(563): NCBI GI NO: 322787 NR Description: pyruvate kinase (EC 2.7.1.40), cytosolic - potato
  misc_feature (75)..(481): NCBI GI NO: 13928580 NR Description: pyruvate kinase [Toxoplasma gondii]
IRRLLRLFNRAVPFLESKKHATTSRPQRIPIPSPPLPSPAAHRSGDRQQAMVSNGELSQPQAGEYGLAVMRRRPKTKIVCTLGPASRSVDMIEKLLRAGMCVARFNFSHGSHDYHQETLDNLHAAMDRTGILCAVMLDTKGPEIRTGFLKDGKPIQLRKGQEIVISTDYSIKGDDKMISMSYKKLAVDLKPGSVILCADGTITLTVLHCDKEQGLVRCCCENTAMLGERKNVNLPGVVVDLPTLTEKDREDILQWGVPNKIDMIALSFVRKGSDLVEVRKVLGEHAKSIMLMSKVENQEGVANFDDILAQSDAFMVARGDLGMEIPVEKIFYAQKVMIFKCNIQGKPVVTATQMLESMIKSPRPTRAEATDVANAVLDGTDCVMLSGETAAGAYPELAVQTMAKICLQAESCVDYSAVFKSIMSSAPIPMSPLESLASSAVRTANSAKATLILVLTRGGTTARLVAKYRPSMPILSVVVPELKTVEFDWICSDEGPARQSLIVRGVIPMLSAGTAKAFDSEATEEALRFAMKNAKEMGLCNAGDSIVALHRIGNASVIKLLTV

SEQ ID NO: 14917 - protein, 513 aa, Triticum aestivum
  peptide (1)..(513): Ceres Seq. ID no. 13584540
  misc_feature (383)..(512): Pfam Name: Pfam Description:  Pyruvate kinase, alpha/beta domain
  misc_feature (22)..(513): NCBI GI NO: 2497543 NR Description: Pyruvate kinase, cytosolic isozyme
  misc_feature (17)..(513): NCBI GI NO: 15241190 NR Description: pyruvate kinase, putative [Arabidopsis thaliana]
  misc_feature (22)..(513): NCBI GI NO: 22296820 NR Description: pyruvate kinase [Glycine max]
  misc_feature (22)..(513): NCBI GI NO: 22296818 NR Description: pyruvate kinase [Glycine max]
  misc_feature (20)..(513): NCBI GI NO: 15236190 NR Description: pyruvate kinase, putative [Arabidopsis thaliana]
  misc_feature (22)..(513): NCBI GI NO: 2497538 NR Description: Pyruvate kinase, cytosolic isozyme
  misc_feature (22)..(513): NCBI GI NO: 15242313 NR Description: pyruvate kinase, putative [Arabidopsis thaliana]
  misc_feature (22)..(513): NCBI GI NO: 15242863 NR Description: pyruvate kinase, putative [Arabidopsis thaliana]
  misc_feature (22)..(513): NCBI GI NO: 322787 NR Description: pyruvate kinase (EC 2.7.1.40), cytosolic - potato
  misc_feature (25)..(431): NCBI GI NO: 13928580 NR Description: pyruvate kinase [Toxoplasma gondii]
MVSNGELSQPQAGEYGLAVMRRRPKTKIVCTLGPASRSVDMIEKLLRAGMCVARFNFSHGSHDYHQETLDNLHAAMDRTGILCAVMLDTKGPEIRTGFLKDGKPIQLRKGQEIVISTDYSIKGDDKMISMSYKKLAVDLKPGSVILCADGTITLTVLHCDKEQGLVRCCCENTAMLGERKNVNLPGVVVDLPTLTEKDREDILQWGVPNKIDMIALSFVRKGSDLVEVRKVLGEHAKSIMLMSKVENQEGVANFDDILAQSDAFMVARGDLGMEIPVEKIFYAQKVMIFKCNIQGKPVVTATQMLESMIKSPRPTRAEATDVANAVLDGTDCVMLSGETAAGAYPELAVQTMAKICLQAESCVDYSAVFKSIMSSAPIPMSPLESLASSAVRTANSAKATLILVLTRGGTTARLVAKYRPSMPILSVVVPELKTVEFDWICSDEGPARQSLIVRGVIPMLSAGTAKAFDSEATEEALRFAMKNAKEMGLCNAGDSIVALHRIGNASVIKLLTV

SEQ ID NO: 14918 - protein, 494 aa, Triticum aestivum
  peptide (1)..(494): Ceres Seq. ID no. 13584541
  misc_feature (364)..(493): Pfam Name: Pfam Description:  Pyruvate kinase, alpha/beta domain
  misc_feature (3)..(494): NCBI GI NO: 2497543 NR Description: Pyruvate kinase, cytosolic isozyme
  misc_feature (1)..(494): NCBI GI NO: 15241190 NR Description: pyruvate kinase, putative [Arabidopsis thaliana]
  misc_feature (3)..(494): NCBI GI NO: 22296820 NR Description: pyruvate kinase [Glycine max]
  misc_feature (3)..(494): NCBI GI NO: 22296818 NR Description: pyruvate kinase [Glycine max]
  misc_feature (1)..(494): NCBI GI NO: 15236190 NR Description: pyruvate kinase, putative [Arabidopsis thaliana]
  misc_feature (3)..(494): NCBI GI NO: 2497538 NR Description: Pyruvate kinase, cytosolic isozyme
  misc_feature (3)..(494): NCBI GI NO: 15242313 NR Description: pyruvate kinase, putative [Arabidopsis thaliana]
  misc_feature (3)..(494): NCBI GI NO: 15242863 NR Description: pyruvate kinase, putative [Arabidopsis thaliana]
  misc_feature (3)..(494): NCBI GI NO: 322787 NR Description: pyruvate kinase (EC 2.7.1.40), cytosolic - potato
  misc_feature (6)..(412): NCBI GI NO: 13928580 NR Description: pyruvate kinase [Toxoplasma gondii]
MRRRPKTKIVCTLGPASRSVDMIEKLLRAGMCVARFNFSHGSHDYHQETLDNLHAAMDRTGILCAVMLDTKGPEIRTGFLKDGKPIQLRKGQEIVISTDYSIKGDDKMISMSYKKLAVDLKPGSVILCADGTITLTVLHCDKEQGLVRCCCENTAMLGERKNVNLPGVVVDLPTLTEKDREDILQWGVPNKIDMIALSFVRKGSDLVEVRKVLGEHAKSIMLMSKVENQEGVANFDDILAQSDAFMVARGDLGMEIPVEKIFYAQKVMIFKCNIQGKPVVTATQMLESMIKSPRPTRAEATDVANAVLDGTDCVMLSGETAAGAYPELAVQTMAKICLQAESCVDYSAVFKSIMSSAPIPMSPLESLASSAVRTANSAKATLILVLTRGGTTARLVAKYRPSMPILSVVVPELKTVEFDWICSDEGPARQSLIVRGVIPMLSAGTAKAFDSEATEEALRFAMKNAKEMGLCNAGDSIVALHRIGNASVIKLLTV

SEQ ID NO: 14919 - DNA, 1456 bp, Triticum aestivum
  misc_feature (1)..(1456): Ceres Seq. ID no. 13655812
aacggtagcatcgctcgtgatagcactgcaacctgggaaccactttctttacattgctctcagtcgagtcaccacttgccagcgatggagagctgcagcttggtcgacacggccgccgccgctctctgctcgacaccgggcgcgcgccgccgcggccgcgccgggagcgccgcgaggttcttcaactgctccagctcctccagagagcacggggtgagcgcgtcctactccatcggccggatgctgagcggggtgaggtcggcggcgcggaggaagctgttcaggagcgagcccgagtggatgggcgtcaactggccggactccatcggccaccattggtggacatccctggagaacaacttcgtgctcgaggcctccgaggacgagtacggcggggtcgtcgtcgacgccgacaggctgccgtccgacgaggccgccttcgcccggtcgctagcggcgtccctctcctactggcagtccgtgggaaagaaaggggtgtggctgaaattgccagtggatcgatctgagtttgttccaatagcagtcaaggaaggattcaagtaccaccacgcggaggaggcctacttgatgctgacgtactggatccccgacgagccgtctctgctcccagcgaacgcttctcatcaggtcggcgtcgggggcttcgtgatcaatgatcaaatggaggtcctagtggtgcaagagaagtatcgcggctgggcgttggatggtgtctggaaactccccacggggttcattcaggagtcagaagaaatatacacgggagccatcagagaggtgcaggaagaaacaggggttgacactgaattcgtggatgtggttgccttcaggcacgcgcacaacgtggcgtttcagaagtcggacctgttcttcatctgcatgctgaggcctctgtcgagcgcgatcaagatcgacgaaacagagattcaggcagcaaagtggatgccgctggaggagttcgtgaagcagccgttcatccaggaggaccacatgttccagaagatcatggacatctgcatccagcggctgaggaagtgctactgcggcctcacggcgcacaacgtcgtctccaagttcgacggcaggcagtccaccctctactacaacgtgggcgagcccgaggatgtcaactgcgacgctgcctgacgggtcgccggattctttttttctttgctctgcgaccgtctaggcgttgtgcggtgcaaagttgtagcattaaggaggcaactggattggcctctgtatatacgtgtaggagactgtaattagacatgggcgggacgggttagctctgtcgcgtagtaatgtgtactactattcgtcagtgtaccggtggtggcaattatctagaagaaatggcagtgatctggaagatatatctttctttcagtttcagtgtattgtgcactttgaaaagaccatgtttctccacgct

SEQ ID NO: 14920 - protein, 388 aa, Triticum aestivum
  peptide (1)..(388): Ceres Seq. ID no. 15220558
  misc_feature (215)..(346): Pfam Name: Pfam Description:  NUDIX domain
  misc_feature (29)..(388): NCBI GI NO: 38346172 NR Description: OSJNBa0079A21.19
  misc_feature (115)..(385): NCBI GI NO: 21928133 NR Description: AT5g47240/MQL5_10 [Arabidopsis thaliana]
  misc_feature (115)..(385): NCBI GI NO: 8809607 NR Description: mutT domain protein-like [Arabidopsis thaliana]
  misc_feature (115)..(385): NCBI GI NO: 18422772 NR Description: MutT/nudix family protein [Arabidopsis thaliana]
  misc_feature (115)..(385): NCBI GI NO: 21593371 NR Description: mutT domain protein-like [Arabidopsis thaliana]
  misc_feature (122)..(376): NCBI GI NO: 18422823 NR Description: MutT/nudix family protein [Arabidopsis thaliana]
  misc_feature (122)..(376): NCBI GI NO: 9758793 NR Description: MutT domain protein-like [Arabidopsis thaliana]
  misc_feature (122)..(379): NCBI GI NO: 38564312 NR Description: At4g25434 [Arabidopsis thaliana]
  misc_feature (122)..(273): NCBI GI NO: 30686884 NR Description: MutT/nudix family protein [Arabidopsis thaliana]
  misc_feature (273)..(379): NCBI GI NO: 30686884 NR Description: MutT/nudix family protein [Arabidopsis thaliana]
NGSIARDSTATWEPLSLHCSQSSHHLPAMESCSLVDTAAAALCSTPGARRRGRAGSAARFFNCSSSSREHGVSASYSIGRMLSGVRSAARRKLFRSEPEWMGVNWPDSIGHHWWTSLENNFVLEASEDEYGGVVVDADRLPSDEAAFARSLAASLSYWQSVGKKGVWLKLPVDRSEFVPIAVKEGFKYHHAEEAYLMLTYWIPDEPSLLPANASHQVGVGGFVINDQMEVLVVQEKYRGWALDGVWKLPTGFIQESEEIYTGAIREVQEETGVDTEFVDVVAFRHAHNVAFQKSDLFFICMLRPLSSAIKIDETEIQAAKWMPLEEFVKQPFIQEDHMFQKIMDICIQRLRKCYCGLTAHNVVSKFDGRQSTLYYNVGEPEDVNCDAA

SEQ ID NO: 14921 - protein, 360 aa, Triticum aestivum
  peptide (1)..(360): Ceres Seq. ID no. 15220559
  misc_feature (187)..(318): Pfam Name: Pfam Description:  NUDIX domain
  misc_feature (1)..(360): NCBI GI NO: 38346172 NR Description: OSJNBa0079A21.19
  misc_feature (87)..(357): NCBI GI NO: 21928133 NR Description: AT5g47240/MQL5_10 [Arabidopsis thaliana]
  misc_feature (87)..(357): NCBI GI NO: 8809607 NR Description: mutT domain protein-like [Arabidopsis thaliana]
  misc_feature (87)..(357): NCBI GI NO: 21593371 NR Description: mutT domain protein-like [Arabidopsis thaliana]
  misc_feature (87)..(357): NCBI GI NO: 18422772 NR Description: MutT/nudix family protein [Arabidopsis thaliana]
  misc_feature (94)..(348): NCBI GI NO: 18422823 NR Description: MutT/nudix family protein [Arabidopsis thaliana]
  misc_feature (94)..(348): NCBI GI NO: 9758793 NR Description: MutT domain protein-like [Arabidopsis thaliana]
  misc_feature (94)..(351): NCBI GI NO: 38564312 NR Description: At4g25434 [Arabidopsis thaliana]
  misc_feature (94)..(245): NCBI GI NO: 30686884 NR Description: MutT/nudix family protein [Arabidopsis thaliana]
  misc_feature (245)..(351): NCBI GI NO: 30686884 NR Description: MutT/nudix family protein [Arabidopsis thaliana]
MESCSLVDTAAAALCSTPGARRRGRAGSAARFFNCSSSSREHGVSASYSIGRMLSGVRSAARRKLFRSEPEWMGVNWPDSIGHHWWTSLENNFVLEASEDEYGGVVVDADRLPSDEAAFARSLAASLSYWQSVGKKGVWLKLPVDRSEFVPIAVKEGFKYHHAEEAYLMLTYWIPDEPSLLPANASHQVGVGGFVINDQMEVLVVQEKYRGWALDGVWKLPTGFIQESEEIYTGAIREVQEETGVDTEFVDVVAFRHAHNVAFQKSDLFFICMLRPLSSAIKIDETEIQAAKWMPLEEFVKQPFIQEDHMFQKIMDICIQRLRKCYCGLTAHNVVSKFDGRQSTLYYNVGEPEDVNCDAA

SEQ ID NO: 14922 - protein, 308 aa, Triticum aestivum
  peptide (1)..(308): Ceres Seq. ID no. 15220560
  misc_feature (135)..(266): Pfam Name: Pfam Description:  NUDIX domain
  misc_feature (1)..(308): NCBI GI NO: 38346172 NR Description: OSJNBa0079A21.19
  misc_feature (35)..(305): NCBI GI NO: 21928133 NR Description: AT5g47240/MQL5_10 [Arabidopsis thaliana]
  misc_feature (35)..(305): NCBI GI NO: 8809607 NR Description: mutT domain protein-like [Arabidopsis thaliana]
  misc_feature (35)..(305): NCBI GI NO: 21593371 NR Description: mutT domain protein-like [Arabidopsis thaliana]
  misc_feature (35)..(305): NCBI GI NO: 18422772 NR Description: MutT/nudix family protein [Arabidopsis thaliana]
  misc_feature (42)..(296): NCBI GI NO: 18422823 NR Description: MutT/nudix family protein [Arabidopsis thaliana]
  misc_feature (42)..(296): NCBI GI NO: 9758793 NR Description: MutT domain protein-like [Arabidopsis thaliana]
  misc_feature (42)..(299): NCBI GI NO: 38564312 NR Description: At4g25434 [Arabidopsis thaliana]
  misc_feature (42)..(193): NCBI GI NO: 30686884 NR Description: MutT/nudix family protein [Arabidopsis thaliana]
  misc_feature (193)..(299): NCBI GI NO: 30686884 NR Description: MutT/nudix family protein [Arabidopsis thaliana]
MLSGVRSAARRKLFRSEPEWMGVNWPDSIGHHWWTSLENNFVLEASEDEYGGVVVDADRLPSDEAAFARSLAASLSYWQSVGKKGVWLKLPVDRSEFVPIAVKEGFKYHHAEEAYLMLTYWIPDEPSLLPANASHQVGVGGFVINDQMEVLVVQEKYRGWALDGVWKLPTGFIQESEEIYTGAIREVQEETGVDTEFVDVVAFRHAHNVAFQKSDLFFICMLRPLSSAIKIDETEIQAAKWMPLEEFVKQPFIQEDHMFQKIMDICIQRLRKCYCGLTAHNVVSKFDGRQSTLYYNVGEPEDVNCDAA

SEQ ID NO: 14923 - DNA, 1057 bp, Triticum aestivum
  misc_feature (1)..(1057): Ceres Seq. ID no. 12617450
cacaacagcaaagcatccagcatcgccaacttccaaaatcaacctacgttgtacacttttcgagccctatccagttctattttctatacacttctcgagccccatccagttttgcgttcgtgccgctcgatccaatcctaccttagcttgcgaagacatggcttctcgtcaggatcaggctagctaccacgccggggaggccaaggcccgcgccgaggagaagacggggtacgtcgtgggcgcggcgcaggacaaggcgagggaggccaaggacacggcgtccgacgccgcgggccgtgccatgggcaggggcggcgacgccaaggaggcgaccaaggagaaggcgtacgaggccaaggacgcggcgtcggacgccaccggccgcgccatggacaagggccgcggcgccgcggaggccaccaaggagaagggctgcgaggccaaggacaaggccgccggcaccgcgcagcagaccgggagctacatcgcccagacggccgaggccgccaagcagaaggcggccggcgccgcccagtacaccatcgacacggcccgtgccggcaccgagcagaccgggagctacatcgagcagacggccgaggccgccaagcagaaggccggcgcggccgcgcagtatgccatggacaccgccgtcgccggcaaggacaagaccggcagcctcctcgtgcaggcaggggagacggtgaagggcgcggcggtgggggcgaaggacgccgtgatgaacacgatcggaatgggcggcggcaccaacggcagcaccgacgtccccgccaaggacaccagcacgtacaagcccgggaccagggattactaatcgtgtgccattgtcaaggcgaccctgatgtatctttctaagctgtagtttaatttctacgtggccatctgtcgccactttggtttctaaattagctcacctcgtggaggttgtaacttgtcaggacctagacaaatgcccaatgaagcattcctgactcctcccttccatgcttgtttccgtgttcacaatttaataaagttggaatcctagtgtctctcc

SEQ ID NO: 14924 - protein, 277 aa, Triticum aestivum
  peptide (1)..(277): Ceres Seq. ID no. 12617451
  misc_feature (172)..(244): Pfam Name: Pfam Description:  Late embryogenesis abundant protein
  misc_feature (53)..(277): NCBI GI NO: 1076757 NR Description: WSI18 protein - rice
  misc_feature (53)..(277): NCBI GI NO: 34910364 NR Description: WSI18 protein
  misc_feature (53)..(277): NCBI GI NO: 7387829 NR Description: Late embryogenesis abundant protein, group 3 (LEA)
  misc_feature (53)..(269): NCBI GI NO: 25989705 NR Description: LEA1 protein [Triticum aestivum]
  misc_feature (53)..(269): NCBI GI NO: 7387828 NR Description: Late embryogenesis abundant protein, group 3
  misc_feature (53)..(269): NCBI GI NO: 126081 NR Description: ABA-inducible protein PHV A1
  misc_feature (53)..(269): NCBI GI NO: 25989707 NR Description: LEA3 protein [Triticum aestivum]
  misc_feature (53)..(226): NCBI GI NO: 7489493 NR Description: LEA protein - rice
  misc_feature (53)..(226): NCBI GI NO: 4105441 NR Description: group 3 LEA protein [Oryza sativa]
  misc_feature (53)..(226): NCBI GI NO: 7489569 NR Description: protein LEA type 1 - rice
TTAKHPASPTSKINLRCTLFEPYPVLFSIHFSSPIQFCVRAARSNPTLACEDMASRQDQASYHAGEAKARAEEKTGYVVGAAQDKAREAKDTASDAAGRAMGRGGDAKEATKEKAYEAKDAASDATGRAMDKGRGAAEATKEKGCEAKDKAAGTAQQTGSYIAQTAEAAKQKAAGAAQYTIDTARAGTEQTGSYIEQTAEAAKQKAGAAAQYAMDTAVAGKDKTGSLLVQAGETVKGAAVGAKDAVMNTIGMGGGTNGSTDVPAKDTSTYKPGTRDY

SEQ ID NO: 14925 - protein, 225 aa, Triticum aestivum
  peptide (1)..(225): Ceres Seq. ID no. 12617452
  misc_feature (120)..(192): Pfam Name: Pfam Description:  Late embryogenesis abundant protein
  misc_feature (1)..(225): NCBI GI NO: 1076757 NR Description: WSI18 protein - rice
  misc_feature (1)..(225): NCBI GI NO: 34910364 NR Description: WSI18 protein
  misc_feature (1)..(225): NCBI GI NO: 7387829 NR Description: Late embryogenesis abundant protein, group 3 (LEA)
  misc_feature (1)..(217): NCBI GI NO: 25989705 NR Description: LEA1 protein [Triticum aestivum]
  misc_feature (1)..(217): NCBI GI NO: 7387828 NR Description: Late embryogenesis abundant protein, group 3
  misc_feature (1)..(217): NCBI GI NO: 126081 NR Description: ABA-inducible protein PHV A1
  misc_feature (1)..(217): NCBI GI NO: 25989707 NR Description: LEA3 protein [Triticum aestivum]
  misc_feature (1)..(174): NCBI GI NO: 7489493 NR Description: LEA protein - rice
  misc_feature (1)..(174): NCBI GI NO: 4105441 NR Description: group 3 LEA protein [Oryza sativa]
  misc_feature (1)..(174): NCBI GI NO: 7489569 NR Description: protein LEA type 1 - rice
MASRQDQASYHAGEAKARAEEKTGYVVGAAQDKAREAKDTASDAAGRAMGRGGDAKEATKEKAYEAKDAASDATGRAMDKGRGAAEATKEKGCEAKDKAAGTAQQTGSYIAQTAEAAKQKAAGAAQYTIDTARAGTEQTGSYIEQTAEAAKQKAGAAAQYAMDTAVAGKDKTGSLLVQAGETVKGAAVGAKDAVMNTIGMGGGTNGSTDVPAKDTSTYKPGTRDY

SEQ ID NO: 14926 - protein, 177 aa, Triticum aestivum
  peptide (1)..(177): Ceres Seq. ID no. 12617453
  misc_feature (72)..(144): Pfam Name: Pfam Description:  Late embryogenesis abundant protein
  misc_feature (1)..(177): NCBI GI NO: 1076757 NR Description: WSI18 protein - rice
  misc_feature (1)..(177): NCBI GI NO: 34910364 NR Description: WSI18 protein
  misc_feature (1)..(177): NCBI GI NO: 7387829 NR Description: Late embryogenesis abundant protein, group 3 (LEA)
  misc_feature (1)..(169): NCBI GI NO: 25989705 NR Description: LEA1 protein [Triticum aestivum]
  misc_feature (1)..(169): NCBI GI NO: 7387828 NR Description: Late embryogenesis abundant protein, group 3
  misc_feature (1)..(169): NCBI GI NO: 126081 NR Description: ABA-inducible protein PHV A1
  misc_feature (1)..(169): NCBI GI NO: 25989707 NR Description: LEA3 protein [Triticum aestivum]
  misc_feature (1)..(126): NCBI GI NO: 7489493 NR Description: LEA protein - rice
  misc_feature (1)..(126): NCBI GI NO: 4105441 NR Description: group 3 LEA protein [Oryza sativa]
  misc_feature (1)..(126): NCBI GI NO: 7489569 NR Description: protein LEA type 1 - rice
MGRGGDAKEATKEKAYEAKDAASDATGRAMDKGRGAAEATKEKGCEAKDKAAGTAQQTGSYIAQTAEAAKQKAAGAAQYTIDTARAGTEQTGSYIEQTAEAAKQKAGAAAQYAMDTAVAGKDKTGSLLVQAGETVKGAAVGAKDAVMNTIGMGGGTNGSTDVPAKDTSTYKPGTRDY

SEQ ID NO: 14927 - DNA, 1207 bp, Triticum aestivum
  misc_feature (1)..(1207): Ceres Seq. ID no. 13584480
aggaagccacactcccgcagctgcagcgaatttacactgcaggtcgaggctagctgagatccatggcgtcgagcagggcgatcttggccatgggcctccttgccgccgtgctgtcccccgccttgtcaaagcggtcgtttatctccatgccagccgacgtgagtagtcctgtgaccctggccaacggcctctcctacggttaccacgccaactcctgcccgcagctgcaagacattgtgtggccgatcgtggagagcgcggtcctgggtgaggtggccatcgccgccggcctcctccgtatcttcttccacgactgctttcctcagggctgcgacgcgtccgtccttctgacgggacccaacagcgagcgggacctgccgccgaaccagacgctgcagccgcgtgcgatgcagctcatcgaggacgtccgcgtcaaggtacacgccgcctgtggcgccaccgtctcctgcgccgacatcatcgccctcgccacccgcgacgccgtcttcgtggccggggaaagcgaaatgttctacttctacgacctgccgctcggccggtttgacagcctcgagccggctaatagcagcgccgtcttcgacctcccgcagtccaccgccgacgccaacacgctcatcaacgtcttcaagagccgcaacctcgagccgatcgacctcgtcgcactctctggcgcgcacactgtcgggaaggcgcagtgcagctccttcaacaaccgcttctccgaggacgccgacttcgcccggaggctcgccgccaactgctccagcgacccgaaccggctgcaggacctcgacgtggaaacccccatcgtgttggacaaccagtacttcaaaaacctgatggagggaaagggggtgttcacctccgaccaagtgctcatcagcgacgggcgcaccgactgggcggtcaaaggcctcgccgagaacaaatattggttctacagccagttccgtgactccttggtgaagctgagtcagtaccaacccggaggaaacgtgggcgagatccgccgcaacagctgcttcacgcccaacggacagagcattcccgccaccgccggtgacgaggggttcgcagcctctgcttgagttcaccgctcactacgggatcgtcgtttagtttgcttgtagtaagagtataagctcgtgtgtactctgcttcgttcaatcctctttcatgatggctc

SEQ ID NO: 14928 - protein, 348 aa, Triticum aestivum
  peptide (1)..(348): Ceres Seq. ID no. 13584481
  misc_feature (63)..(295): Pfam Name: Pfam Description:  Peroxidase
  misc_feature (7)..(348): NCBI GI NO: 5777628 NR Description: CAA303716.1 protein [Oryza sativa]
  misc_feature (33)..(348): NCBI GI NO: 38345511 NR Description: OSJNBa0039K24.14
  misc_feature (43)..(348): NCBI GI NO: 5777624 NR Description: CAA303712.1 protein [Oryza sativa]
  misc_feature (12)..(347): NCBI GI NO: 38345508 NR Description: OSJNBa0039K24.10
  misc_feature (10)..(348): NCBI GI NO: 38345506 NR Description: OSJNBa0039K24.4
  misc_feature (10)..(348): NCBI GI NO: 5777627 NR Description: CAA303715.1 protein [Oryza sativa]
  misc_feature (11)..(348): NCBI GI NO: 38345507 NR Description: OSJNBa0039K24.8
  misc_feature (15)..(348): NCBI GI NO: 7433075 NR Description: probable peroxidase (EC 1
  misc_feature (10)..(334): NCBI GI NO: 7433070 NR Description: probable peroxidase (EC 1.11.1.7), cationic - rice
  misc_feature (10)..(348): NCBI GI NO: 5777629 NR Description: CAA303717.1 protein [Oryza sativa]
MASSRAILAMGLLAAVLSPALSKRSFISMPADVSSPVTLANGLSYGYHANSCPQLQDIVWPIVESAVLGEVAIAAGLLRIFFHDCFPQGCDASVLLTGPNSERDLPPNQTLQPRAMQLIEDVRVKVHAACGATVSCADIIALATRDAVFVAGESEMFYFYDLPLGRFDSLEPANSSAVFDLPQSTADANTLINVFKSRNLEPIDLVALSGAHTVGKAQCSSFNNRFSEDADFARRLAANCSSDPNRLQDLDVETPIVLDNQYFKNLMEGKGVFTSDQVLISDGRTDWAVKGLAENKYWFYSQFRDSLVKLSQYQPGGNVGEIRRNSCFTPNGQSIPATAGDEGFAASA

SEQ ID NO: 14929 - protein, 339 aa, Triticum aestivum
  peptide (1)..(339): Ceres Seq. ID no. 13584482
  misc_feature (54)..(286): Pfam Name: Pfam Description:  Peroxidase
  misc_feature (1)..(339): NCBI GI NO: 5777628 NR Description: CAA303716.1 protein [Oryza sativa]
  misc_feature (24)..(339): NCBI GI NO: 38345511 NR Description: OSJNBa0039K24.14
  misc_feature (34)..(339): NCBI GI NO: 5777624 NR Description: CAA303712.1 protein [Oryza sativa]
  misc_feature (3)..(338): NCBI GI NO: 38345508 NR Description: OSJNBa0039K24.10
  misc_feature (1)..(339): NCBI GI NO: 38345506 NR Description: OSJNBa0039K24.4
  misc_feature (1)..(339): NCBI GI NO: 5777627 NR Description: CAA303715.1 protein [Oryza sativa]
  misc_feature (2)..(339): NCBI GI NO: 38345507 NR Description: OSJNBa0039K24.8
  misc_feature (6)..(339): NCBI GI NO: 7433075 NR Description: probable peroxidase (EC 1
  misc_feature (1)..(325): NCBI GI NO: 7433070 NR Description: probable peroxidase (EC 1.11.1.7), cationic - rice
  misc_feature (1)..(339): NCBI GI NO: 5777629 NR Description: CAA303717.1 protein [Oryza sativa]
MGLLAAVLSPALSKRSFISMPADVSSPVTLANGLSYGYHANSCPQLQDIVWPIVESAVLGEVAIAAGLLRIFFHDCFPQGCDASVLLTGPNSERDLPPNQTLQPRAMQLIEDVRVKVHAACGATVSCADIIALATRDAVFVAGESEMFYFYDLPLGRFDSLEPANSSAVFDLPQSTADANTLINVFKSRNLEPIDLVALSGAHTVGKAQCSSFNNRFSEDADFARRLAANCSSDPNRLQDLDVETPIVLDNQYFKNLMEGKGVFTSDQVLISDGRTDWAVKGLAENKYWFYSQFRDSLVKLSQYQPGGNVGEIRRNSCFTPNGQSIPATAGDEGFAASA

SEQ ID NO: 14930 - protein, 320 aa, Triticum aestivum
  peptide (1)..(320): Ceres Seq. ID no. 13584483
  misc_feature (35)..(267): Pfam Name: Pfam Description:  Peroxidase
  misc_feature (1)..(320): NCBI GI NO: 5777628 NR Description: CAA303716.1 protein [Oryza sativa]
  misc_feature (5)..(320): NCBI GI NO: 38345511 NR Description: OSJNBa0039K24.14
  misc_feature (15)..(320): NCBI GI NO: 5777624 NR Description: CAA303712.1 protein [Oryza sativa]
  misc_feature (1)..(319): NCBI GI NO: 38345508 NR Description: OSJNBa0039K24.10
  misc_feature (1)..(320): NCBI GI NO: 38345506 NR Description: OSJNBa0039K24.4
  misc_feature (1)..(320): NCBI GI NO: 5777627 NR Description: CAA303715.1 protein [Oryza sativa]
  misc_feature (1)..(320): NCBI GI NO: 38345507 NR Description: OSJNBa0039K24.8
  misc_feature (1)..(320): NCBI GI NO: 7433075 NR Description: probable peroxidase (EC 1
  misc_feature (1)..(306): NCBI GI NO: 7433070 NR Description: probable peroxidase (EC 1.11.1.7), cationic - rice
  misc_feature (1)..(320): NCBI GI NO: 5777629 NR Description: CAA303717.1 protein [Oryza sativa]
MPADVSSPVTLANGLSYGYHANSCPQLQDIVWPIVESAVLGEVAIAAGLLRIFFHDCFPQGCDASVLLTGPNSERDLPPNQTLQPRAMQLIEDVRVKVHAACGATVSCADIIALATRDAVFVAGESEMFYFYDLPLGRFDSLEPANSSAVFDLPQSTADANTLINVFKSRNLEPIDLVALSGAHTVGKAQCSSFNNRFSEDADFARRLAANCSSDPNRLQDLDVETPIVLDNQYFKNLMEGKGVFTSDQVLISDGRTDWAVKGLAENKYWFYSQFRDSLVKLSQYQPGGNVGEIRRNSCFTPNGQSIPATAGDEGFAASA

SEQ ID NO: 14931 - DNA, 1324 bp, Triticum aestivum
  misc_feature (1)..(1324): Ceres Seq. ID no. 15179784
acgaattcccctcccctccccgctaaccccgccgcatggaaaacgcaggcccggcaggggatccgcccggcgaatccatcgaatccccgctcctgcccgcgccggagaccaagatgccgccaccggtgccggccgtccggctcggggcgccgccgccgcccccgtgcctcaggacccacggggccaagatggcgcgccggcacatgtacgactggatcgtgctgctcctcctcgccgccatcgaggtcgcgctcaacctcatcacgcccttccaccgcttcgtcgccgagttcatgatggaggacctccgctaccccatgaagcccaacaccatccccgtctgggccgtcccgatatacgccgtcatcctgccgatgctcatcttcgccgccatctatgtcaagaagaagaatgcctacgacctgcatcacgccatactaggcctgctgttctccgtgctcatcaccggcgtcctcaccgatgcgatcaaggacggcgtcggccggcctcgccccaacttctactatcgatgctttcctgacggagtgccgaactatgaggcggtcactcgacaagtcatatgccacggagacgcaaaagtcatcaaagaagggcacaagagcttccccagtggccacacttcatggtcctttgccgggctgggcttcctgtcgtggtaccttgccggcaagatcagggtgtttgaccggggcggacacattgccaagctctgtgtcgtgatcctgccactgctcttcgctgcgatggtcggcgtgtcgcgggtcgcagactactggcaccactggcgggacgtgtttgccggtgggatcctcgggctggttgttgcttcgttctgctatctgcagttcttcccgcatccggctagcaaacacgggctgtggcctcatgcattccggcatcaggatcctaacccggaaactgagaaccaaggaacaacagatccccatcagtcggtgctgccgtccatggtacaacatgttgcctccatggagatgagaaccaatggccgagcgttggataacatggaggctggcagcggcagagcctggtaactgaatacgaccaccatggggatggggccaggcacgcaccaccatgagagacatcaccttgtaggtaggtaggtactagtagaactcttgttttgtagtatatgtttcttgtaaagacaaatgaaattgcgcgatttggttcgttgttggaccgaagtagatctagtccttgagttttcagaatcaatccgttgatctagtcctaaacaagtgcattttctgttcatgcaaatgcagtatatacttttgcc

SEQ ID NO: 14932 - protein, 345 aa, Triticum aestivum
  peptide (1)..(345): Ceres Seq. ID no. 15179785
  misc_feature (107)..(282): Pfam Name: Pfam Description:  PAP2 superfamily
  misc_feature (31)..(310): NCBI GI NO: 34910912 NR Description: putative phosphatidic acid phosphatase beta
  misc_feature (31)..(340): NCBI GI NO: 38637528 NR Description: unknown protein
  misc_feature (31)..(294): NCBI GI NO: 20161571 NR Description: putative phosphatidic acid phosphatase beta
  misc_feature (47)..(340): NCBI GI NO: 38637527 NR Description: putative phosphatidic acid phosphatase beta
  misc_feature (31)..(293): NCBI GI NO: 15218051 NR Description: phosphatidic acid phosphatase (PAP2) family
  misc_feature (47)..(293): NCBI GI NO: 9621903 NR Description: phosphatidic acid phosphatase alpha
  misc_feature (45)..(293): NCBI GI NO: 6957723 NR Description: putative phosphatidate phosphohydrolase
  misc_feature (45)..(293): NCBI GI NO: 18396250 NR Description: phosphatidic acid phosphatase (PAP2) family
  misc_feature (31)..(328): NCBI GI NO: 10673973 NR Description: phosphatidic acid phosphatase beta
  misc_feature (45)..(344): NCBI GI NO: 15724220 NR Description: At2g01180/F10A8.6 [Arabidopsis thaliana]
MENAGPAGDPPGESIESPLLPAPETKMPPPVPAVRLGAPPPPPCLRTHGAKMARRHMYDWIVLLLLAAIEVALNLITPFHRFVAEFMMEDLRYPMKPNTIPVWAVPIYAVILPMLIFAAIYVKKKNAYDLHHAILGLLFSVLITGVLTDAIKDGVGRPRPNFYYRCFPDGVPNYEAVTRQVICHGDAKVIKEGHKSFPSGHTSWSFAGLGFLSWYLAGKIRVFDRGGHIAKLCVVILPLLFAAMVGVSRVADYWHHWRDVFAGGILGLVVASFCYLQFFPHPASKHGLWPHAFRHQDPNPETENQGTTDPHQSVLPSMVQHVASMEMRTNGRALDNMEAGSGRAW

SEQ ID NO: 14933 - protein, 319 aa, Triticum aestivum
  peptide (1)..(319): Ceres Seq. ID no. 15179786
  misc_feature (81)..(256): Pfam Name: Pfam Description:  PAP2 superfamily
  misc_feature (5)..(284): NCBI GI NO: 34910912 NR Description: putative phosphatidic acid phosphatase beta
  misc_feature (5)..(314): NCBI GI NO: 38637528 NR Description: unknown protein
  misc_feature (5)..(268): NCBI GI NO: 20161571 NR Description: putative phosphatidic acid phosphatase beta
  misc_feature (21)..(314): NCBI GI NO: 38637527 NR Description: putative phosphatidic acid phosphatase beta
  misc_feature (5)..(267): NCBI GI NO: 15218051 NR Description: phosphatidic acid phosphatase (PAP2) family
  misc_feature (21)..(267): NCBI GI NO: 9621903 NR Description: phosphatidic acid phosphatase alpha
  misc_feature (19)..(267): NCBI GI NO: 6957723 NR Description: putative phosphatidate phosphohydrolase
  misc_feature (19)..(267): NCBI GI NO: 18396250 NR Description: phosphatidic acid phosphatase (PAP2) family
  misc_feature (5)..(302): NCBI GI NO: 10673973 NR Description: phosphatidic acid phosphatase beta
  misc_feature (19)..(318): NCBI GI NO: 15724220 NR Description: At2g01180/F10A8.6 [Arabidopsis thaliana]
MPPPVPAVRLGAPPPPPCLRTHGAKMARRHMYDWIVLLLLAAIEVALNLITPFHRFVAEFMMEDLRYPMKPNTIPVWAVPIYAVILPMLIFAAIYVKKKNAYDLHHAILGLLFSVLITGVLTDAIKDGVGRPRPNFYYRCFPDGVPNYEAVTRQVICHGDAKVIKEGHKSFPSGHTSWSFAGLGFLSWYLAGKIRVFDRGGHIAKLCVVILPLLFAAMVGVSRVADYWHHWRDVFAGGILGLVVASFCYLQFFPHPASKHGLWPHAFRHQDPNPETENQGTTDPHQSVLPSMVQHVASMEMRTNGRALDNMEAGSGRAW

SEQ ID NO: 14934 - protein, 294 aa, Triticum aestivum
  peptide (1)..(294): Ceres Seq. ID no. 15179787
  misc_feature (56)..(231): Pfam Name: Pfam Description:  PAP2 superfamily
  misc_feature (1)..(259): NCBI GI NO: 34910912 NR Description: putative phosphatidic acid phosphatase beta
  misc_feature (1)..(289): NCBI GI NO: 38637528 NR Description: unknown protein
  misc_feature (1)..(243): NCBI GI NO: 20161571 NR Description: putative phosphatidic acid phosphatase beta
  misc_feature (1)..(289): NCBI GI NO: 38637527 NR Description: putative phosphatidic acid phosphatase beta
  misc_feature (1)..(242): NCBI GI NO: 15218051 NR Description: phosphatidic acid phosphatase (PAP2) family
  misc_feature (1)..(242): NCBI GI NO: 9621903 NR Description: phosphatidic acid phosphatase alpha
  misc_feature (1)..(242): NCBI GI NO: 6957723 NR Description: putative phosphatidate phosphohydrolase
  misc_feature (1)..(242): NCBI GI NO: 18396250 NR Description: phosphatidic acid phosphatase (PAP2) family
  misc_feature (1)..(277): NCBI GI NO: 10673973 NR Description: phosphatidic acid phosphatase beta
  misc_feature (1)..(293): NCBI GI NO: 15724220 NR Description: At2g01180/F10A8.6 [Arabidopsis thaliana]
MARRHMYDWIVLLLLAAIEVALNLITPFHRFVAEFMMEDLRYPMKPNTIPVWAVPIYAVILPMLIFAAIYVKKKNAYDLHHAILGLLFSVLITGVLTDAIKDGVGRPRPNFYYRCFPDGVPNYEAVTRQVICHGDAKVIKEGHKSFPSGHTSWSFAGLGFLSWYLAGKIRVFDRGGHIAKLCVVILPLLFAAMVGVSRVADYWHHWRDVFAGGILGLVVASFCYLQFFPHPASKHGLWPHAFRHQDPNPETENQGTTDPHQSVLPSMVQHVASMEMRTNGRALDNMEAGSGRAW

SEQ ID NO: 14935 - DNA, 1235 bp, Triticum aestivum
  misc_feature (1)..(1235): Ceres Seq. ID no. 13597519
atcctacactgagtttagctagatcaatttgtgagcttagcatatctgcgatggcttccaggacatggcatttcttgctcgccctcttcctcctgtcctccgctgcgtatgggcagctctcgccgtccttctacgccacgagctgccccctgctggagctcaccgtgcgcgccaccatgatcgctgcgctcctcgccgagcgccgaatgggcgcctccctcctcaggctccacttccatgactgctttgttcaaggctgtgacggatccattcttctggatgacgtgggcagcttcgtcggcgagaagacggccttcccgaacgtgaactccgtgcgcggctacgaggtgatcgaccggatcaaggccaacgtggagctgctctgccccggcgtcgtctcctgtgccgacatcgtcgccctcgcagcacgcgacggcacgtttctgctaggcgggccgagctgggcggtgccgctgggccggcgggactcgacgacggcgagcctggcggaggcgaacgccgacctcccggggccgacgctgaacctcgaccagctcatccgcgcgttcgacaagaagcagctgaccccgcgggacctgacggcgctgtcgggcgcgcacaccatcggcttctcgcagtgccagttcttccgcggccacatctacaacgacaccaacatcgacccggcgttcgcggcgctgcgccggcaggcatgccccgccgcggcccccgccggcgactccaacctggcgcccttcgacgcgcagacccagctcgtcttcgacaacgcctactaccgcaacctagtcgcccaacgcggcctgctgcactcggatcaggagctcttcaacggcgcctcccaggatgcgctggtgcgccagtacggctccaacccggcgctcttcgccgccgacttcgtggccgccatgatcaagatgggcaacatcgcccccctcaccgggtccagcggccagatcaggcgcaactgcagggtcgtcaacagctagctgattggtcgtctaaatgatcaattgatcatgctacgtgatgatggagatgtctcaagtttggttggctacgaaggtaaccaaccagcatgcatgcatggcagaataagagccgtttggttcaggtttagatgattgttgcctttgtccgtgcttcatcatgtaagttgccggtctctgcagtactactatcatggaaatcaagcaactctcgaatgtgtatttgcc

SEQ ID NO: 14936 - protein, 334 aa, Triticum aestivum
  peptide (1)..(334): Ceres Seq. ID no. 13597520
  misc_feature (55)..(297): Pfam Name: Pfam Description:  Peroxidase
  misc_feature (25)..(333): NCBI GI NO: 5453379 NR Description: bacterial-induced peroxidase precursor
  misc_feature (26)..(333): NCBI GI NO: 7433047 NR Description: probable peroxidase (EC 1
  misc_feature (24)..(333): NCBI GI NO: 577503 NR Description: cationic peroxidase
  misc_feature (27)..(333): NCBI GI NO: 7433049 NR Description: peroxidase (EC 1.11.1.7) - flax (fragment)
  misc_feature (17)..(334): NCBI GI NO: 520568 NR Description: peroxidase
  misc_feature (24)..(333): NCBI GI NO: 7433048 NR Description: probable peroxidase (EC 1
  misc_feature (24)..(333): NCBI GI NO: 6093671 NR Description: Cationic peroxidase 1 precursor (PNPC1)
  misc_feature (24)..(333): NCBI GI NO: 5381253 NR Description: peroxidase [Nicotiana tabacum]
  misc_feature (24)..(333): NCBI GI NO: 99872 NR Description: peroxidase (EC 1
  misc_feature (17)..(333): NCBI GI NO: 28400798 NR Description: peroxidase [Asparagus officinalis]
PTLSLARSICELSISAMASRTWHFLLALFLLSSAAYGQLSPSFYATSCPLLELTVRATMIAALLAERRMGASLLRLHFHDCFVQGCDGSILLDDVGSFVGEKTAFPNVNSVRGYEVIDRIKANVELLCPGVVSCADIVALAARDGTFLLGGPSWAVPLGRRDSTTASLAEANADLPGPTLNLDQLIRAFDKKQLTPRDLTALSGAHTIGFSQCQFFRGHIYNDTNIDPAFAALRRQACPAAAPAGDSNLAPFDAQTQLVFDNAYYRNLVAQRGLLHSDQELFNGASQDALVRQYGSNPALFAADFVAAMIKMGNIAPLTGSSGQIRRNCRVVNS

SEQ ID NO: 14937 - protein, 318 aa, Triticum aestivum
  peptide (1)..(318): Ceres Seq. ID no. 13597521
  misc_feature (39)..(281): Pfam Name: Pfam Description:  Peroxidase
  misc_feature (9)..(317): NCBI GI NO: 5453379 NR Description: bacterial-induced peroxidase precursor
  misc_feature (10)..(317): NCBI GI NO: 7433047 NR Description: probable peroxidase (EC 1
  misc_feature (8)..(317): NCBI GI NO: 577503 NR Description: cationic peroxidase
  misc_feature (11)..(317): NCBI GI NO: 7433049 NR Description: peroxidase (EC 1.11.1.7) - flax (fragment)
  misc_feature (1)..(318): NCBI GI NO: 520568 NR Description: peroxidase
  misc_feature (8)..(317): NCBI GI NO: 7433048 NR Description: probable peroxidase (EC 1
  misc_feature (8)..(317): NCBI GI NO: 6093671 NR Description: Cationic peroxidase 1 precursor (PNPC1)
  misc_feature (8)..(317): NCBI GI NO: 5381253 NR Description: peroxidase [Nicotiana tabacum]
  misc_feature (8)..(317): NCBI GI NO: 99872 NR Description: peroxidase (EC 1
  misc_feature (1)..(317): NCBI GI NO: 28400798 NR Description: peroxidase [Asparagus officinalis]
MASRTWHFLLALFLLSSAAYGQLSPSFYATSCPLLELTVRATMIAALLAERRMGASLLRLHFHDCFVQGCDGSILLDDVGSFVGEKTAFPNVNSVRGYEVIDRIKANVELLCPGVVSCADIVALAARDGTFLLGGPSWAVPLGRRDSTTASLAEANADLPGPTLNLDQLIRAFDKKQLTPRDLTALSGAHTIGFSQCQFFRGHIYNDTNIDPAFAALRRQACPAAAPAGDSNLAPFDAQTQLVFDNAYYRNLVAQRGLLHSDQELFNGASQDALVRQYGSNPALFAADFVAAMIKMGNIAPLTGSSGQIRRNCRVVNS

SEQ ID NO: 14938 - protein, 276 aa, Triticum aestivum
  peptide (1)..(276): Ceres Seq. ID no. 13597522
  misc_feature (1)..(239): Pfam Name: Pfam Description:  Peroxidase
  misc_feature (1)..(275): NCBI GI NO: 5453379 NR Description: bacterial-induced peroxidase precursor
  misc_feature (1)..(275): NCBI GI NO: 7433047 NR Description: probable peroxidase (EC 1
  misc_feature (1)..(275): NCBI GI NO: 577503 NR Description: cationic peroxidase
  misc_feature (1)..(275): NCBI GI NO: 7433049 NR Description: peroxidase (EC 1.11.1.7) - flax (fragment)
  misc_feature (1)..(276): NCBI GI NO: 520568 NR Description: peroxidase
  misc_feature (1)..(275): NCBI GI NO: 7433048 NR Description: probable peroxidase (EC 1
  misc_feature (1)..(275): NCBI GI NO: 6093671 NR Description: Cationic peroxidase 1 precursor (PNPC1)
  misc_feature (1)..(275): NCBI GI NO: 5381253 NR Description: peroxidase [Nicotiana tabacum]
  misc_feature (1)..(275): NCBI GI NO: 99872 NR Description: peroxidase (EC 1
  misc_feature (1)..(275): NCBI GI NO: 28400798 NR Description: peroxidase [Asparagus officinalis]
MIAALLAERRMGASLLRLHFHDCFVQGCDGSILLDDVGSFVGEKTAFPNVNSVRGYEVIDRIKANVELLCPGVVSCADIVALAARDGTFLLGGPSWAVPLGRRDSTTASLAEANADLPGPTLNLDQLIRAFDKKQLTPRDLTALSGAHTIGFSQCQFFRGHIYNDTNIDPAFAALRRQACPAAAPAGDSNLAPFDAQTQLVFDNAYYRNLVAQRGLLHSDQELFNGASQDALVRQYGSNPALFAADFVAAMIKMGNIAPLTGSSGQIRRNCRVVNS

SEQ ID NO: 14939 - DNA, 1077 bp, Triticum aestivum
  misc_feature (1)..(1077): Ceres Seq. ID no. 12617991
aacctccattgctgcgtgctcccttcctcctctctaaccaagcacctcctcttgcgctgcgggtgctggctacctagaggtggcgtgctggatggtcgctgaggcggtcgggttcatgatgtcccgcgcggcggacggcggcaccatggcgccggagctcgtcacccgggacttcctcggcggctgccaggcgcccgcccccggcgatgaccccaggcacgacgcggccgcccggcacgactccgtcatgcccggcaagccaccgctgcagaagcaccggagcccgccgccgtcggccaggggggacctcaacctcttccccgcctccggcgccgccatggcgccactgccgacgatggcgccggcggcggactgcgccgccaccaccacgtaccacagcgtgtgcacgatcgagaaggtcaagaccgcgctggagcggttcgagcgcgggaagcaggggcaggggcagcaccaccaccagcagcagcacagcggcgcgggcgcgaccgcgggcgcctccccgtcctcctcctcggtcaccacgtcctccgtcaagcgccgcggggacgccggcgccgtggagcagggcgacggctgcgactccccgtccgcgggcgggggcatggtggccgccgcatgcccgcgctgcttcctctacgtgctcatcgcccggagcgacccccgctgcccgcgctgcgagtcgcacgtgccgccacccccggccccggcgcccaagaagaagccgcggatcgacctcaacgtcggcttcctcggaacctagccatgccaagccaagaagaagtaggtcaagatggttgtcgtccgtcctcgtcctcgtcctcgtcctcggcgcgttaggtaggcagcaggcctccggtgctcggattggccacgacgacgccattgtttttctgatgccaccgacggattccggtacataggggaggcgctccagatttttgcttgtccatttccaagtatggccggccgtccgtccgtccgtccccgattctgtcatgtcagatcaatcaaacactcgacagaacatgaatgaatgaaactactattcctactggg

SEQ ID NO: 14940 - protein, 244 aa, Triticum aestivum
  peptide (1)..(244): Ceres Seq. ID no. 12617992
  misc_feature (1)..(202): Pfam Name: Pfam Description:  AF-4 proto-oncoprotein
  misc_feature (1)..(200): NCBI GI NO: 25143299 NR Description: pre-mRNA splicing SR protein related RSR-1 (68
  misc_feature (1)..(197): NCBI GI NO: 25143299 NR Description: pre-mRNA splicing SR protein related RSR-1 (68
  misc_feature (1)..(196): NCBI GI NO: 27375632 NR Description: blr0521 [Bradyrhizobium japonicum]
  misc_feature (1)..(195): NCBI GI NO: 40353727 NR Description: synaptopodin [Homo sapiens]
  misc_feature (1)..(195): NCBI GI NO: 40789025 NR Description: KIAA1029 protein [Homo sapiens]
  misc_feature (1)..(177): NCBI GI NO: 25989119 NR Description: unknown [Streptomyces aureofaciens]
  misc_feature (1)..(189): NCBI GI NO: 29250754 NR Description: GLP_49_64409_65443 [Giardia lamblia ATCC 50803]
  misc_feature (1)..(202): NCBI GI NO: 7949115 NR Description: Ser/Arg-related nuclear matrix protein
  misc_feature (1)..(196): NCBI GI NO: 23017082 NR Description: hypothetical protein [Thermobifida fusca]
  misc_feature (1)..(192): NCBI GI NO: 27375632 NR Description: blr0521 [Bradyrhizobium japonicum]
MTPGTTRPPGTTPSCPASHRCRSTGARRRRPGGTSTSSPPPAPPWRHCRRWRRRRTAPPPPRTTACARSRRSRPRWSGSSAGSRGRGSTTTSSSTAARARPRAPPRPPPRSPRPPSSAAGTPAPWSRATAATPRPRAGAWWPPHARAASSTCSSPGATPAARAASRTCRHPRPRRPRRSRGSTSTSASSEPSHAKPRRSRSRWLSSVLVLVLVLGALGRQQASGARIGHDDAIVFLMPPTDSGT

SEQ ID NO: 14941 - protein, 229 aa, Triticum aestivum
  peptide (1)..(229): Ceres Seq. ID no. 12617993
  misc_feature (17)..(223): NCBI GI NO: 38345608 NR Description: OSJNBa0093O08.10
  misc_feature (86)..(223): NCBI GI NO: 5852085 NR Description: zwh0008.1 [Oryza sativa (indica cultivar-group)]
  misc_feature (91)..(229): NCBI GI NO: 38605781 NR Description: OSJNBa0044K18.24
  misc_feature (119)..(206): NCBI GI NO: 34908532 NR Description: P0423B08.15
  misc_feature (167)..(224): NCBI GI NO: 18394369 NR Description: expressed protein; protein id: At1g16500
  misc_feature (179)..(224): NCBI GI NO: 7452060 NR Description: hypothetical protein YUP8H12R
MVAEAVGFMMSRAADGGTMAPELVTRDFLGGCQAPAPGDDPRHDAAARHDSVMPGKPPLQKHRSPPPSARGDLNLFPASGAAMAPLPTMAPAADCAATTTYHSVCTIEKVKTALERFERGKQGQGQHHHQQQHSGAGATAGASPSSSSVTTSSVKRRGDAGAVEQGDGCDSPSAGGGMVAAACPRCFLYVLIARSDPRCPRCESHVPPPPAPAPKKKPRIDLNVGFLGT

SEQ ID NO: 14942 - protein, 221 aa, Triticum aestivum
  peptide (1)..(221): Ceres Seq. ID no. 12617994
  misc_feature (9)..(215): NCBI GI NO: 38345608 NR Description: OSJNBa0093O08.10
  misc_feature (78)..(215): NCBI GI NO: 5852085 NR Description: zwh0008.1 [Oryza sativa (indica cultivar-group)]
  misc_feature (83)..(221): NCBI GI NO: 38605781 NR Description: OSJNBa0044K18.24
  misc_feature (111)..(198): NCBI GI NO: 34908532 NR Description: P0423B08.15
  misc_feature (159)..(216): NCBI GI NO: 18394369 NR Description: expressed protein; protein id: At1g16500
  misc_feature (171)..(216): NCBI GI NO: 7452060 NR Description: hypothetical protein YUP8H12R
MMSRAADGGTMAPELVTRDFLGGCQAPAPGDDPRHDAAARHDSVMPGKPPLQKHRSPPPSARGDLNLFPASGAAMAPLPTMAPAADCAATTTYHSVCTIEKVKTALERFERGKQGQGQHHHQQQHSGAGATAGASPSSSSVTTSSVKRRGDAGAVEQGDGCDSPSAGGGMVAAACPRCFLYVLIARSDPRCPRCESHVPPPPAPAPKKKPRIDLNVGFLGT

SEQ ID NO: 14943 - DNA, 902 bp, Triticum aestivum
  misc_feature (1)..(902): Ceres Seq. ID no. 12586454
aaaccacgcgaaggggaaacccaaattccatcccgacttctctacctctccggcctccacccaggagagccctaagccggaagcaccttacccttaagctctcttgacctctccccatggcgtccgcgtggtgcctcttggcgccggccgccgcgccggtggcggcgccgggcgctctcggcgtctccgcctccgaatccagaggcgtcttcgtcgcgcgggcggcggtccctgcgaggatgcggcgcaggtggggttcgctcgtggtgtgcgtagcccccgacgaggagaagattacgcggcgctcgcccctcgatttccccatcgaatgggagaaacctaagcctgggaggagacctgacatcttcccaaagttcagccctatgaaaacaccattgccccatccattaccagctgatgatcctttggatgatgatgaggaagaagaagaggaagaagcccaacctcaagaagaaccccaggaggatgatcctgacaaagaggatcctgaggaagatgacccagacaagccaattgagtaattttggatgaggtggcctgtggtagatagaaaccgtgtcgtattttccagagaatatgtggggtttgagctattcagaaatgttagtttgtgtcggcttatataggctctagacataagtttgctcagcaaggacctttgagcttttctgaagctatacaaattttgttccactagtttcaatatgaatttatatgtattcttctgaaaggtatttgcctatacgacacaataagctgttgaatgttcagtagttatgttcactgatttgatactccaatgtgctgaaagtgcattataagcaattaggtagttgtaatattggcaataacttggcatcagttagaatgacacattggtc

SEQ ID NO: 14944 - protein, 141 aa, Triticum aestivum
  peptide (1)..(141): Ceres Seq. ID no. 12586455
  misc_feature (5)..(137): NCBI GI NO: 18404214 NR Description: Expressed protein; protein id: At3g24506
  misc_feature (5)..(137): NCBI GI NO: 21553725 NR Description: unknown [Arabidopsis thaliana]
  misc_feature (20)..(138): NCBI GI NO: 18398354 NR Description: expressed protein; protein id: At2g17240
  misc_feature (53)..(137): NCBI GI NO: 26452533 NR Description: unknown protein [Arabidopsis thaliana]
MASAWCLLAPAAAPVAAPGALGVSASESRGVFVARAAVPARMRRRWGSLVVCVAPDEEKITRRSPLDFPIEWEKPKPGRRPDIFPKFSPMKTPLPHPLPADDPLDDDEEEEEEEAQPQEEPQEDDPDKEDPEEDDPDKPIE

SEQ ID NO: 14945 - protein, 100 aa, Triticum aestivum
  peptide (1)..(100): Ceres Seq. ID no. 12586456
  misc_feature (1)..(96): NCBI GI NO: 18404214 NR Description: Expressed protein; protein id: At3g24506
  misc_feature (1)..(96): NCBI GI NO: 21553725 NR Description: unknown [Arabidopsis thaliana]
  misc_feature (1)..(97): NCBI GI NO: 18398354 NR Description: expressed protein; protein id: At2g17240
  misc_feature (12)..(96): NCBI GI NO: 26452533 NR Description: unknown protein [Arabidopsis thaliana]
MRRRWGSLVVCVAPDEEKITRRSPLDFPIEWEKPKPGRRPDIFPKFSPMKTPLPHPLPADDPLDDDEEEEEEEAQPQEEPQEDDPDKEDPEEDDPDKPIE

SEQ ID NO: 14946 - DNA, 2075 bp, Triticum aestivum
  misc_feature (1)..(2075): Ceres Seq. ID no. 13591098
ctctctccgcttctattctcttcctgccaggctccgtccgtccgccaccgatccgtcatcccctctgcgcccccttctccggcagccgccgcccgcccgccgtcgacatcccccaggggtccgcccggccctccgccgcatcggccatggcgtcgccggcgctcatctccgacaccgaccagtggaaggccctccaggcgcacgtcggcgcgatccacaagacgcacctgcgcgacctcatgacggacgccgatcgatgcaaggcaatgacagccgaattcgagggcgtcttcctggactactcgaggcagcaggccaccacggagaccgtcgacaagctcttcaagctggcagaggctgcaaagctcaaggagaagattgacaagatgtttaaaggcgaaaagataaataccacggagaacagatcagtgctccatgtggctttgagagctccaagagatgcagtcataaacagtgacggtgtgaacgtggtccccgaagtttgggctgttaaggataaaatcaagcagttttcagagactttcaggagtggctcatgggttggggcaaccgggaaaccgttgacaaatgttgtctcagttggaattggtggcagcttccttggacctctgtttgtgcatacggctctccagactgacccagaagcagcagaatctgccaaaggccgacaactgagatttcttgcaaatgttgatccggttgatgttgcacggagcatcaaagatttagaccctgcaaccactcttgttgtggttgtctcaaagaccttcacgacagctgaaacaatgttaaatgctcgaactatcaaggagtggattgtctcttctcttggacctcaggctgtttccaaacacatgattgctgtcagtactaatcttaagcttgtcaaggagttcggaattgaccctaacaacgcctttgcattctgggactgggttggcggccgctatagtgtttgcagtgctgtcggtgttctgcccttatctcttcagtatggatttccaattgttcagaaatttctggagggtgcttccagcattgacaaccacttccacacatcttcatttgagaaaaatatacctgtactccttggtttgttgagtgtgtggaatgtttcatttcttggatatccggctagggcaatattgccatactctcaagcacttgagaaactagcaccacatattcagcagcttagcatggagagtaatggaaagggtgtctccattgatggtgttcgacttccatatgaggctggtgaaattgattttggtgaacctggaacaaacgggcaacacagcttctatcaattaatccatcagggaagagttattccttgtgattttattggtgtcataaaaagccagcagcctgtttacttgaaaggggaaacggttagcaatcatgatgagttgatgtccaatttctttgctcagcctgacgcacttgcttatggaaagactcctgaacaattacgcagcgagaaagttcccgaaaatcttatctctcacaagacttttcagggcaaccggccatcactgagtttcttgctgtcttcattatctgcctatgagattggacagcttttatccatctatgagcaccggatcgcagttcagggtttcatatggggaatcaactcgtttgaccagtggggagtggagctgggcaagtcactggcttctacagtgaggaaacagttgcatgcatcacgcatggaaggaaagcccgtcgagggcttcaaccccagcagcgcaagtttgctcacacggtttcttgcggttaaaccatcaaccccatatgacacaacagtgcttccaaaagtgtaagccgagggaggtttagtagtcctaaaaaaagaagtgtaacctgaggttgagactgataatcgacaagctatgttgagcttgtggcataacaagttttcttccttctttcttgcgacttgttacaaccagtctggttgtactgtaattttgaagttcctcttgcttcagcttggagaaagacaagtaaactatgacgaaataatgaaataaatatatcgactcgtg

SEQ ID NO: 14947 - protein, 615 aa, Triticum aestivum
  peptide (1)..(615): Ceres Seq. ID no. 13591099
  misc_feature (99)..(595): Pfam Name: Pfam Description:  Phosphoglucose isomerase
  misc_feature (49)..(615): NCBI GI NO: 1346073 NR Description: Glucose-6-phosphate isomerase, cytosolic
  misc_feature (49)..(615): NCBI GI NO: 34915218 NR Description: phosphoglucose isomerase (Pgi-a)
  misc_feature (49)..(615): NCBI GI NO: 1169797 NR Description: Glucose-6-phosphate isomerase, cytosolic A
  misc_feature (49)..(615): NCBI GI NO: 1169798 NR Description: Glucose-6-phosphate isomerase, cytosolic B
  misc_feature (49)..(615): NCBI GI NO: 2588816 NR Description: cytosolic phosphoglucose isomerase
  misc_feature (49)..(615): NCBI GI NO: 2588812 NR Description: cytosolic phosphoglucose isomerase
  misc_feature (49)..(615): NCBI GI NO: 1730169 NR Description: Glucose-6-phosphate isomerase, cytosolic 1
  misc_feature (49)..(615): NCBI GI NO: 1730181 NR Description: Glucose-6-phosphate isomerase, cytosolic
  misc_feature (49)..(615): NCBI GI NO: 2588806 NR Description: phosphoglucose isomerase [Dioscorea tokoro]
  misc_feature (49)..(615): NCBI GI NO: 2588808 NR Description: cytosolic phosphoglucose isomerase
LSASILFLPGSVRPPPIRHPLCAPFSGSRRPPAVDIPQGSARPSAASAMASPALISDTDQWKALQAHVGAIHKTHLRDLMTDADRCKAMTAEFEGVFLDYSRQQATTETVDKLFKLAEAAKLKEKIDKMFKGEKINTTENRSVLHVALRAPRDAVINSDGVNVVPEVWAVKDKIKQFSETFRSGSWVGATGKPLTNVVSVGIGGSFLGPLFVHTALQTDPEAAESAKGRQLRFLANVDPVDVARSIKDLDPATTLVVVVSKTFTTAETMLNARTIKEWIVSSLGPQAVSKHMIAVSTNLKLVKEFGIDPNNAFAFWDWVGGRYSVCSAVGVLPLSLQYGFPIVQKFLEGASSIDNHFHTSSFEKNIPVLLGLLSVWNVSFLGYPARAILPYSQALEKLAPHIQQLSMESNGKGVSIDGVRLPYEAGEIDFGEPGTNGQHSFYQLIHQGRVIPCDFIGVIKSQQPVYLKGETVSNHDELMSNFFAQPDALAYGKTPEQLRSEKVPENLISHKTFQGNRPSLSFLLSSLSAYEIGQLLSIYEHRIAVQGFIWGINSFDQWGVELGKSLASTVRKQLHASRMEGKPVEGFNPSSASLLTRFLAVKPSTPYDTTVLPKV

SEQ ID NO: 14948 - protein, 567 aa, Triticum aestivum
  peptide (1)..(567): Ceres Seq. ID no. 13591100
  misc_feature (51)..(547): Pfam Name: Pfam Description:  Phosphoglucose isomerase
  misc_feature (1)..(567): NCBI GI NO: 1346073 NR Description: Glucose-6-phosphate isomerase, cytosolic
  misc_feature (1)..(567): NCBI GI NO: 34915218 NR Description: phosphoglucose isomerase (Pgi-a)
  misc_feature (1)..(567): NCBI GI NO: 1169797 NR Description: Glucose-6-phosphate isomerase, cytosolic A
  misc_feature (1)..(567): NCBI GI NO: 1169798 NR Description: Glucose-6-phosphate isomerase, cytosolic B
  misc_feature (1)..(567): NCBI GI NO: 2588816 NR Description: cytosolic phosphoglucose isomerase
  misc_feature (1)..(567): NCBI GI NO: 2588812 NR Description: cytosolic phosphoglucose isomerase
  misc_feature (1)..(567): NCBI GI NO: 1730169 NR Description: Glucose-6-phosphate isomerase, cytosolic 1
  misc_feature (1)..(567): NCBI GI NO: 1730181 NR Description: Glucose-6-phosphate isomerase, cytosolic
  misc_feature (1)..(567): NCBI GI NO: 2588806 NR Description: phosphoglucose isomerase [Dioscorea tokoro]
  misc_feature (1)..(567): NCBI GI NO: 2588808 NR Description: cytosolic phosphoglucose isomerase
MASPALISDTDQWKALQAHVGAIHKTHLRDLMTDADRCKAMTAEFEGVFLDYSRQQATTETVDKLFKLAEAAKLKEKIDKMFKGEKINTTENRSVLHVALRAPRDAVINSDGVNVVPEVWAVKDKIKQFSETFRSGSWVGATGKPLTNVVSVGIGGSFLGPLFVHTALQTDPEAAESAKGRQLRFLANVDPVDVARSIKDLDPATTLVVVVSKTFTTAETMLNARTIKEWIVSSLGPQAVSKHMIAVSTNLKLVKEFGIDPNNAFAFWDWVGGRYSVCSAVGVLPLSLQYGFPIVQKFLEGASSIDNHFHTSSFEKNIPVLLGLLSVWNVSFLGYPARAILPYSQALEKLAPHIQQLSMESNGKGVSIDGVRLPYEAGEIDFGEPGTNGQHSFYQLIHQGRVIPCDFIGVIKSQQPVYLKGETVSNHDELMSNFFAQPDALAYGKTPEQLRSEKVPENLISHKTFQGNRPSLSFLLSSLSAYEIGQLLSIYEHRIAVQGFIWGINSFDQWGVELGKSLASTVRKQLHASRMEGKPVEGFNPSSASLLTRFLAVKPSTPYDTTVLPKV

SEQ ID NO: 14949 - protein, 536 aa, Triticum aestivum
  peptide (1)..(536): Ceres Seq. ID no. 13591101
  misc_feature (20)..(516): Pfam Name: Pfam Description:  Phosphoglucose isomerase
  misc_feature (1)..(536): NCBI GI NO: 1346073 NR Description: Glucose-6-phosphate isomerase, cytosolic
  misc_feature (1)..(536): NCBI GI NO: 34915218 NR Description: phosphoglucose isomerase (Pgi-a)
  misc_feature (1)..(536): NCBI GI NO: 1169797 NR Description: Glucose-6-phosphate isomerase, cytosolic A
  misc_feature (1)..(536): NCBI GI NO: 1169798 NR Description: Glucose-6-phosphate isomerase, cytosolic B
  misc_feature (1)..(536): NCBI GI NO: 2588816 NR Description: cytosolic phosphoglucose isomerase
  misc_feature (1)..(536): NCBI GI NO: 2588812 NR Description: cytosolic phosphoglucose isomerase
  misc_feature (1)..(536): NCBI GI NO: 1730169 NR Description: Glucose-6-phosphate isomerase, cytosolic 1
  misc_feature (1)..(536): NCBI GI NO: 1730181 NR Description: Glucose-6-phosphate isomerase, cytosolic
  misc_feature (1)..(536): NCBI GI NO: 2588806 NR Description: phosphoglucose isomerase [Dioscorea tokoro]
  misc_feature (1)..(536): NCBI GI NO: 2588808 NR Description: cytosolic phosphoglucose isomerase
MTDADRCKAMTAEFEGVFLDYSRQQATTETVDKLFKLAEAAKLKEKIDKMFKGEKINTTENRSVLHVALRAPRDAVINSDGVNVVPEVWAVKDKIKQFSETFRSGSWVGATGKPLTNVVSVGIGGSFLGPLFVHTALQTDPEAAESAKGRQLRFLANVDPVDVARSIKDLDPATTLVVVVSKTFTTAETMLNARTIKEWIVSSLGPQAVSKHMIAVSTNLKLVKEFGIDPNNAFAFWDWVGGRYSVCSAVGVLPLSLQYGFPIVQKFLEGASSIDNHFHTSSFEKNIPVLLGLLSVWNVSFLGYPARAILPYSQALEKLAPHIQQLSMESNGKGVSIDGVRLPYEAGEIDFGEPGTNGQHSFYQLIHQGRVIPCDFIGVIKSQQPVYLKGETVSNHDELMSNFFAQPDALAYGKTPEQLRSEKVPENLISHKTFQGNRPSLSFLLSSLSAYEIGQLLSIYEHRIAVQGFIWGINSFDQWGVELGKSLASTVRKQLHASRMEGKPVEGFNPSSASLLTRFLAVKPSTPYDTTVLPKV

SEQ ID NO: 14950 - DNA, 1539 bp, Triticum aestivum
  misc_feature (1)..(1539): Ceres Seq. ID no. 15225826
tttttcgccacagatattcccaaagcatctcctttctttccccgttgctctcctcctcggattcctcttcccctgccccctcctccctcctactctgctcctacccgcccgtattattcttcccttccccctctctctctgcttttccctcgtgcccgatcttcccaccagcactccagcagagcgccagttctgccaaggaaacgccggaggcgggccggcatgcgcgtggacgacgccgacaagcccgattctgcagacgccggagcggagaagcccgccgagctcccctcgcctcatatggagagtgtttgcgagaacaccacaactgctgatttcaagcagagtaactttggaaatttccttccaaatgttagatcaggcggttggtcagatattggaagtcgccagtacatggaagatacccatgtgtgtattgccgatctagctaaaaactttggttatccaacagtggataaagaagttgtttccttttatggggtctttgatgggcatggtggaaaagatgctgcccatttcgttcgcgataatctgccaagggtcattgtggaagatgctgattttcctctggagcttgagaaagtagtgagcagatcctttgtgcagattgatagtcagtttgccgataaatgctctcaccagagaactctgtcgtccggcacaacggcacttacagcaatgatttttggaaggtcccttctggtcgcgaacgctggtgattgcagagcagtactttcccggtgtggcatcgcaatggagatgtcgatggaccacaggccctgcagcctcagcgaaaagctgcgggtcgagtcgctcggtggctacgtggacgacggctacctgaacggtctgctgggagtcaccagagccctcggcgactggcacctcgagggaatgaaggaggccagcaggcccgggggaggccccctgagcgcggagccggagatcaagctgaccacgctgaccaaggacgacgagttcctggtgatcggcagcgacgggctgtgggacgtcttctcgaaccagaacgccgtggacttcgcccggcggcgcctccaggagcacaacgacgtgaagcgctgctgcagggagatcgtcgaggaggcgataaggcgcggagccacagacaatttaacagcagtgctggtctcattccacctggtggcgcctcctcagatcagagtgaatcagccacgtagggtggcgcggagcatctcggccgacgggctcaacagcctcaggatactcctgggaagccaatgacggcgctcttctcgtgccgccgtgatcaggtgctgtgccggtgcttgctgagctctaattgtatgtagtcgtgtccgtgcttcgttgttgatgttgttagctgctgttatgttaccccattgttgttgaggcagtggctgttattcttgttggtaattaagccaacgaacatgtgagctcatagttgtgagcatttcttagctgctggaaactaggcatgtcctggtgaagaggctgcgtgccttgctgtgctgt

SEQ ID NO: 14951 - protein, 427 aa, Triticum aestivum
  peptide (1)..(427): Ceres Seq. ID no. 15225827
  misc_feature (125)..(385): Pfam Name: Pfam Description:  Protein phosphatase 2C
  misc_feature (101)..(427): NCBI GI NO: 24413992 NR Description: putative DNA-binding protein phosphatase 2C
  misc_feature (101)..(424): NCBI GI NO: 21693562 NR Description: DNA-binding protein phosphatase 2C
  misc_feature (121)..(424): NCBI GI NO: 20146108 NR Description: protein phosphatase 2C
  misc_feature (115)..(424): NCBI GI NO: 15224766 NR Description: protein phosphatase 2C (PP2C), putative
  misc_feature (121)..(424): NCBI GI NO: 15226152 NR Description: protein phosphatase 2C (PP2C)
  misc_feature (121)..(426): NCBI GI NO: 10140768 NR Description: putative protein phosphatase-2C [Oryza sativa]
  misc_feature (121)..(426): NCBI GI NO: 37536524 NR Description: putative protein phosphatase-2C
  misc_feature (121)..(424): NCBI GI NO: 15230495 NR Description: protein phosphatase 2C (PP2C), putative
  misc_feature (121)..(424): NCBI GI NO: 25352221 NR Description: phosphoprotein phosphatase (EC 3.1.3.16) 2C
  misc_feature (63)..(421): NCBI GI NO: 34894410 NR Description: putative protein phosphatase
FFATDIPKASPFFPRCSPPRIPLPLPPPPSYSAPTRPYYSSLPPLSLLFPRARSSHQHSSRAPVLPRKRRRRAGMRVDDADKPDSADAGAEKPAELPSPHMESVCENTTTADFKQSNFGNFLPNVRSGGWSDIGSRQYMEDTHVCIADLAKNFGYPTVDKEVVSFYGVFDGHGGKDAAHFVRDNLPRVIVEDADFPLELEKVVSRSFVQIDSQFADKCSHQRTLSSGTTALTAMIFGRSLLVANAGDCRAVLSRCGIAMEMSMDHRPCSLSEKLRVESLGGYVDDGYLNGLLGVTRALGDWHLEGMKEASRPGGGPLSAEPEIKLTTLTKDDEFLVIGSDGLWDVFSNQNAVDFARRRLQEHNDVKRCCREIVEEAIRRGATDNLTAVLVSFHLVAPPQIRVNQPRRVARSISADGLNSLRILLGSQ

SEQ ID NO: 14952 - protein, 353 aa, Triticum aestivum
  peptide (1)..(353): Ceres Seq. ID no. 15225828
  misc_feature (51)..(311): Pfam Name: Pfam Description:  Protein phosphatase 2C
  misc_feature (27)..(353): NCBI GI NO: 24413992 NR Description: putative DNA-binding protein phosphatase 2C
  misc_feature (27)..(350): NCBI GI NO: 21693562 NR Description: DNA-binding protein phosphatase 2C
  misc_feature (47)..(350): NCBI GI NO: 20146108 NR Description: protein phosphatase 2C
  misc_feature (41)..(350): NCBI GI NO: 15224766 NR Description: protein phosphatase 2C (PP2C), putative
  misc_feature (47)..(350): NCBI GI NO: 15226152 NR Description: protein phosphatase 2C (PP2C)
  misc_feature (47)..(352): NCBI GI NO: 10140768 NR Description: putative protein phosphatase-2C [Oryza sativa]
  misc_feature (47)..(352): NCBI GI NO: 37536524 NR Description: putative protein phosphatase-2C
  misc_feature (47)..(350): NCBI GI NO: 15230495 NR Description: protein phosphatase 2C (PP2C), putative
  misc_feature (47)..(350): NCBI GI NO: 25352221 NR Description: phosphoprotein phosphatase (EC 3.1.3.16) 2C
  misc_feature (1)..(347): NCBI GI NO: 34894410 NR Description: putative protein phosphatase
MRVDDADKPDSADAGAEKPAELPSPHMESVCENTTTADFKQSNFGNFLPNVRSGGWSDIGSRQYMEDTHVCIADLAKNFGYPTVDKEVVSFYGVFDGHGGKDAAHFVRDNLPRVIVEDADFPLELEKVVSRSFVQIDSQFADKCSHQRTLSSGTTALTAMIFGRSLLVANAGDCRAVLSRCGIAMEMSMDHRPCSLSEKLRVESLGGYVDDGYLNGLLGVTRALGDWHLEGMKEASRPGGGPLSAEPEIKLTTLTKDDEFLVIGSDGLWDVFSNQNAVDFARRRLQEHNDVKRCCREIVEEAIRRGATDNLTAVLVSFHLVAPPQIRVNQPRRVARSISADGLNSLRILLGSQ

SEQ ID NO: 14953 - protein, 327 aa, Triticum aestivum
  peptide (1)..(327): Ceres Seq. ID no. 15225829
  misc_feature (25)..(285): Pfam Name: Pfam Description:  Protein phosphatase 2C
  misc_feature (1)..(327): NCBI GI NO: 24413992 NR Description: putative DNA-binding protein phosphatase 2C
  misc_feature (1)..(324): NCBI GI NO: 21693562 NR Description: DNA-binding protein phosphatase 2C
  misc_feature (21)..(324): NCBI GI NO: 20146108 NR Description: protein phosphatase 2C
  misc_feature (15)..(324): NCBI GI NO: 15224766 NR Description: protein phosphatase 2C (PP2C), putative
  misc_feature (21)..(324): NCBI GI NO: 15226152 NR Description: protein phosphatase 2C (PP2C)
  misc_feature (21)..(326): NCBI GI NO: 10140768 NR Description: putative protein phosphatase-2C [Oryza sativa]
  misc_feature (21)..(326): NCBI GI NO: 37536524 NR Description: putative protein phosphatase-2C
  misc_feature (21)..(324): NCBI GI NO: 15230495 NR Description: protein phosphatase 2C (PP2C), putative
  misc_feature (21)..(324): NCBI GI NO: 25352221 NR Description: phosphoprotein phosphatase (EC 3.1.3.16) 2C
  misc_feature (1)..(321): NCBI GI NO: 34894410 NR Description: putative protein phosphatase
MESVCENTTTADFKQSNFGNFLPNVRSGGWSDIGSRQYMEDTHVCIADLAKNFGYPTVDKEVVSFYGVFDGHGGKDAAHFVRDNLPRVIVEDADFPLELEKVVSRSFVQIDSQFADKCSHQRTLSSGTTALTAMIFGRSLLVANAGDCRAVLSRCGIAMEMSMDHRPCSLSEKLRVESLGGYVDDGYLNGLLGVTRALGDWHLEGMKEASRPGGGPLSAEPEIKLTTLTKDDEFLVIGSDGLWDVFSNQNAVDFARRRLQEHNDVKRCCREIVEEAIRRGATDNLTAVLVSFHLVAPPQIRVNQPRRVARSISADGLNSLRILLGSQ

SEQ ID NO: 14954 - DNA, 1336 bp, Triticum aestivum
  misc_feature (1)..(1336): Ceres Seq. ID no. 13597523
gagagaggagagaaaggaaggaaagggagccgaagaaagctctccccccctccccgaattccatcctatttcttctgcccctctcctcgcctcgcccggaccccggccggccggattcccgcaggaggaggaggaggaggaggtggggatggggagggaggacaggttcccggtctgggaggccgcgctcggcgccggggtcgccgccgtcttcgccgcgggcctcgtcggggtctacctctccatgccggactccgactacagcttcctcaagttgccccgcaacctccacgaactacaaatcctcactggccatcttgagaactataccagtgactacaccgtacaggtgttgataggctactgtgctgtgtacattttcatgcagaccttcatgatcccagggacaatattcatgtcattgcttgctggtgctctattcgggcaactccggggtgtggctctggttgtctttgctgcctcagctggtgcttcttcatgctttttcctgtcgaagctgattggaaaaccgctggtgttcgtgctgtggccagacaagctcacattcttccagaagcaggttgccaaaagaagagaaaagctgttgaattacatgcttttcctcagggtcaccccaacactgccaaataccttcatcaacttggcctcgcccattgttgatgtgcccttccataccttcttactggcaactcttatcggtctcatcccagcagcctacgtgaccgtgagggctgggattgctctgggagagttaacatcgctcagcgacctgtacgacacccagtcagtagctctgctgttcttgatcggcgtggtctcggtcacaccagcattgttgagcaaggacgaggcgcaagacacggcaccagaaatcgcagcaggcgcctcatgaacaccaaagaggagtcacctagcccacctgtacataccaaggcacagcatgcggcggcttcattggatttgggcctacaggccttgtgaggtggatgacacatggtttgcgagttcacatgacgacacagcagcacggcgggaccttggacccaagtccgcctatcacccgcgtgccggagatgtgcgttgccgtgagaacactgtttcaattcatggccaccccccacattgtttgttatgaatgaatctgggaagcacaatgcccatccacaggcaagatgcttcggatgtgtagacaagtagtgtgtgtgccgttcgtcagcctgcgatgctgtttatttagatggaactggcagctagtccaaatccttgtatatatattgaccagattcattcaatccatattcagtggttcaatgcc

SEQ ID NO: 14955 - protein, 303 aa, Triticum aestivum
  peptide (1)..(303): Ceres Seq. ID no. 15222119
  misc_feature (59)..(291): NCBI GI NO: 18414967 NR Description: expressed protein [Arabidopsis thaliana]
  misc_feature (59)..(291): NCBI GI NO: 21593768 NR Description: unknown [Arabidopsis thaliana]
  misc_feature (38)..(288): NCBI GI NO: 18409951 NR Description: expressed protein [Arabidopsis thaliana]
  misc_feature (52)..(288): NCBI GI NO: 30681121 NR Description: expressed protein [Arabidopsis thaliana]
  misc_feature (57)..(288): NCBI GI NO: 28850296 NR Description: similar to Mus musculus (Mouse)
  misc_feature (29)..(288): NCBI GI NO: 436224 NR Description: KIAA0033 [Homo sapiens]
  misc_feature (29)..(288): NCBI GI NO: 20558053 NR Description: similar to KIAA0033 [Homo sapiens]
  misc_feature (67)..(286): NCBI GI NO: 18859941 NR Description: CG8408-PA [Drosophila melanogaster]
  misc_feature (78)..(292): NCBI GI NO: 26330556 NR Description: unnamed protein product [Mus musculus]
  misc_feature (78)..(288): NCBI GI NO: 34858940 NR Description: similar to D7Ertd743e protein [Rattus norvegicus]
REERKEGKGAEESSPPLPEFHPISSAPLLASPGPRPAGFPQEEEEEEVGMGREDRFPVWEAALGAGVAAVFAAGLVGVYLSMPDSDYSFLKLPRNLHELQILTGHLENYTSDYTVQVLIGYCAVYIFMQTFMIPGTIFMSLLAGALFGQLRGVALVVFAASAGASSCFFLSKLIGKPLVFVLWPDKLTFFQKQVAKRREKLLNYMLFLRVTPTLPNTFINLASPIVDVPFHTFLLATLIGLIPAAYVTVRAGIALGELTSLSDLYDTQSVALLFLIGVVSVTPALLSKDEAQDTAPEIAAGAS

SEQ ID NO: 14956 - protein, 254 aa, Triticum aestivum
  peptide (1)..(254): Ceres Seq. ID no. 15222120
  misc_feature (10)..(242): NCBI GI NO: 18414967 NR Description: expressed protein [Arabidopsis thaliana]
  misc_feature (10)..(242): NCBI GI NO: 21593768 NR Description: unknown [Arabidopsis thaliana]
  misc_feature (1)..(239): NCBI GI NO: 18409951 NR Description: expressed protein [Arabidopsis thaliana]
  misc_feature (3)..(239): NCBI GI NO: 30681121 NR Description: expressed protein [Arabidopsis thaliana]
  misc_feature (8)..(239): NCBI GI NO: 28850296 NR Description: similar to Mus musculus (Mouse)
  misc_feature (1)..(239): NCBI GI NO: 436224 NR Description: KIAA0033 [Homo sapiens]
  misc_feature (1)..(239): NCBI GI NO: 20558053 NR Description: similar to KIAA0033 [Homo sapiens]
  misc_feature (18)..(237): NCBI GI NO: 18859941 NR Description: CG8408-PA [Drosophila melanogaster]
  misc_feature (29)..(243): NCBI GI NO: 26330556 NR Description: unnamed protein product [Mus musculus]
  misc_feature (29)..(239): NCBI GI NO: 34858940 NR Description: similar to D7Ertd743e protein [Rattus norvegicus]
MGREDRFPVWEAALGAGVAAVFAAGLVGVYLSMPDSDYSFLKLPRNLHELQILTGHLENYTSDYTVQVLIGYCAVYIFMQTFMIPGTIFMSLLAGALFGQLRGVALVVFAASAGASSCFFLSKLIGKPLVFVLWPDKLTFFQKQVAKRREKLLNYMLFLRVTPTLPNTFINLASPIVDVPFHTFLLATLIGLIPAAYVTVRAGIALGELTSLSDLYDTQSVALLFLIGVVSVTPALLSKDEAQDTAPEIAAGAS

SEQ ID NO: 14957 - protein, 222 aa, Triticum aestivum
  peptide (1)..(222): Ceres Seq. ID no. 15222121
  misc_feature (1)..(210): NCBI GI NO: 18414967 NR Description: expressed protein [Arabidopsis thaliana]
  misc_feature (1)..(210): NCBI GI NO: 21593768 NR Description: unknown [Arabidopsis thaliana]
  misc_feature (1)..(207): NCBI GI NO: 18409951 NR Description: expressed protein [Arabidopsis thaliana]
  misc_feature (1)..(207): NCBI GI NO: 30681121 NR Description: expressed protein [Arabidopsis thaliana]
  misc_feature (1)..(207): NCBI GI NO: 28850296 NR Description: similar to Mus musculus (Mouse)
  misc_feature (1)..(207): NCBI GI NO: 436224 NR Description: KIAA0033 [Homo sapiens]
  misc_feature (1)..(207): NCBI GI NO: 20558053 NR Description: similar to KIAA0033 [Homo sapiens]
  misc_feature (1)..(205): NCBI GI NO: 18859941 NR Description: CG8408-PA [Drosophila melanogaster]
  misc_feature (1)..(211): NCBI GI NO: 26330556 NR Description: unnamed protein product [Mus musculus]
  misc_feature (1)..(207): NCBI GI NO: 34858940 NR Description: similar to D7Ertd743e protein [Rattus norvegicus]
MPDSDYSFLKLPRNLHELQILTGHLENYTSDYTVQVLIGYCAVYIFMQTFMIPGTIFMSLLAGALFGQLRGVALVVFAASAGASSCFFLSKLIGKPLVFVLWPDKLTFFQKQVAKRREKLLNYMLFLRVTPTLPNTFINLASPIVDVPFHTFLLATLIGLIPAAYVTVRAGIALGELTSLSDLYDTQSVALLFLIGVVSVTPALLSKDEAQDTAPEIAAGAS

SEQ ID NO: 14958 - DNA, 1364 bp, Triticum aestivum
  misc_feature (1)..(1364): Ceres Seq. ID no. 13597524
aaaccctgcaagcactggacaaccacagaaacccagaccccccgccgccgccgccgccatggtcgccgccggagctcttcacgctggcagccgtgtcctcctaccgatccgccgaagcttcagcacaccctggtcccacgtccgctcccacctccactccaccaagcccccttctgctccactcccgcccccacctccgccgccgccttcttcccacgccgcgtccgcgcgcttcacccctgccttcacccctaccactaggaggagcggatcaatcgggtccggggtagtcgcgtggtacctgggctcgatcgaggcgcggcccctgctgaccaagagcatcacggctgccacaatttacaccgttgccgacctcacctcccagatgatcacacttcctcctgaggagtcactcgatctaattaggactctgcgcatggctagttatgggatgctgttctcaggaccttcactgcactattggttcaactttatctcaaaagtagtccccaaaaaggatgtagtgagcaccttcaagaagatgtttctaggacaagcagtttatggcccaattattaattgtattttcttctcgtataatgcaggattacaaggtgagacgatcccagagatcattgcaagattaaagcgggatataattccgaccatcaaaagtgggctcatttattggcctctttgtgacttcatcactttcaagtttatccctgttcatttgcagccgctagtaagcaattcctttgcgtttctttggaccatctacctaacatacatggccggcttaaagaaaccaggcgtggaggtgatcacgagctcttagtcataatcaaatgactgagtttctgccagttatttctgaaaggaagtcttcatgggcattacttggaactatgacggggccgtcattaccaccactagctcatttaagctttcaatgttcaacgacgaaaacggagacaaactgcttgctaggcatatttcgtattcagtagagtagtatccaccaggcttttctagcttgcgtacagttttgggtaggcatttctgtatggatggtagaatgacactaggcatttctcccatctttctgaagtttgtcatattgcacttagaaacaagcagtttttaccaaattgtctgtgcccagttatgcagatgttaggtaaaattgttcttgtccctaagataaagtggacaaggtaaggtttacgcttgaagatctctacatacaatgcaacatttattagcggatagttatgtacatctccctcccttgtacgcagaaagaagacgattacacagtttgttcgcttaaaaaaaaaaaaaaaaaagcttatcgataccgt

SEQ ID NO: 14959 - protein, 278 aa, Triticum aestivum
  peptide (1)..(278): Ceres Seq. ID no. 13597525
  misc_feature (203)..(270): Pfam Name: Pfam Description:  Mpv17 / PMP22 family
  misc_feature (85)..(269): NCBI GI NO: 21553640 NR Description: contains similarity to 22 kDa peroxisomal membraneprotein
  misc_feature (85)..(269): NCBI GI NO: 18422298 NR Description: peroxisomal membrane protein family (22 kDa)
  misc_feature (94)..(274): NCBI GI NO: 18418319 NR Description: peroxisomal membrane protein, putative (22 kDa)
  misc_feature (95)..(270): NCBI GI NO: 15226016 NR Description: peroxisomal membrane protein, putative (22 kDa)
  misc_feature (85)..(246): NCBI GI NO: 9757841 NR Description: contains similarity to 22 kDa peroxisomal membraneprotein~gene_id:MMG4
  misc_feature (94)..(248): NCBI GI NO: 7485624 NR Description: hypothetical protein F17I5
  misc_feature (90)..(265): NCBI GI NO: 15241166 NR Description: expressed protein [Arabidopsis thaliana]
  misc_feature (90)..(265): NCBI GI NO: 16648746 NR Description: AT5g19750/T29J13_170 [Arabidopsis thaliana]
  misc_feature (90)..(265): NCBI GI NO: 21594286 NR Description: unknown [Arabidopsis thaliana]
  misc_feature (88)..(264): NCBI GI NO: 34904256 NR Description: P0452F10.16
NPASTGQPQKPRPPAAAAAMVAAGALHAGSRVLLPIRRSFSTPWSHVRSHLHSTKPPSAPLPPPPPPPPSSHAASARFTPAFTPTTRRSGSIGSGVVAWYLGSIEARPLLTKSITAATIYTVADLTSQMITLPPEESLDLIRTLRMASYGMLFSGPSLHYWFNFISKVVPKKDVVSTFKKMFLGQAVYGPIINCIFFSYNAGLQGETIPEIIARLKRDIIPTIKSGLIYWPLCDFITFKFIPVHLQPLVSNSFAFLWTIYLTYMAGLKKPGVEVITSS

SEQ ID NO: 14960 - protein, 259 aa, Triticum aestivum
  peptide (1)..(259): Ceres Seq. ID no. 13597526
  misc_feature (184)..(251): Pfam Name: Pfam Description:  Mpv17 / PMP22 family
  misc_feature (66)..(250): NCBI GI NO: 21553640 NR Description: contains similarity to 22 kDa peroxisomal membraneprotein
  misc_feature (66)..(250): NCBI GI NO: 18422298 NR Description: peroxisomal membrane protein family (22 kDa)
  misc_feature (75)..(255): NCBI GI NO: 18418319 NR Description: peroxisomal membrane protein, putative (22 kDa)
  misc_feature (76)..(251): NCBI GI NO: 15226016 NR Description: peroxisomal membrane protein, putative (22 kDa)
  misc_feature (66)..(227): NCBI GI NO: 9757841 NR Description: contains similarity to 22 kDa peroxisomal membraneprotein~gene_id:MMG4
  misc_feature (75)..(229): NCBI GI NO: 7485624 NR Description: hypothetical protein F17I5
  misc_feature (71)..(246): NCBI GI NO: 15241166 NR Description: expressed protein [Arabidopsis thaliana]
  misc_feature (71)..(246): NCBI GI NO: 21594286 NR Description: unknown [Arabidopsis thaliana]
  misc_feature (71)..(246): NCBI GI NO: 16648746 NR Description: AT5g19750/T29J13_170 [Arabidopsis thaliana]
  misc_feature (69)..(245): NCBI GI NO: 34904256 NR Description: P0452F10.16
MVAAGALHAGSRVLLPIRRSFSTPWSHVRSHLHSTKPPSAPLPPPPPPPPSSHAASARFTPAFTPTTRRSGSIGSGVVAWYLGSIEARPLLTKSITAATIYTVADLTSQMITLPPEESLDLIRTLRMASYGMLFSGPSLHYWFNFISKVVPKKDVVSTFKKMFLGQAVYGPIINCIFFSYNAGLQGETIPEIIARLKRDIIPTIKSGLIYWPLCDFITFKFIPVHLQPLVSNSFAFLWTIYLTYMAGLKKPGVEVITSS

SEQ ID NO: 14961 - protein, 150 aa, Triticum aestivum
  peptide (1)..(150): Ceres Seq. ID no. 13597527
  misc_feature (75)..(142): Pfam Name: Pfam Description:  Mpv17 / PMP22 family
  misc_feature (1)..(141): NCBI GI NO: 21553640 NR Description: contains similarity to 22 kDa peroxisomal membraneprotein
  misc_feature (1)..(141): NCBI GI NO: 18422298 NR Description: peroxisomal membrane protein family (22 kDa)
  misc_feature (1)..(146): NCBI GI NO: 18418319 NR Description: peroxisomal membrane protein, putative (22 kDa)
  misc_feature (1)..(142): NCBI GI NO: 15226016 NR Description: peroxisomal membrane protein, putative (22 kDa)
  misc_feature (1)..(118): NCBI GI NO: 9757841 NR Description: contains similarity to 22 kDa peroxisomal membraneprotein~gene_id:MMG4
  misc_feature (1)..(120): NCBI GI NO: 7485624 NR Description: hypothetical protein F17I5
  misc_feature (1)..(137): NCBI GI NO: 15241166 NR Description: expressed protein [Arabidopsis thaliana]
  misc_feature (1)..(137): NCBI GI NO: 16648746 NR Description: AT5g19750/T29J13_170 [Arabidopsis thaliana]
  misc_feature (1)..(137): NCBI GI NO: 21594286 NR Description: unknown [Arabidopsis thaliana]
  misc_feature (1)..(136): NCBI GI NO: 34904256 NR Description: P0452F10.16
MITLPPEESLDLIRTLRMASYGMLFSGPSLHYWFNFISKVVPKKDVVSTFKKMFLGQAVYGPIINCIFFSYNAGLQGETIPEIIARLKRDIIPTIKSGLIYWPLCDFITFKFIPVHLQPLVSNSFAFLWTIYLTYMAGLKKPGVEVITSS

SEQ ID NO: 14962 - DNA, 1709 bp, Triticum aestivum
  misc_feature (1)..(1709): Ceres Seq. ID no. 13662854
  misc_feature (1479)..(1479): n is a, c, t, g, unknown, or other
  misc_feature (1419)..(1419): n is a, c, t, g, unknown, or other
  misc_feature (1421)..(1421): n is a, c, t, g, unknown, or other
  misc_feature (1420)..(1420): n is a, c, t, g, unknown, or other
  misc_feature (1478)..(1478): n is a, c, t, g, unknown, or other
  misc_feature (1480)..(1480): n is a, c, t, g, unknown, or other
  misc_feature (1477)..(1477): n is a, c, t, g, unknown, or other
aaaaaaaaaccaattccatctgaagaaaattagcatcacctagccgccgccactgccgccgccgccgccgggaacatggccgcgcggcggtataccgagcacgaagaggcgctcgagatcaagtcccttcgccgcatcatcgccgcctacatcaactatcaagatgcagcagagaaagatgtcaagagatatgaacgttcattcaaaaagctttctcctgcccacaaggaacttctatttcaccttggtcttaagtaccaacgactgagatggtgtatatccatgaatacatcttttatcatgaatatgcttgaggcatttgaacctcctttcgacatgagtcagtgtgtagatggtgattgtcatgattgtgcagagcacatgcacggacatagtcatgctgataccataaataattctgaattgcttgctcagcattgttgcccagaggaaggtgcaaatactagagaaactgagaacaagaaggatgaggaagtccacatggtgggctgctcccagcctgctgcctgcaacttggggatatcccaaggtgaagataaatcatgtaatgatggtaaagatgcgagtgcagctgctaactgtcaagatacagattgttttgcatcttctactgatgaaaatgtaactccagggcaccgcagggctccatctttgccactggatgttcctccagttgacgttgacaaagtaagatgcatcataagaaatattgtgagagactgggcccaggagggtcaaattgaacgtgatgagtgctataaaccaattcttgaggaacttaatcgtctttttcctgaccgaagcaggccaccttcatgtttagtccctggtgctgggcttgggagattggctctggagatctcttctctgggttttgtaagccagggaaatgagttctcatattacatgatgatctgttcaagtttcattctaaaccacacccaagaggccaatgaatggaccatttatccttggatacacaacaattgcaattctctttcagacaaagatcaacttcgggctgtttcatttcctgatattcatccctcaagtgctgggataactgaaggattttcgatgtgtgctggagattttgtagaggtctacaatgaggaaagccaagaatctgcatgggatgctgttgtaacttgcttcttcctcgatacggcacacaatattgttgaatatattgagataatatcaaaaattctcaaggatggtggagtctgggtaaacatgggtccgcttctttatcactttgctgatgcctawvcacmataaagtggaccagatgatgatatgtctatcgaactaagtttggaagacgtgaaaagggtagcttaccattatggatttgtgatggaggtggagaaaatgatagataccacttacacagcnnntatggtatcgatgatgcagaatcgataccgcgcggcattttggacgatgaggaagnnnncgtctcgatcgaaagctaaaaagcgccagtgaggtgaagatcctctgtctggtgtgaaattcgggtcgaagctgttagaaatttagaaagagtgatttgggccggacccattggtgatgtttatcctgggacaaacgaggatgatgtgttggtgccgccattgtcgcaccatgatatgctactgttgatactcgaacctcagagcgaaactgtgctgtgaatcctgtgc

SEQ ID NO: 14963 - protein, 408 aa, Triticum aestivum
  peptide (1)..(408): Ceres Seq. ID no. 15220189
  misc_feature (4)..(408): NCBI GI NO: 30685202 NR Description: expressed protein [Arabidopsis thaliana]
  misc_feature (193)..(408): NCBI GI NO: 30685200 NR Description: expressed protein [Arabidopsis thaliana]
  misc_feature (3)..(129): NCBI GI NO: 30685200 NR Description: expressed protein [Arabidopsis thaliana]
  misc_feature (193)..(408): NCBI GI NO: 30685195 NR Description: expressed protein [Arabidopsis thaliana]
  misc_feature (3)..(129): NCBI GI NO: 30685195 NR Description: expressed protein [Arabidopsis thaliana]
  misc_feature (199)..(408): NCBI GI NO: 25349707 NR Description: hypothetical protein At2g32160
  misc_feature (332)..(408): NCBI GI NO: 25408215 NR Description: hypothetical protein At2g32170
  misc_feature (227)..(347): NCBI GI NO: 25408215 NR Description: hypothetical protein At2g32170
  misc_feature (208)..(408): NCBI GI NO: 22748889 NR Description: hypothetical protein FLJ25795 [Homo sapiens]
  misc_feature (1)..(79): NCBI GI NO: 22748889 NR Description: hypothetical protein FLJ25795 [Homo sapiens]
  misc_feature (406)..(406): Xaa is any aa, unknown or other
  misc_feature (407)..(407): Xaa is any aa, unknown or other
  misc_feature (408)..(408): Xaa is any aa, unknown or other
MAARRYTEHEEALEIKSLRRIIAAYINYQDAAEKDVKRYERSFKKLSPAHKELLFHLGLKYQRLRWCISMNTSFIMNMLEAFEPPFDMSQCVDGDCHDCAEHMHGHSHADTINNSELLAQHCCPEEGANTRETENKKDEEVHMVGCSQPAACNLGISQGEDKSCNDGKDASAAANCQDTDCFASSTDENVTPGHRRAPSLPLDVPPVDVDKVRCIIRNIVRDWAQEGQIERDECYKPILEELNRLFPDRSRPPSCLVPGAGLGRLALEISSLGFVSQGNEFSYYMMICSSFILNHTQEANEWTIYPWIHNNCNSLSDKDQLRAVSFPDIHPSSAGITEGFSMCAGDFVEVYNEESQESAWDAVVTCFFLDTAHNIVEYIEIISKILKDGGVWVNMGPLLYHFADAXXX

SEQ ID NO: 14964 - protein, 339 aa, Triticum aestivum
  peptide (1)..(339): Ceres Seq. ID no. 15220190
  misc_feature (1)..(339): NCBI GI NO: 30685202 NR Description: expressed protein [Arabidopsis thaliana]
  misc_feature (124)..(339): NCBI GI NO: 30685200 NR Description: expressed protein [Arabidopsis thaliana]
  misc_feature (1)..(60): NCBI GI NO: 30685200 NR Description: expressed protein [Arabidopsis thaliana]
  misc_feature (124)..(339): NCBI GI NO: 30685195 NR Description: expressed protein [Arabidopsis thaliana]
  misc_feature (1)..(60): NCBI GI NO: 30685195 NR Description: expressed protein [Arabidopsis thaliana]
  misc_feature (130)..(339): NCBI GI NO: 25349707 NR Description: hypothetical protein At2g32160
  misc_feature (263)..(339): NCBI GI NO: 25408215 NR Description: hypothetical protein At2g32170
  misc_feature (158)..(278): NCBI GI NO: 25408215 NR Description: hypothetical protein At2g32170
  misc_feature (139)..(339): NCBI GI NO: 22748889 NR Description: hypothetical protein FLJ25795 [Homo sapiens]
  misc_feature (139)..(339): NCBI GI NO: 12846470 NR Description: unnamed protein product [Mus musculus]
  misc_feature (337)..(337): Xaa is any aa, unknown or other
  misc_feature (338)..(338): Xaa is any aa, unknown or other
  misc_feature (339)..(339): Xaa is any aa, unknown or other
MNTSFIMNMLEAFEPPFDMSQCVDGDCHDCAEHMHGHSHADTINNSELLAQHCCPEEGANTRETENKKDEEVHMVGCSQPAACNLGISQGEDKSCNDGKDASAAANCQDTDCFASSTDENVTPGHRRAPSLPLDVPPVDVDKVRCIIRNIVRDWAQEGQIERDECYKPILEELNRLFPDRSRPPSCLVPGAGLGRLALEISSLGFVSQGNEFSYYMMICSSFILNHTQEANEWTIYPWIHNNCNSLSDKDQLRAVSFPDIHPSSAGITEGFSMCAGDFVEVYNEESQESAWDAVVTCFFLDTAHNIVEYIEIISKILKDGGVWVNMGPLLYHFADAXXX

SEQ ID NO: 14965 - protein, 333 aa, Triticum aestivum
  peptide (1)..(333): Ceres Seq. ID no. 15220191
  misc_feature (1)..(333): NCBI GI NO: 30685202 NR Description: expressed protein [Arabidopsis thaliana]
  misc_feature (118)..(333): NCBI GI NO: 30685200 NR Description: expressed protein [Arabidopsis thaliana]
  misc_feature (1)..(54): NCBI GI NO: 30685200 NR Description: expressed protein [Arabidopsis thaliana]
  misc_feature (118)..(333): NCBI GI NO: 30685195 NR Description: expressed protein [Arabidopsis thaliana]
  misc_feature (1)..(54): NCBI GI NO: 30685195 NR Description: expressed protein [Arabidopsis thaliana]
  misc_feature (124)..(333): NCBI GI NO: 25349707 NR Description: hypothetical protein At2g32160
  misc_feature (257)..(333): NCBI GI NO: 25408215 NR Description: hypothetical protein At2g32170
  misc_feature (152)..(272): NCBI GI NO: 25408215 NR Description: hypothetical protein At2g32170
  misc_feature (133)..(333): NCBI GI NO: 22748889 NR Description: hypothetical protein FLJ25795 [Homo sapiens]
  misc_feature (133)..(333): NCBI GI NO: 12846470 NR Description: unnamed protein product [Mus musculus]
  misc_feature (331)..(331): Xaa is any aa, unknown or other
  misc_feature (332)..(332): Xaa is any aa, unknown or other
  misc_feature (333)..(333): Xaa is any aa, unknown or other
MNMLEAFEPPFDMSQCVDGDCHDCAEHMHGHSHADTINNSELLAQHCCPEEGANTRETENKKDEEVHMVGCSQPAACNLGISQGEDKSCNDGKDASAAANCQDTDCFASSTDENVTPGHRRAPSLPLDVPPVDVDKVRCIIRNIVRDWAQEGQIERDECYKPILEELNRLFPDRSRPPSCLVPGAGLGRLALEISSLGFVSQGNEFSYYMMICSSFILNHTQEANEWTIYPWIHNNCNSLSDKDQLRAVSFPDIHPSSAGITEGFSMCAGDFVEVYNEESQESAWDAVVTCFFLDTAHNIVEYIEIISKILKDGGVWVNMGPLLYHFADAXXX

SEQ ID NO: 14966 - DNA, 1628 bp, Triticum aestivum
  misc_feature (1)..(1628): Ceres Seq. ID no. 13662754
gaacaagcgtggcttcccttacactgccaagcaatactgttgtgatgtctcctcctgccgcgacaacagtctgatcaagtttgtcgagatggagttcaatgagccggaccgcaggaacagaggcggccaaggctgtagagccatcatgtgggatacgacggtgatttcagatggttggagccagcgcttcagagttgatgttgataacatttcggtggacagaagttattctggtctactgcctcagctgtggaatggcgagaccagagaactagaactgaagagactgattttgtatacccccacgctgagcgtgcacgacgacaatcttctttacgtgatggctaagatgaacagtgaagacgataaggcctgggtcatcaccgtcgacatgaaacgcgaggccgtggaagcaatcgccccgtattctaccagagggcgcaaactcacttcatggcatagtccatgcacctttccagagtacctcgacccggcgaccccaggggatcatgtggccatgcactctaggaggatttgtgcggcggactgtgttctgcaaatgctgttgactcgagactggttcagggaaattggtgaacgctttgaatttgagaggccaacccacgttgagtgcctgtcactaattcagtgttgcccagtatcatctgttctttcagatatccaagaagtggtaaaatatgctttctctactggtgaaggcgaagctgctcccaaagctgtggatttatgctcacgagcttttgaagacttcgatgtgctgctacgcgagttattgcatgatccagcgtcatctaccgaaggcatgagttgcaaaatcagtgttgcccttcgagctttagacagtatcttggacattgtgccaccaaccttgagggcgcttgcggatgcctgtcatcaaaaaggagggaaaacaatatttgatctgggtgaggagcctggtgatccaaaggacttgaaactacagtgctctcctaaagctaacaaccttacatggtgcaagcagccagtcgtctattcaaagaacagatctgacgagttgcagcagtggggatccaacctgattaaccgtttccagataggagggaggacggtatttgatcttgttgagcaggcaagagatacagaggactggaaagtggagagctcttgtgatgctaacaacctttctggcggcaaggacaagggcggatcttacgaggtgcagcaggggagatccaagcccattaaccgccggcaaaggaagcggaaccaggcacggggcagggaagctggccgtgatgaacgattggtggttccatattgccgccaactggagcagtatgtgttgattttcttgtgcctgctcttcattgcctacatctgtgcaccgatcactatgaagtggttaggccatggccctttagtatcctactagtgcatacattccgtctaatatgtgcacagtatcgtcatatctgcattatgtaagaacatacttgcattatgtaaaaacataagcttatatgaggggatgcctcctgtgcgtggagtagcatgggatggtactgttgtggacaaatttacaagcacgtatgtatcagcagtacaccaccaggtttccttgtttc

SEQ ID NO: 14967 - protein, 477 aa, Triticum aestivum
  peptide (1)..(477): Ceres Seq. ID no. 15220185
  misc_feature (8)..(162): NCBI GI NO: 27436751 NR Description: Hypothetical protein
  misc_feature (15)..(172): NCBI GI NO: 38344573 NR Description: OSJNBa0053B21.5
  misc_feature (18)..(143): NCBI GI NO: 38347094 NR Description: OSJNBa0006M15.9
NKRGFPYTAKQYCCDVSSCRDNSLIKFVEMEFNEPDRRNRGGQGCRAIMWDTTVISDGWSQRFRVDVDNISVDRSYSGLLPQLWNGETRELELKRLILYTPTLSVHDDNLLYVMAKMNSEDDKAWVITVDMKREAVEAIAPYSTRGRKLTSWHSPCTFPEYLDPATPGDHVAMHSRRICAADCVLQMLLTRDWFREIGERFEFERPTHVECLSLIQCCPVSSVLSDIQEVVKYAFSTGEGEAAPKAVDLCSRAFEDFDVLLRELLHDPASSTEGMSCKISVALRALDSILDIVPPTLRALADACHQKGGKTIFDLGEEPGDPKDLKLQCSPKANNLTWCKQPVVYSKNRSDELQQWGSNLINRFQIGGRTVFDLVEQARDTEDWKVESSCDANNLSGGKDKGGSYEVQQGRSKPINRRQRKRNQARGREAGRDERLVVPYCRQLEQYVLIFLCLLFIAYICAPITMKWLGHGPLVSY

SEQ ID NO: 14968 - protein, 448 aa, Triticum aestivum
  peptide (1)..(448): Ceres Seq. ID no. 15220186
  misc_feature (1)..(133): NCBI GI NO: 27436751 NR Description: Hypothetical protein
  misc_feature (1)..(143): NCBI GI NO: 38344573 NR Description: OSJNBa0053B21.5
  misc_feature (1)..(114): NCBI GI NO: 38347094 NR Description: OSJNBa0006M15.9
MEFNEPDRRNRGGQGCRAIMWDTTVISDGWSQRFRVDVDNISVDRSYSGLLPQLWNGETRELELKRLILYTPTLSVHDDNLLYVMAKMNSEDDKAWVITVDMKREAVEAIAPYSTRGRKLTSWHSPCTFPEYLDPATPGDHVAMHSRRICAADCVLQMLLTRDWFREIGERFEFERPTHVECLSLIQCCPVSSVLSDIQEVVKYAFSTGEGEAAPKAVDLCSRAFEDFDVLLRELLHDPASSTEGMSCKISVALRALDSILDIVPPTLRALADACHQKGGKTIFDLGEEPGDPKDLKLQCSPKANNLTWCKQPVVYSKNRSDELQQWGSNLINRFQIGGRTVFDLVEQARDTEDWKVESSCDANNLSGGKDKGGSYEVQQGRSKPINRRQRKRNQARGREAGRDERLVVPYCRQLEQYVLIFLCLLFIAYICAPITMKWLGHGPLVSY

SEQ ID NO: 14969 - protein, 429 aa, Triticum aestivum
  peptide (1)..(429): Ceres Seq. ID no. 15220187
  misc_feature (1)..(114): NCBI GI NO: 27436751 NR Description: Hypothetical protein
  misc_feature (1)..(124): NCBI GI NO: 38344573 NR Description: OSJNBa0053B21.5
  misc_feature (1)..(95): NCBI GI NO: 38347094 NR Description: OSJNBa0006M15.9
MWDTTVISDGWSQRFRVDVDNISVDRSYSGLLPQLWNGETRELELKRLILYTPTLSVHDDNLLYVMAKMNSEDDKAWVITVDMKREAVEAIAPYSTRGRKLTSWHSPCTFPEYLDPATPGDHVAMHSRRICAADCVLQMLLTRDWFREIGERFEFERPTHVECLSLIQCCPVSSVLSDIQEVVKYAFSTGEGEAAPKAVDLCSRAFEDFDVLLRELLHDPASSTEGMSCKISVALRALDSILDIVPPTLRALADACHQKGGKTIFDLGEEPGDPKDLKLQCSPKANNLTWCKQPVVYSKNRSDELQQWGSNLINRFQIGGRTVFDLVEQARDTEDWKVESSCDANNLSGGKDKGGSYEVQQGRSKPINRRQRKRNQARGREAGRDERLVVPYCRQLEQYVLIFLCLLFIAYICAPITMKWLGHGPLVSY

SEQ ID NO: 14970 - DNA, 2111 bp, Triticum aestivum
  misc_feature (1)..(2111): Ceres Seq. ID no. 13662574
agaacatcctaatcgaaaaaaccaaaaattattagaggcgacgaagaagggtgcgaacccgccgccgttccgggttccgattagatagagctgtcgcgccgccgatcccgtcgccccgccgcgccgagcttacagtttgtgcgtcatggggacttcttcaggtgcgaatttccatcaacagcctccgccccaggggatgctgccgcctcgccatggtgcccgggcccctagcctgcagacttccctctcattggcctcgtcggaacaggttggctcgcctgaaatgcaggaacctgtgtccaattctgaccagggccatgactctgccaccgaaagtgcaagttcgagggagacctggcctgtagagccggaacatagcaatgctgctgctgctagtagtggcggtgctgtgaaaaaggtggagatggaaaaggatatcagaaatggtatccccaagttgcaggttattcgtggaagctcccgcatcgatagggtgtcactgagggagattgcgcgggagagagtggacctagttgttgagaaaatgaaggtaatgccagaggagcacctggaggagattaaaaatgagctcaggtcgattctggaggggacagggggctctcatcatattgaggagtttctgtatctgcagaagtttgtccagggcagaggtgatttgacaccaactatgctttcaatggcccatcatgtccaactggagatcctcgtggcaatcaagactggaatccaggcgtttttgcaccccagcgtcaccattccccaaagccacctggtggaggtcttcttgtataagaggtgccggaacattgcttgccagagtgctctcccggctgaggaatgcagatgcaatgtatgtgctaacagaaatgggttttgcaacctttgcatgtgcgtgatttgcaacaagtttgattttgaggtcaacacatgccgatgggttgggtgcgatttctgttcccattggacgcacaccgactgtgcgattcgtgttggccagattgggacagggcaatcaattaagagcggcaccggtcatgccgaaatgctttttaggtgccaggcttgccagaagacatcagaattattcggttgggttaaggatgtgtttcaacaatgtgctcctggttgggatagggatgccttagtacgagagcttgagtttgtttgtaagatatttcgtctaagcgaagacccaaaaggaagaaatttgttcaggaaatgtgcgaatctgattgaaagattgaggaatagttctcctgattctgtcaatcctaggatgatactgcatgcacttcgagagcttgagatggattcccctaagagctctgaaaatgaagaatcgggacgcttgatcactccccaggaggcatgtaatcgtattgcagaggtagtccaagaagctgtcagaaagatggagcttgttgctgaagagaaaatgggactgtacaaaaaggctcgcaccgctgtggaggcctgtgaccgtgagcttgatgagaaggccagacaagttcaggagttcaaggccgagaggctgcggaagaagcagcaggtggaggagctcgagagcattgttcggttgaaacaggccgaggctgagatgttccagctcaaggcaagtgaggctcgccaggaggctgagaggctccagagcatcgcgcttgccaaatctgagagggctgagcaggactacgctagcctctacctcaagcggcgcctggaggaagcggaggcagagaagcagtttctttttgagaaaataaagcttcaggacggccataggcccccgcaggcgagcagcagcgtgcctgctgattcctctcaggctccctctcaggcgttgatgctgtccaaaattcaggaccttctcaagaacgttcgtaccatgccgacaaagtcggaggcgcattcaaaataagagcagcaggtgcacttcagatttgggattacatgttgtgttattgtgctaatgtatggtgacttctgtgtgatgtgttaggagtatataatgggcggtgccccccttggaaaatcgaatattaatgttgttggcgatatcgtgatatgatatactcatgtaggctacatatttc

SEQ ID NO: 14971 - protein, 596 aa, Triticum aestivum
  peptide (1)..(596): Ceres Seq. ID no. 15220178
  misc_feature (18)..(584): NCBI GI NO: 30385711 NR Description: Potyvirus VPg interacting protein
  misc_feature (52)..(588): NCBI GI NO: 15238905 NR Description: expressed protein [Arabidopsis thaliana]
  misc_feature (88)..(595): NCBI GI NO: 30385713 NR Description: Potyvirus VPg interacting protein [Pisum sativum]
  misc_feature (23)..(596): NCBI GI NO: 18398053 NR Description: expressed protein [Arabidopsis thaliana]
  misc_feature (37)..(552): NCBI GI NO: 28973711 NR Description: unknown protein [Arabidopsis thaliana]
  misc_feature (37)..(552): NCBI GI NO: 30695820 NR Description: expressed protein [Arabidopsis thaliana]
  misc_feature (37)..(552): NCBI GI NO: 15229445 NR Description: expressed protein [Arabidopsis thaliana]
  misc_feature (91)..(551): NCBI GI NO: 25402780 NR Description: protein F10B6.14 [imported] - Arabidopsis thaliana
  misc_feature (91)..(534): NCBI GI NO: 18394157 NR Description: expressed protein [Arabidopsis thaliana]
  misc_feature (417)..(546): NCBI GI NO: 33339558 NR Description: ABRH1 [Marsilea quadrifolia]
MGTSSGANFHQQPPPQGMLPPRHGARAPSLQTSLSLASSEQVGSPEMQEPVSNSDQGHDSATESASSRETWPVEPEHSNAAAASSGGAVKKVEMEKDIRNGIPKLQVIRGSSRIDRVSLREIARERVDLVVEKMKVMPEEHLEEIKNELRSILEGTGGSHHIEEFLYLQKFVQGRGDLTPTMLSMAHHVQLEILVAIKTGIQAFLHPSVTIPQSHLVEVFLYKRCRNIACQSALPAEECRCNVCANRNGFCNLCMCVICNKFDFEVNTCRWVGCDFCSHWTHTDCAIRVGQIGTGQSIKSGTGHAEMLFRCQACQKTSELFGWVKDVFQQCAPGWDRDALVRELEFVCKIFRLSEDPKGRNLFRKCANLIERLRNSSPDSVNPRMILHALRELEMDSPKSSENEESGRLITPQEACNRIAEVVQEAVRKMELVAEEKMGLYKKARTAVEACDRELDEKARQVQEFKAERLRKKQQVEELESIVRLKQAEAEMFQLKASEARQEAERLQSIALAKSERAEQDYASLYLKRRLEEAEAEKQFLFEKIKLQDGHRPPQASSSVPADSSQAPSQALMLSKIQDLLKNVRTMPTKSEAHSK

SEQ ID NO: 14972 - protein, 579 aa, Triticum aestivum
  peptide (1)..(579): Ceres Seq. ID no. 15220179
  misc_feature (1)..(567): NCBI GI NO: 30385711 NR Description: Potyvirus VPg interacting protein
  misc_feature (35)..(571): NCBI GI NO: 15238905 NR Description: expressed protein [Arabidopsis thaliana]
  misc_feature (71)..(578): NCBI GI NO: 30385713 NR Description: Potyvirus VPg interacting protein [Pisum sativum]
  misc_feature (6)..(579): NCBI GI NO: 18398053 NR Description: expressed protein [Arabidopsis thaliana]
  misc_feature (20)..(535): NCBI GI NO: 28973711 NR Description: unknown protein [Arabidopsis thaliana]
  misc_feature (20)..(535): NCBI GI NO: 30695820 NR Description: expressed protein [Arabidopsis thaliana]
  misc_feature (20)..(535): NCBI GI NO: 15229445 NR Description: expressed protein [Arabidopsis thaliana]
  misc_feature (74)..(534): NCBI GI NO: 25402780 NR Description: protein F10B6.14 [imported] - Arabidopsis thaliana
  misc_feature (74)..(517): NCBI GI NO: 18394157 NR Description: expressed protein [Arabidopsis thaliana]
  misc_feature (400)..(529): NCBI GI NO: 33339558 NR Description: ABRH1 [Marsilea quadrifolia]
MLPPRHGARAPSLQTSLSLASSEQVGSPEMQEPVSNSDQGHDSATESASSRETWPVEPEHSNAAAASSGGAVKKVEMEKDIRNGIPKLQVIRGSSRIDRVSLREIARERVDLVVEKMKVMPEEHLEEIKNELRSILEGTGGSHHIEEFLYLQKFVQGRGDLTPTMLSMAHHVQLEILVAIKTGIQAFLHPSVTIPQSHLVEVFLYKRCRNIACQSALPAEECRCNVCANRNGFCNLCMCVICNKFDFEVNTCRWVGCDFCSHWTHTDCAIRVGQIGTGQSIKSGTGHAEMLFRCQACQKTSELFGWVKDVFQQCAPGWDRDALVRELEFVCKIFRLSEDPKGRNLFRKCANLIERLRNSSPDSVNPRMILHALRELEMDSPKSSENEESGRLITPQEACNRIAEVVQEAVRKMELVAEEKMGLYKKARTAVEACDRELDEKARQVQEFKAERLRKKQQVEELESIVRLKQAEAEMFQLKASEARQEAERLQSIALAKSERAEQDYASLYLKRRLEEAEAEKQFLFEKIKLQDGHRPPQASSSVPADSSQAPSQALMLSKIQDLLKNVRTMPTKSEAHSK

SEQ ID NO: 14973 - protein, 550 aa, Triticum aestivum
  peptide (1)..(550): Ceres Seq. ID no. 15220180
  misc_feature (1)..(538): NCBI GI NO: 30385711 NR Description: Potyvirus VPg interacting protein
  misc_feature (6)..(542): NCBI GI NO: 15238905 NR Description: expressed protein [Arabidopsis thaliana]
  misc_feature (42)..(549): NCBI GI NO: 30385713 NR Description: Potyvirus VPg interacting protein [Pisum sativum]
  misc_feature (1)..(550): NCBI GI NO: 18398053 NR Description: expressed protein [Arabidopsis thaliana]
  misc_feature (1)..(506): NCBI GI NO: 28973711 NR Description: unknown protein [Arabidopsis thaliana]
  misc_feature (1)..(506): NCBI GI NO: 30695820 NR Description: expressed protein [Arabidopsis thaliana]
  misc_feature (1)..(506): NCBI GI NO: 15229445 NR Description: expressed protein [Arabidopsis thaliana]
  misc_feature (45)..(505): NCBI GI NO: 25402780 NR Description: protein F10B6.14 [imported] - Arabidopsis thaliana
  misc_feature (45)..(488): NCBI GI NO: 18394157 NR Description: expressed protein [Arabidopsis thaliana]
  misc_feature (371)..(500): NCBI GI NO: 33339558 NR Description: ABRH1 [Marsilea quadrifolia]
MQEPVSNSDQGHDSATESASSRETWPVEPEHSNAAAASSGGAVKKVEMEKDIRNGIPKLQVIRGSSRIDRVSLREIARERVDLVVEKMKVMPEEHLEEIKNELRSILEGTGGSHHIEEFLYLQKFVQGRGDLTPTMLSMAHHVQLEILVAIKTGIQAFLHPSVTIPQSHLVEVFLYKRCRNIACQSALPAEECRCNVCANRNGFCNLCMCVICNKFDFEVNTCRWVGCDFCSHWTHTDCAIRVGQIGTGQSIKSGTGHAEMLFRCQACQKTSELFGWVKDVFQQCAPGWDRDALVRELEFVCKIFRLSEDPKGRNLFRKCANLIERLRNSSPDSVNPRMILHALRELEMDSPKSSENEESGRLITPQEACNRIAEVVQEAVRKMELVAEEKMGLYKKARTAVEACDRELDEKARQVQEFKAERLRKKQQVEELESIVRLKQAEAEMFQLKASEARQEAERLQSIALAKSERAEQDYASLYLKRRLEEAEAEKQFLFEKIKLQDGHRPPQASSSVPADSSQAPSQALMLSKIQDLLKNVRTMPTKSEAHSK

SEQ ID NO: 14974 - DNA, 754 bp, Triticum aestivum
  misc_feature (1)..(754): Ceres Seq. ID no. 13656008
gtgatcgattccgattccgtgcccgcgcgtcgagcgatcggcccagagagctcgtcgacaaatctcgctcgtgtccatcagatcgccatcgccggcccacctgcccacctgcccaccagtcgatgatggccttcccctctttcacatggccgttccgccgccgagccgccgccggcgccagcggcggagccggcccaagcaaaccctccgccgctgaggggaaggaggaggacgcggaggagctcggcgtcacgccgcagctcctcgacttcctccggacgctctcccccgacgccttcaagtcctccgccctccagctccaccaaggggcctcggcggaggcggcgggagagctctcggactggcagcagcggcacgccgtcctcgtgctcgccagagccaaggaactcgctaaggtccgctatgatttgtgcccacgccacatgaaggacaagcagttctggacaatctacttcctgctcgccaggacctacatcttgccgtacgagttacgtgccatacaaaaagagaaggtaagaaggatggagacagagaacggaaagtcaaaagaagtgattgctgttgaggtggagatgcaggaatcgaaatgcagtagagaatctcaaacgttaccagatgattcagaacctcaggattcatagttgatgttgctgacggcatattaggtaagggctggaagcagctgtatcaaaattgatatttggcttaattcagaactcatttttcccgttgg

SEQ ID NO: 14975 - protein, 219 aa, Triticum aestivum
  peptide (1)..(219): Ceres Seq. ID no. 13656009
  misc_feature (117)..(160): Pfam Name: Pfam Description:  BSD domain
  misc_feature (42)..(119): NCBI GI NO: 38346066 NR Description: OSJNBa0084K01.6
  misc_feature (168)..(219): NCBI GI NO: 38346066 NR Description: OSJNBa0084K01.6
  misc_feature (64)..(202): NCBI GI NO: 18404344 NR Description: expressed protein [Arabidopsis thaliana]
  misc_feature (70)..(215): NCBI GI NO: 15450417 NR Description: At1g26300/F28B23_4 [Arabidopsis thaliana]
  misc_feature (100)..(190): NCBI GI NO: 25404796 NR Description: hypothetical protein T6L1.21
  misc_feature (100)..(190): NCBI GI NO: 30697787 NR Description: expressed protein [Arabidopsis thaliana]
  misc_feature (4)..(219): NCBI GI NO: 21555533 NR Description: unknown [Arabidopsis thaliana]
DRFRFRARASSDRPRELVDKSRSCPSDRHRRPTCPPAHQSMMAFPSFTWPFRRRAAAGASGGAGPSKPSAAEGKEEDAEELGVTPQLLDFLRTLSPDAFKSSALQLHQGASAEAAGELSDWQQRHAVLVLARAKELAKVRYDLCPRHMKDKQFWTIYFLLARTYILPYELRAIQKEKVRRMETENGKSKEVIAVEVEMQESKCSRESQTLPDDSEPQDS

SEQ ID NO: 14976 - protein, 179 aa, Triticum aestivum
  peptide (1)..(179): Ceres Seq. ID no. 13656010
  misc_feature (77)..(120): Pfam Name: Pfam Description:  BSD domain
  misc_feature (2)..(79): NCBI GI NO: 38346066 NR Description: OSJNBa0084K01.6
  misc_feature (128)..(179): NCBI GI NO: 38346066 NR Description: OSJNBa0084K01.6
  misc_feature (24)..(162): NCBI GI NO: 18404344 NR Description: expressed protein [Arabidopsis thaliana]
  misc_feature (30)..(175): NCBI GI NO: 15450417 NR Description: At1g26300/F28B23_4 [Arabidopsis thaliana]
  misc_feature (60)..(150): NCBI GI NO: 25404796 NR Description: hypothetical protein T6L1.21
  misc_feature (60)..(150): NCBI GI NO: 30697787 NR Description: expressed protein [Arabidopsis thaliana]
  misc_feature (1)..(179): NCBI GI NO: 21555533 NR Description: unknown [Arabidopsis thaliana]
MMAFPSFTWPFRRRAAAGASGGAGPSKPSAAEGKEEDAEELGVTPQLLDFLRTLSPDAFKSSALQLHQGASAEAAGELSDWQQRHAVLVLARAKELAKVRYDLCPRHMKDKQFWTIYFLLARTYILPYELRAIQKEKVRRMETENGKSKEVIAVEVEMQESKCSRESQTLPDDSEPQDS

SEQ ID NO: 14977 - protein, 178 aa, Triticum aestivum
  peptide (1)..(178): Ceres Seq. ID no. 13656011
  misc_feature (76)..(119): Pfam Name: Pfam Description:  BSD domain
  misc_feature (1)..(78): NCBI GI NO: 38346066 NR Description: OSJNBa0084K01.6
  misc_feature (127)..(178): NCBI GI NO: 38346066 NR Description: OSJNBa0084K01.6
  misc_feature (23)..(161): NCBI GI NO: 18404344 NR Description: expressed protein [Arabidopsis thaliana]
  misc_feature (29)..(174): NCBI GI NO: 15450417 NR Description: At1g26300/F28B23_4 [Arabidopsis thaliana]
  misc_feature (59)..(149): NCBI GI NO: 25404796 NR Description: hypothetical protein T6L1.21
  misc_feature (59)..(149): NCBI GI NO: 30697787 NR Description: expressed protein [Arabidopsis thaliana]
  misc_feature (1)..(178): NCBI GI NO: 21555533 NR Description: unknown [Arabidopsis thaliana]
MAFPSFTWPFRRRAAAGASGGAGPSKPSAAEGKEEDAEELGVTPQLLDFLRTLSPDAFKSSALQLHQGASAEAAGELSDWQQRHAVLVLARAKELAKVRYDLCPRHMKDKQFWTIYFLLARTYILPYELRAIQKEKVRRMETENGKSKEVIAVEVEMQESKCSRESQTLPDDSEPQDS

SEQ ID NO: 14978 - DNA, 1628 bp, Triticum aestivum
  misc_feature (1)..(1628): Ceres Seq. ID no. 13597528
cttgctcatctcatctcattccctcccttgtgccatctgctctgctctctcctatcatctatctagcaactcaattccatttgcatgcctacacacatcttacattcactacctcaacacttaccactccaccctagctaagctatcttcacctccatcacaaatcatcaattgcttcagtttgatcccatcaccatgggcgagcaagtagccaccaaggaggaggccaacaaggaagaatcacctgcacccgccgccgcacctgaagctgcaccggcaccggcaccggcagaggagaagaaggacgaggcagcagccgaccaagacccaaagaaggaggaaccaccagcagccgacccaccgtcccctccgccgccggtgccggtgatcctgggcgtcgaggtgcactgcacgggctgcgccaagcggatcaggcgctccctcctccgctgcaagggcgtcgaggccgtccacgtcgacatgtccgccaaccaggtcaccatcaagggcgccgtcgacccgcaggccctctgcgaccgcctccgcgccaagaccaagcgcgacgccaccctcatctcccctctgccacctcctccgccggccgagggcgaggagcctccgccgccccctcctccggcaccgccgctcgtcagcgaggcccgcacagtggagctgctcgtcaacatgcactgcgaggcctgcgcgcagcagctgcagaccaagatgatgaggatgaagggggtggtcagcgctcagacggacctcgccgccgggaggctcacgctcagtgccaccgtggaggacgagaagattgtggagtacatccaccgacggactgggaagatcgcctccgtcgtgccgccgccgcctccggagccgcccaaggaggaggaaccaccagctcctgctgctgatgctgagccaccaaaggatgaagcaccagccgacggcaagaaagaagaggccggcgacaacaaggcggctgaagacggcaaaggagctgcagaggccggggaggagaagaaggaaggtgccggcgaggaggaccagaagccggggaagcaagaaggtgtggcggtggacggcttcccgccggaggagatgatgaagcggatggtctactggccctacggcggcgcacccggcggcggcatccactacaagctgcatccggccgacgccgaggaggccatgatggccaggaggatggccatgcacgccatgccgccacctatgccgccgccgccgcaccaccaccaccacaacccctacgccatgatgcaccagcagtgggcgcctccaccgccgccgccacctccggggatgccgatgtacaacagctacaactacggcagcagctacatgatggagcggccgccgcagatgttcagcgacgagaaccccaacgcctgcgtcatctcctagtcctagctatctcggatcgatggatggatcaccacatgggccatggcatggatatgagctgagcatgtgagcttggccggattattggaccatcctccatatacatttctatactccgattatgtactgctgcgtaattataagcagtagttattgtactattagcgacgaaattaaaggacattggtcacgcttgtaagatc

SEQ ID NO: 14979 - protein, 409 aa, Triticum aestivum
  peptide (1)..(409): Ceres Seq. ID no. 13597529
  misc_feature (65)..(124): Pfam Name: Pfam Description:  Heavy-metal-associated domain
  misc_feature (1)..(310): NCBI GI NO: 21594005 NR Description: unknown [Arabidopsis thaliana]
  misc_feature (383)..(409): NCBI GI NO: 21594005 NR Description: unknown [Arabidopsis thaliana]
  misc_feature (1)..(310): NCBI GI NO: 18420811 NR Description: copper-binding protein family
  misc_feature (383)..(409): NCBI GI NO: 18420811 NR Description: copper-binding protein family
  misc_feature (1)..(286): NCBI GI NO: 18424719 NR Description: copper chaperone (CCH)-related
  misc_feature (357)..(408): NCBI GI NO: 18424719 NR Description: copper chaperone (CCH)-related
  misc_feature (8)..(286): NCBI GI NO: 9758294 NR Description: contains similarity to ATFP3~gene_id:MLE2.16
  misc_feature (357)..(408): NCBI GI NO: 9758294 NR Description: contains similarity to ATFP3~gene_id:MLE2.16
  misc_feature (51)..(286): NCBI GI NO: 4097547 NR Description: ATFP3 [Arabidopsis thaliana]
  misc_feature (385)..(408): NCBI GI NO: 4097547 NR Description: ATFP3 [Arabidopsis thaliana]
MGEQVATKEEANKEESPAPAAAPEAAPAPAPAEEKKDEAAADQDPKKEEPPAADPPSPPPPVPVILGVEVHCTGCAKRIRRSLLRCKGVEAVHVDMSANQVTIKGAVDPQALCDRLRAKTKRDATLISPLPPPPPAEGEEPPPPPPPAPPLVSEARTVELLVNMHCEACAQQLQTKMMRMKGVVSAQTDLAAGRLTLSATVEDEKIVEYIHRRTGKIASVVPPPPPEPPKEEEPPAPAADAEPPKDEAPADGKKEEAGDNKAAEDGKGAAEAGEEKKEGAGEEDQKPGKQEGVAVDGFPPEEMMKRMVYWPYGGAPGGGIHYKLHPADAEEAMMARRMAMHAMPPPMPPPPHHHHHNPYAMMHQQWAPPPPPPPPGMPMYNSYNYGSSYMMERPPQMFSDENPNACVIS

SEQ ID NO: 14980 - protein, 314 aa, Triticum aestivum
  peptide (1)..(314): Ceres Seq. ID no. 13597530
  misc_feature (249)..(300): Pfam Name: Pfam Description:  Extensin-like region
  misc_feature (1)..(215): NCBI GI NO: 21594005 NR Description: unknown [Arabidopsis thaliana]
  misc_feature (288)..(314): NCBI GI NO: 21594005 NR Description: unknown [Arabidopsis thaliana]
  misc_feature (1)..(215): NCBI GI NO: 18420811 NR Description: copper-binding protein family
  misc_feature (288)..(314): NCBI GI NO: 18420811 NR Description: copper-binding protein family
  misc_feature (1)..(191): NCBI GI NO: 18424719 NR Description: copper chaperone (CCH)-related
  misc_feature (262)..(313): NCBI GI NO: 18424719 NR Description: copper chaperone (CCH)-related
  misc_feature (1)..(191): NCBI GI NO: 9758294 NR Description: contains similarity to ATFP3~gene_id:MLE2.16
  misc_feature (262)..(313): NCBI GI NO: 9758294 NR Description: contains similarity to ATFP3~gene_id:MLE2.16
  misc_feature (1)..(191): NCBI GI NO: 4097547 NR Description: ATFP3 [Arabidopsis thaliana]
  misc_feature (290)..(313): NCBI GI NO: 4097547 NR Description: ATFP3 [Arabidopsis thaliana]
MSANQVTIKGAVDPQALCDRLRAKTKRDATLISPLPPPPPAEGEEPPPPPPPAPPLVSEARTVELLVNMHCEACAQQLQTKMMRMKGVVSAQTDLAAGRLTLSATVEDEKIVEYIHRRTGKIASVVPPPPPEPPKEEEPPAPAADAEPPKDEAPADGKKEEAGDNKAAEDGKGAAEAGEEKKEGAGEEDQKPGKQEGVAVDGFPPEEMMKRMVYWPYGGAPGGGIHYKLHPADAEEAMMARRMAMHAMPPPMPPPPHHHHHNPYAMMHQQWAPPPPPPPPGMPMYNSYNYGSSYMMERPPQMFSDENPNACVIS

SEQ ID NO: 14981 - protein, 246 aa, Triticum aestivum
  peptide (1)..(246): Ceres Seq. ID no. 13597531
  misc_feature (181)..(232): Pfam Name: Pfam Description:  Extensin-like region
  misc_feature (1)..(147): NCBI GI NO: 21594005 NR Description: unknown [Arabidopsis thaliana]
  misc_feature (220)..(246): NCBI GI NO: 21594005 NR Description: unknown [Arabidopsis thaliana]
  misc_feature (1)..(147): NCBI GI NO: 18420811 NR Description: copper-binding protein family
  misc_feature (220)..(246): NCBI GI NO: 18420811 NR Description: copper-binding protein family
  misc_feature (1)..(123): NCBI GI NO: 18424719 NR Description: copper chaperone (CCH)-related
  misc_feature (194)..(245): NCBI GI NO: 18424719 NR Description: copper chaperone (CCH)-related
  misc_feature (1)..(123): NCBI GI NO: 9758294 NR Description: contains similarity to ATFP3~gene_id:MLE2.16
  misc_feature (194)..(245): NCBI GI NO: 9758294 NR Description: contains similarity to ATFP3~gene_id:MLE2.16
  misc_feature (1)..(123): NCBI GI NO: 4097547 NR Description: ATFP3 [Arabidopsis thaliana]
  misc_feature (222)..(245): NCBI GI NO: 4097547 NR Description: ATFP3 [Arabidopsis thaliana]
MHCEACAQQLQTKMMRMKGVVSAQTDLAAGRLTLSATVEDEKIVEYIHRRTGKIASVVPPPPPEPPKEEEPPAPAADAEPPKDEAPADGKKEEAGDNKAAEDGKGAAEAGEEKKEGAGEEDQKPGKQEGVAVDGFPPEEMMKRMVYWPYGGAPGGGIHYKLHPADAEEAMMARRMAMHAMPPPMPPPPHHHHHNPYAMMHQQWAPPPPPPPPGMPMYNSYNYGSSYMMERPPQMFSDENPNACVIS

SEQ ID NO: 14982 - DNA, 1106 bp, Triticum aestivum
  misc_feature (1)..(1106): Ceres Seq. ID no. 13597725
ctttcagccccacctcgcctccctccatccccctccattaaagcccgcgccctcctcctccgctccattcccctcgccaccgcccagatccagaccatgacggtgccgccgtcgccggagccgttccgcgtcttcgtcgggtacgacccgaaggagcacgaggcctacgaggtgtgtcgccgcagcctgatccgccacgccaccgtgccgctcgacgtgcgccccatccggcagccggacctccgcgcgtcggggctctactggcgcacgcggggtcacatggagagcactgagttctccttcacccgcttcctcacccccttcctcgccggctaccgcggctgggcgctcttcatcgactgcgacttcctctacctcgccgacgtcgccgagctcatcgcctccgccgtgccctcggacgctgccgccgccaagcgcctcgccgtcgtctgcgtcaagcacgagtacaagcccctcgaggccaccaagatggacggcgccatgcagaccgtgtacccgcgcaagaactggtcctccatggtgctctacaactgcgcccaccccaagaacgtcgccgcgctcaccccggacgccgtcagcaccaagaccggcgccttcctccaccgattctcctggctcgacgacgacgagatcggggaggtgcccttcgtctggaacttcctcgtcggccacaacagggtcgaccctgacgacccggccacgcagcccaaggccctgcactacacctgcgggggaccctggttcgacaggtacagggactgcgagttcgccgacctctggatcaaggaggccgaggagctcagggcggagaaggagaagcgcagagccgagaaggagaggctcgagctcgaggacgacgaggacgacgaggggaattgatggatgatggggccggccaacaagttcactgcattgcattggttcttttgcgccgtgggaattctttcgattcaatctgtttgttatgctggtttcttggtataggtggtaggggaggccagagtagaatagctcgagtatattggtttagtatgctcttgtgtagtagctgcaatcgatctatgaatgaaccagtcctcattgcc

SEQ ID NO: 14983 - protein, 299 aa, Triticum aestivum
  peptide (1)..(299): Ceres Seq. ID no. 13597726
  misc_feature (32)..(299): NCBI GI NO: 37536068 NR Description: unknown protein
  misc_feature (40)..(289): NCBI GI NO: 34903402 NR Description: hypothetical protein~similar to Oryza sativachromosome 10
  misc_feature (40)..(280): NCBI GI NO: 15217806 NR Description: expressed protein [Arabidopsis thaliana]
  misc_feature (40)..(259): NCBI GI NO: 33864181 NR Description: conserved hypothetical protein
  misc_feature (39)..(259): NCBI GI NO: 33864719 NR Description: conserved hypothetical protein
  misc_feature (44)..(267): NCBI GI NO: 16264294 NR Description: conserved hypothetical protein
LSAPPRLPPSPSIKARALLLRSIPLATAQIQTMTVPPSPEPFRVFVGYDPKEHEAYEVCRRSLIRHATVPLDVRPIRQPDLRASGLYWRTRGHMESTEFSFTRFLTPFLAGYRGWALFIDCDFLYLADVAELIASAVPSDAAAAKRLAVVCVKHEYKPLEATKMDGAMQTVYPRKNWSSMVLYNCAHPKNVAALTPDAVSTKTGAFLHRFSWLDDDEIGEVPFVWNFLVGHNRVDPDDPATQPKALHYTCGGPWFDRYRDCEFADLWIKEAEELRAEKEKRRAEKERLELEDDEDDEGN

SEQ ID NO: 14984 - protein, 267 aa, Triticum aestivum
  peptide (1)..(267): Ceres Seq. ID no. 13597727
  misc_feature (1)..(267): NCBI GI NO: 37536068 NR Description: unknown protein
  misc_feature (8)..(257): NCBI GI NO: 34903402 NR Description: hypothetical protein~similar to Oryza sativachromosome 10
  misc_feature (8)..(248): NCBI GI NO: 15217806 NR Description: expressed protein [Arabidopsis thaliana]
  misc_feature (8)..(227): NCBI GI NO: 33864181 NR Description: conserved hypothetical protein
  misc_feature (7)..(227): NCBI GI NO: 33864719 NR Description: conserved hypothetical protein
  misc_feature (12)..(235): NCBI GI NO: 16264294 NR Description: conserved hypothetical protein
MTVPPSPEPFRVFVGYDPKEHEAYEVCRRSLIRHATVPLDVRPIRQPDLRASGLYWRTRGHMESTEFSFTRFLTPFLAGYRGWALFIDCDFLYLADVAELIASAVPSDAAAAKRLAVVCVKHEYKPLEATKMDGAMQTVYPRKNWSSMVLYNCAHPKNVAALTPDAVSTKTGAFLHRFSWLDDDEIGEVPFVWNFLVGHNRVDPDDPATQPKALHYTCGGPWFDRYRDCEFADLWIKEAEELRAEKEKRRAEKERLELEDDEDDEGN

SEQ ID NO: 14985 - protein, 206 aa, Triticum aestivum
  peptide (1)..(206): Ceres Seq. ID no. 13597728
  misc_feature (1)..(206): NCBI GI NO: 37536068 NR Description: unknown protein
  misc_feature (1)..(196): NCBI GI NO: 34903402 NR Description: hypothetical protein~similar to Oryza sativachromosome 10
  misc_feature (1)..(187): NCBI GI NO: 15217806 NR Description: expressed protein [Arabidopsis thaliana]
  misc_feature (1)..(166): NCBI GI NO: 33864181 NR Description: conserved hypothetical protein
  misc_feature (1)..(166): NCBI GI NO: 33864719 NR Description: conserved hypothetical protein
  misc_feature (1)..(174): NCBI GI NO: 16264294 NR Description: conserved hypothetical protein
MESTEFSFTRFLTPFLAGYRGWALFIDCDFLYLADVAELIASAVPSDAAAAKRLAVVCVKHEYKPLEATKMDGAMQTVYPRKNWSSMVLYNCAHPKNVAALTPDAVSTKTGAFLHRFSWLDDDEIGEVPFVWNFLVGHNRVDPDDPATQPKALHYTCGGPWFDRYRDCEFADLWIKEAEELRAEKEKRRAEKERLELEDDEDDEGN

SEQ ID NO: 14986 - DNA, 1846 bp, Triticum aestivum
  misc_feature (1)..(1846): Ceres Seq. ID no. 13597732
cctacccgatacgaaccaaccccagattttccccgggcgccgcagccgcatttcgtcgagcacaggacgcgcatggcgatggccgcgccccacgtctcgcactcgcagccacccgcagggcgcgccgctttattcgctcaccccaccaccgcgcagaactcctcccctctccgcctccctctcggccgcgccgccgtccggcccgtccgcctctacgccgtctccaccgatgccgcccctgccaccgccgccgccgcgatggacgccgtggccgactgggggctcaccccgctcgcggaggccgacccggaggtgtacgacctcatcgagcgcgagaagcggcgccagcgcacgggcatcgagctaatcgcgtccgagaacttcacctcgctcgccgtcatggaggcgctcggctccccgctcaccaacaagtactccgagggcatgcccggggcgcgctactacggcgggaacgaggtcatcgacgaggtcgaggagctctgccgcgcccgcgccctcaaggcgttccacctcgaccccgcttcctggggcgtcaacgtgcagccctactccggctcccccgccaacttcgccgcctacactgggctgctccaaccccacgagcgcatcatggggctcgatttgccgtccggaggacacctcactcatgggtactacacggccgggggcaagaagatttcggccacctccatctacttttcgagcttgccctacaaggtgagctccgacaccgggtacgtcgactatgataggctggaggagaaggccatggatttccgccccaagctcattatctgtggcgggagcgcgtacccacgggactgggattatgccaggcttagggccatcgcggacaagtgcggggccatgttgctgtgtgacatggctcatatcagcggtctcgttgccgctcaggaggctacgaatccgtttgagtattctgatgtggttaccaccaccacccacaagagtctccgagggccaaggtctggtatgatattctacaggaagggcccgaagcctcccaaaaaaggccagcccgagggtgctctttacgattacgaggacaagatcaactttgcagtgtttccatcactccagggcggccctcacaaccaccagattgctgccctggcagttggcctgaagcaggcaatgtcacctggattcaaggcatatattcagcaggtcaaggccaatgctgttgcccttggaaaccatctgatgagtaagggctacaagatggttactgacggaacagagaaccaccttgttctctgggatcttcgccctcttggcttgtctggtaacaaagttgagaaagtatgtgatctgagcagcattacactcaacaaaaatgccgtctttggtgacagcagtgcactggcacctggtggtgtgcgaattggtacacctgccatgacctcgagaggtttggtcgagaaggactttgtgaagattgctgagtaccttcatcaggctgtagtcatctgcttgaatgtccagaagcagcgaggtaagcgttacaatgatttcatcgttgacttggagaagaacgaggacatcgcggagctcagggcagaggtcgagaagtttgccattgcatttgagatgcctggcttccgggtgtcagacatgaaatacaaggattaggctgtggtaccatgcagatcgttttcttgtagcagcaaattggtgcccttaaggggctgattgctgtgctctattcgtgatgtatgattatggttgagaatgatatgactcatgaataatcattgaaggcatgccataacatggagatggtatttcctagcctcagttttcc

SEQ ID NO: 14987 - protein, 557 aa, Triticum aestivum
  peptide (1)..(557): Ceres Seq. ID no. 13597733
  misc_feature (98)..(498): Pfam Name: Pfam Description:  Serine hydroxymethyltransferase
  misc_feature (87)..(557): NCBI GI NO: 15236375 NR Description: hydroxymethyltransferase [Arabidopsis thaliana]
  misc_feature (87)..(557): NCBI GI NO: 11762130 NR Description: AT4g13930 [Arabidopsis thaliana]
  misc_feature (87)..(557): NCBI GI NO: 21592544 NR Description: hydroxymethyltransferase [Arabidopsis thaliana]
  misc_feature (87)..(554): NCBI GI NO: 15236371 NR Description: glycine hydroxymethyltransferase - like protein
  misc_feature (89)..(546): NCBI GI NO: 18400090 NR Description: hydroxymethyltransferase -related
  misc_feature (89)..(546): NCBI GI NO: 25286207 NR Description: probable hydroxymethyltransferase, 49598-47322
  misc_feature (89)..(546): NCBI GI NO: 21537165 NR Description: putative hydroxymethyltransferase
  misc_feature (64)..(550): NCBI GI NO: 34907298 NR Description: putative hydroxymethyltransferase
  misc_feature (56)..(548): NCBI GI NO: 15219182 NR Description: glycine hydroxymethyltransferase -related
  misc_feature (98)..(557): NCBI GI NO: 17066746 NR Description: serine hydroxymethyltransferase
PTRYEPTPDFPRAPQPHFVEHRTRMAMAAPHVSHSQPPAGRAALFAHPTTAQNSSPLRLPLGRAAVRPVRLYAVSTDAAPATAAAAMDAVADWGLTPLAEADPEVYDLIEREKRRQRTGIELIASENFTSLAVMEALGSPLTNKYSEGMPGARYYGGNEVIDEVEELCRARALKAFHLDPASWGVNVQPYSGSPANFAAYTGLLQPHERIMGLDLPSGGHLTHGYYTAGGKKISATSIYFSSLPYKVSSDTGYVDYDRLEEKAMDFRPKLIICGGSAYPRDWDYARLRAIADKCGAMLLCDMAHISGLVAAQEATNPFEYSDVVTTTTHKSLRGPRSGMIFYRKGPKPPKKGQPEGALYDYEDKINFAVFPSLQGGPHNHQIAALAVGLKQAMSPGFKAYIQQVKANAVALGNHLMSKGYKMVTDGTENHLVLWDLRPLGLSGNKVEKVCDLSSITLNKNAVFGDSSALAPGGVRIGTPAMTSRGLVEKDFVKIAEYLHQAVVICLNVQKQRGKRYNDFIVDLEKNEDIAELRAEVEKFAIAFEMPGFRVSDMKYKD

SEQ ID NO: 14988 - protein, 533 aa, Triticum aestivum
  peptide (1)..(533): Ceres Seq. ID no. 13597734
  misc_feature (74)..(474): Pfam Name: Pfam Description:  Serine hydroxymethyltransferase
  misc_feature (63)..(533): NCBI GI NO: 15236375 NR Description: hydroxymethyltransferase [Arabidopsis thaliana]
  misc_feature (63)..(533): NCBI GI NO: 11762130 NR Description: AT4g13930 [Arabidopsis thaliana]
  misc_feature (63)..(533): NCBI GI NO: 21592544 NR Description: hydroxymethyltransferase [Arabidopsis thaliana]
  misc_feature (63)..(530): NCBI GI NO: 15236371 NR Description: glycine hydroxymethyltransferase - like protein
  misc_feature (65)..(522): NCBI GI NO: 18400090 NR Description: hydroxymethyltransferase -related
  misc_feature (65)..(522): NCBI GI NO: 25286207 NR Description: probable hydroxymethyltransferase, 49598-47322
  misc_feature (65)..(522): NCBI GI NO: 21537165 NR Description: putative hydroxymethyltransferase
  misc_feature (40)..(526): NCBI GI NO: 34907298 NR Description: putative hydroxymethyltransferase
  misc_feature (32)..(524): NCBI GI NO: 15219182 NR Description: glycine hydroxymethyltransferase -related
  misc_feature (74)..(533): NCBI GI NO: 17066746 NR Description: serine hydroxymethyltransferase
MAMAAPHVSHSQPPAGRAALFAHPTTAQNSSPLRLPLGRAAVRPVRLYAVSTDAAPATAAAAMDAVADWGLTPLAEADPEVYDLIEREKRRQRTGIELIASENFTSLAVMEALGSPLTNKYSEGMPGARYYGGNEVIDEVEELCRARALKAFHLDPASWGVNVQPYSGSPANFAAYTGLLQPHERIMGLDLPSGGHLTHGYYTAGGKKISATSIYFSSLPYKVSSDTGYVDYDRLEEKAMDFRPKLIICGGSAYPRDWDYARLRAIADKCGAMLLCDMAHISGLVAAQEATNPFEYSDVVTTTTHKSLRGPRSGMIFYRKGPKPPKKGQPEGALYDYEDKINFAVFPSLQGGPHNHQIAALAVGLKQAMSPGFKAYIQQVKANAVALGNHLMSKGYKMVTDGTENHLVLWDLRPLGLSGNKVEKVCDLSSITLNKNAVFGDSSALAPGGVRIGTPAMTSRGLVEKDFVKIAEYLHQAVVICLNVQKQRGKRYNDFIVDLEKNEDIAELRAEVEKFAIAFEMPGFRVSDMKYKD

SEQ ID NO: 14989 - protein, 531 aa, Triticum aestivum
  peptide (1)..(531): Ceres Seq. ID no. 13597735
  misc_feature (72)..(472): Pfam Name: Pfam Description:  Serine hydroxymethyltransferase
  misc_feature (61)..(531): NCBI GI NO: 15236375 NR Description: hydroxymethyltransferase [Arabidopsis thaliana]
  misc_feature (61)..(531): NCBI GI NO: 11762130 NR Description: AT4g13930 [Arabidopsis thaliana]
  misc_feature (61)..(531): NCBI GI NO: 21592544 NR Description: hydroxymethyltransferase [Arabidopsis thaliana]
  misc_feature (61)..(528): NCBI GI NO: 15236371 NR Description: glycine hydroxymethyltransferase - like protein
  misc_feature (63)..(520): NCBI GI NO: 18400090 NR Description: hydroxymethyltransferase -related
  misc_feature (63)..(520): NCBI GI NO: 25286207 NR Description: probable hydroxymethyltransferase, 49598-47322
  misc_feature (63)..(520): NCBI GI NO: 21537165 NR Description: putative hydroxymethyltransferase
  misc_feature (38)..(524): NCBI GI NO: 34907298 NR Description: putative hydroxymethyltransferase
  misc_feature (30)..(522): NCBI GI NO: 15219182 NR Description: glycine hydroxymethyltransferase -related
  misc_feature (72)..(531): NCBI GI NO: 17066746 NR Description: serine hydroxymethyltransferase
MAAPHVSHSQPPAGRAALFAHPTTAQNSSPLRLPLGRAAVRPVRLYAVSTDAAPATAAAAMDAVADWGLTPLAEADPEVYDLIEREKRRQRTGIELIASENFTSLAVMEALGSPLTNKYSEGMPGARYYGGNEVIDEVEELCRARALKAFHLDPASWGVNVQPYSGSPANFAAYTGLLQPHERIMGLDLPSGGHLTHGYYTAGGKKISATSIYFSSLPYKVSSDTGYVDYDRLEEKAMDFRPKLIICGGSAYPRDWDYARLRAIADKCGAMLLCDMAHISGLVAAQEATNPFEYSDVVTTTTHKSLRGPRSGMIFYRKGPKPPKKGQPEGALYDYEDKINFAVFPSLQGGPHNHQIAALAVGLKQAMSPGFKAYIQQVKANAVALGNHLMSKGYKMVTDGTENHLVLWDLRPLGLSGNKVEKVCDLSSITLNKNAVFGDSSALAPGGVRIGTPAMTSRGLVEKDFVKIAEYLHQAVVICLNVQKQRGKRYNDFIVDLEKNEDIAELRAEVEKFAIAFEMPGFRVSDMKYKD

SEQ ID NO: 14990 - DNA, 1415 bp, Triticum aestivum
  misc_feature (1)..(1415): Ceres Seq. ID no. 14302852
atcacaccatcacgatcgagcactcgcaacagcttcactcaactcgcagtgaagatcacctagagaccgactagcagtgatcgatggcgtccgtccggcgcccgtgcgcggtggcgctgctcgcctgcgccgccgcattcctcgtgacggtcggtgcccagccgaaggacaaccccattttgtcggaccccaacgtggtccccatctacatgagccccggcgcgcagcccaccgtggtgagctgctacaaccagagcagcccgtcgcaggccccagagtgcatgattccggtgcgccggtgccccgccggctgccgcgacctctgctacgtgcactgccccagctgcaagctcgtctgcatgtgtgaactggccggcacggagtgctacgacccgcgcttcgtgggtggcgacggcaacaagttcctcttccacggccgcagggacgccgacttctgcctgctctccgacgccaacctgcacatcaacgcgcacttcatcggcaagcgcaacgtgaaggcggcgcgtgacttcacatgggtgcaggcgctcggcatccgcttcggtggccaccgcctctacctcggcgtcaagaggacggtcacctgggacaacgccgtcgaccgcctcgtcatcaccttcgacggcgtgcccgtcgagctggacgcggcgccggccgccagctggagcccggcctccgcgcccgcgctgtctgtcttccgcatcggcaaggccaacggcgtggtggtgcgcctcgacggccggttccgcatcgtcgccaacgcggtgccggtgaccgaggaggactcgagggtccacgactacggcctcaccgccgacgacagcctcgcgcacctcaacgtcgcgttcaagttcaactccatcagcgccgacgtgcacggcgtgctcggccagacctaccgcccggactacgtcagcgccggggttgacatgggcgccaagatcccggtgatggggggtgccgcaaagtaccaggtgtcggacatcttcgggacggactgcgaggtggcgcgcttcgccggagaggacgtcgtccgcgtcggggcggtcgacatgatcgacgagccggccgacaccatgtgcggcagcggcaagggcagcgccgggctggtctgcaagaagtgatgtggtatcgcgagctgattttgcttcgttaccctcgtaagtgtgcccatacacgtctacgtgctcgctgctgctacactacattatcggtagtacctccgcatttcagaataaataaccgctggtgatgtcgtgtcgttgtgtgttagtcaatcgatagtcgtgtagggcaacgttggaaatccaggcgttgctcggtgtaacaggctactttttttccctccatgttttttcaaatgtaatgattgaacaatcaagtttgtgatttac

SEQ ID NO: 14991 - protein, 353 aa, Triticum aestivum
  peptide (1)..(353): Ceres Seq. ID no. 14302853
  misc_feature (6)..(353): NCBI GI NO: 21741738 NR Description: OSJNBa0073L04.2
  misc_feature (7)..(353): NCBI GI NO: 4514637 NR Description: root cap protein 2 [Zea mays]
  misc_feature (9)..(318): NCBI GI NO: 34905936 NR Description: similar to root cap protein
  misc_feature (11)..(318): NCBI GI NO: 34905930 NR Description: similar to root cap protein
  misc_feature (8)..(318): NCBI GI NO: 34905940 NR Description: similar to root cap protein
  misc_feature (8)..(320): NCBI GI NO: 4514635 NR Description: root cap protein 1 [Zea mays]
  misc_feature (9)..(318): NCBI GI NO: 34905934 NR Description: similar to root cap protein
  misc_feature (27)..(353): NCBI GI NO: 11994465 NR Description: contains similarity to late embryogenesis abundantprotein~gene_id:MLD14
  misc_feature (27)..(353): NCBI GI NO: 30685319 NR Description: late embryogenesis abundant protein -related
  misc_feature (64)..(353): NCBI GI NO: 7484468 NR Description: late embryonic abundant protein EMB7
MASVRRPCAVALLACAAAFLVTVGAQPKDNPILSDPNVVPIYMSPGAQPTVVSCYNQSSPSQAPECMIPVRRCPAGCRDLCYVHCPSCKLVCMCELAGTECYDPRFVGGDGNKFLFHGRRDADFCLLSDANLHINAHFIGKRNVKAARDFTWVQALGIRFGGHRLYLGVKRTVTWDNAVDRLVITFDGVPVELDAAPAASWSPASAPALSVFRIGKANGVVVRLDGRFRIVANAVPVTEEDSRVHDYGLTADDSLAHLNVAFKFNSISADVHGVLGQTYRPDYVSAGVDMGAKIPVMGGAAKYQVSDIFGTDCEVARFAGEDVVRVGAVDMIDEPADTMCGSGKGSAGLVCKK

SEQ ID NO: 14992 - protein, 311 aa, Triticum aestivum
  peptide (1)..(311): Ceres Seq. ID no. 14302854
  misc_feature (1)..(311): NCBI GI NO: 21741738 NR Description: OSJNBa0073L04.2
  misc_feature (1)..(311): NCBI GI NO: 4514637 NR Description: root cap protein 2 [Zea mays]
  misc_feature (1)..(276): NCBI GI NO: 34905936 NR Description: similar to root cap protein
  misc_feature (1)..(276): NCBI GI NO: 34905930 NR Description: similar to root cap protein
  misc_feature (1)..(276): NCBI GI NO: 34905940 NR Description: similar to root cap protein
  misc_feature (1)..(278): NCBI GI NO: 4514635 NR Description: root cap protein 1 [Zea mays]
  misc_feature (1)..(276): NCBI GI NO: 34905934 NR Description: similar to root cap protein
  misc_feature (1)..(311): NCBI GI NO: 11994465 NR Description: contains similarity to late embryogenesis abundantprotein~gene_id:MLD14
  misc_feature (1)..(311): NCBI GI NO: 30685319 NR Description: late embryogenesis abundant protein -related
  misc_feature (22)..(311): NCBI GI NO: 7484468 NR Description: late embryonic abundant protein EMB7
MSPGAQPTVVSCYNQSSPSQAPECMIPVRRCPAGCRDLCYVHCPSCKLVCMCELAGTECYDPRFVGGDGNKFLFHGRRDADFCLLSDANLHINAHFIGKRNVKAARDFTWVQALGIRFGGHRLYLGVKRTVTWDNAVDRLVITFDGVPVELDAAPAASWSPASAPALSVFRIGKANGVVVRLDGRFRIVANAVPVTEEDSRVHDYGLTADDSLAHLNVAFKFNSISADVHGVLGQTYRPDYVSAGVDMGAKIPVMGGAAKYQVSDIFGTDCEVARFAGEDVVRVGAVDMIDEPADTMCGSGKGSAGLVCKK

SEQ ID NO: 14993 - protein, 287 aa, Triticum aestivum
  peptide (1)..(287): Ceres Seq. ID no. 14302855
  misc_feature (1)..(287): NCBI GI NO: 21741738 NR Description: OSJNBa0073L04.2
  misc_feature (1)..(287): NCBI GI NO: 4514637 NR Description: root cap protein 2 [Zea mays]
  misc_feature (1)..(252): NCBI GI NO: 34905936 NR Description: similar to root cap protein
  misc_feature (1)..(252): NCBI GI NO: 34905930 NR Description: similar to root cap protein
  misc_feature (1)..(252): NCBI GI NO: 34905940 NR Description: similar to root cap protein
  misc_feature (1)..(254): NCBI GI NO: 4514635 NR Description: root cap protein 1 [Zea mays]
  misc_feature (1)..(252): NCBI GI NO: 34905934 NR Description: similar to root cap protein
  misc_feature (1)..(287): NCBI GI NO: 11994465 NR Description: contains similarity to late embryogenesis abundantprotein~gene_id:MLD14
  misc_feature (1)..(287): NCBI GI NO: 30685319 NR Description: late embryogenesis abundant protein -related
  misc_feature (1)..(287): NCBI GI NO: 7484468 NR Description: late embryonic abundant protein EMB7
MIPVRRCPAGCRDLCYVHCPSCKLVCMCELAGTECYDPRFVGGDGNKFLFHGRRDADFCLLSDANLHINAHFIGKRNVKAARDFTWVQALGIRFGGHRLYLGVKRTVTWDNAVDRLVITFDGVPVELDAAPAASWSPASAPALSVFRIGKANGVVVRLDGRFRIVANAVPVTEEDSRVHDYGLTADDSLAHLNVAFKFNSISADVHGVLGQTYRPDYVSAGVDMGAKIPVMGGAAKYQVSDIFGTDCEVARFAGEDVVRVGAVDMIDEPADTMCGSGKGSAGLVCKK

SEQ ID NO: 14994 - DNA, 1284 bp, Triticum aestivum
  misc_feature (1)..(1284): Ceres Seq. ID no. 15179788
acccacgacgcggacactactttgtacgcaggcagcgtctttccccttcctcttttgcctcccatctcccctctccgctcccactccacagtccacccagccgcggccggaagagcaggaggacgggatgagctccgggacggggaaggtggtgtgcgtcaccggcgcctcgggctacatcgcctcctggctcgtcaagttcctcctccagcgcggctacaccgtccgcgccaccgtcagggacaccgccgaccccaagaaaacattgcacctgcaggccctggatggagccaaggacaggctgcacttgtttaaagcaagcttgttggaagaaggcaccttcgatgatgctgttgccggctgcgattgtgtcttccacacggcatctcccttttatcacaatgtcaaggatcccaaggctgagttacttgatccagcagtcaatggaacgctcaatgttctccgttcctgcaagaaggcctctatcaagagagtgatcgtaacctcatccatggctgctgttgcctacaatgggaagccaaggactcctgatgtagtagttgacgagacatggttttcaagtgcagaggtctgcgaaaagaataagcaatggtatgtgctatccaagacccttgccgaggaggctgcatggaagtacgcaaatgataatggattagaaataattacaataaacccaacaatggtcatcggtcccctgttgcagcctacactgaatactagcacagaagcaatattgaagtttataaatggatcatcttctacatacgccaatttctgctttggatggataaacgttaaagatgttgccctggcacatatccttgcatatgaagttccttcagcaaacggaagatattgtatggttgaaagagtcattcaccactcggaccttgtcaagatcatacacgagatgtatcctgaatttccagtgccagacaagtgtgcagatgatgcgccgtttgccccaatctaccaggtatcaaaggacaggataagaagtctgggcatggagctgacccccctggagacgagcctcaaggagactatcgagagcttgagagagaaaggatttgtcacttctgagtcgagccatctgtgaaactttctttgctttggcatcactagtggcagacgctagatgcacacatgtttatgtgcacctgaaataaatcgaggcatagtgtattcttgagacatgtatttgtggatctgctgtgtttcaatggattcaagttcggagaatgtataaaaaaaaaaaaaaaa

SEQ ID NO: 14995 - protein, 372 aa, Triticum aestivum
  peptide (1)..(372): Ceres Seq. ID no. 15179789
  misc_feature (51)..(282): Pfam Name: Pfam Description:  3-beta hydroxysteroid dehydrogenase/ isomerase family
  misc_feature (35)..(372): NCBI GI NO: 34913420 NR Description: putative cinnamyl-alcohol dehydrogenase
  misc_feature (44)..(364): NCBI GI NO: 15239741 NR Description: cinnamyl-alcohol dehydrogenase (CAD), putative
  misc_feature (44)..(364): NCBI GI NO: 21594240 NR Description: cinnamyl-alcohol dehydrogenase-like protein
  misc_feature (43)..(366): NCBI GI NO: 37029996 NR Description: NADPH-dependent cinnamyl alcohol dehydrogenase
  misc_feature (43)..(365): NCBI GI NO: 7488627 NR Description: probable cinnamyl-alcohol dehydrogenase (EC1
  misc_feature (44)..(365): NCBI GI NO: 7431409 NR Description: cinnamyl-alcohol dehydrogenase (EC 1
  misc_feature (43)..(365): NCBI GI NO: 7431406 NR Description: probable cinnamyl-alcohol dehydrogenase (EC1
  misc_feature (43)..(365): NCBI GI NO: 30694964 NR Description: cinnamyl-alcohol dehydrogenase (CAD), putative
  misc_feature (49)..(365): NCBI GI NO: 25405464 NR Description: hypothetical protein F5D21.12
  misc_feature (43)..(365): NCBI GI NO: 5852203 NR Description: aldehyde reductase [Vigna radiata]
PTTRTLLCTQAASFPFLFCLPSPLSAPTPQSTQPRPEEQEDGMSSGTGKVVCVTGASGYIASWLVKFLLQRGYTVRATVRDTADPKKTLHLQALDGAKDRLHLFKASLLEEGTFDDAVAGCDCVFHTASPFYHNVKDPKAELLDPAVNGTLNVLRSCKKASIKRVIVTSSMAAVAYNGKPRTPDVVVDETWFSSAEVCEKNKQWYVLSKTLAEEAAWKYANDNGLEIITINPTMVIGPLLQPTLNTSTEAILKFINGSSSTYANFCFGWINVKDVALAHILAYEVPSANGRYCMVERVIHHSDLVKIIHEMYPEFPVPDKCADDAPFAPIYQVSKDRIRSLGMELTPLETSLKETIESLREKGFVTSESSHL

SEQ ID NO: 14996 - protein, 330 aa, Triticum aestivum
  peptide (1)..(330): Ceres Seq. ID no. 15179790
  misc_feature (9)..(240): Pfam Name: Pfam Description:  3-beta hydroxysteroid dehydrogenase/ isomerase family
  misc_feature (1)..(330): NCBI GI NO: 34913420 NR Description: putative cinnamyl-alcohol dehydrogenase
  misc_feature (2)..(322): NCBI GI NO: 15239741 NR Description: cinnamyl-alcohol dehydrogenase (CAD), putative
  misc_feature (2)..(322): NCBI GI NO: 21594240 NR Description: cinnamyl-alcohol dehydrogenase-like protein
  misc_feature (1)..(324): NCBI GI NO: 37029996 NR Description: NADPH-dependent cinnamyl alcohol dehydrogenase
  misc_feature (1)..(323): NCBI GI NO: 7488627 NR Description: probable cinnamyl-alcohol dehydrogenase (EC1
  misc_feature (2)..(323): NCBI GI NO: 7431409 NR Description: cinnamyl-alcohol dehydrogenase (EC 1
  misc_feature (1)..(323): NCBI GI NO: 7431406 NR Description: probable cinnamyl-alcohol dehydrogenase (EC1
  misc_feature (1)..(323): NCBI GI NO: 30694964 NR Description: cinnamyl-alcohol dehydrogenase (CAD), putative
  misc_feature (7)..(323): NCBI GI NO: 25405464 NR Description: hypothetical protein F5D21.12
  misc_feature (1)..(323): NCBI GI NO: 5852203 NR Description: aldehyde reductase [Vigna radiata]
MSSGTGKVVCVTGASGYIASWLVKFLLQRGYTVRATVRDTADPKKTLHLQALDGAKDRLHLFKASLLEEGTFDDAVAGCDCVFHTASPFYHNVKDPKAELLDPAVNGTLNVLRSCKKASIKRVIVTSSMAAVAYNGKPRTPDVVVDETWFSSAEVCEKNKQWYVLSKTLAEEAAWKYANDNGLEIITINPTMVIGPLLQPTLNTSTEAILKFINGSSSTYANFCFGWINVKDVALAHILAYEVPSANGRYCMVERVIHHSDLVKIIHEMYPEFPVPDKCADDAPFAPIYQVSKDRIRSLGMELTPLETSLKETIESLREKGFVTSESSHL

SEQ ID NO: 14997 - protein, 202 aa, Triticum aestivum
  peptide (1)..(202): Ceres Seq. ID no. 15179791
  misc_feature (1)..(112): Pfam Name: Pfam Description:  3-beta hydroxysteroid dehydrogenase/ isomerase family
  misc_feature (1)..(202): NCBI GI NO: 34913420 NR Description: putative cinnamyl-alcohol dehydrogenase
  misc_feature (1)..(194): NCBI GI NO: 15239741 NR Description: cinnamyl-alcohol dehydrogenase (CAD), putative
  misc_feature (1)..(194): NCBI GI NO: 21594240 NR Description: cinnamyl-alcohol dehydrogenase-like protein
  misc_feature (1)..(196): NCBI GI NO: 37029996 NR Description: NADPH-dependent cinnamyl alcohol dehydrogenase
  misc_feature (1)..(195): NCBI GI NO: 7488627 NR Description: probable cinnamyl-alcohol dehydrogenase (EC1
  misc_feature (1)..(195): NCBI GI NO: 7431409 NR Description: cinnamyl-alcohol dehydrogenase (EC 1
  misc_feature (1)..(195): NCBI GI NO: 7431406 NR Description: probable cinnamyl-alcohol dehydrogenase (EC1
  misc_feature (1)..(195): NCBI GI NO: 30694964 NR Description: cinnamyl-alcohol dehydrogenase (CAD), putative
  misc_feature (1)..(195): NCBI GI NO: 25405464 NR Description: hypothetical protein F5D21.12
  misc_feature (1)..(195): NCBI GI NO: 5852203 NR Description: aldehyde reductase [Vigna radiata]
MAAVAYNGKPRTPDVVVDETWFSSAEVCEKNKQWYVLSKTLAEEAAWKYANDNGLEIITINPTMVIGPLLQPTLNTSTEAILKFINGSSSTYANFCFGWINVKDVALAHILAYEVPSANGRYCMVERVIHHSDLVKIIHEMYPEFPVPDKCADDAPFAPIYQVSKDRIRSLGMELTPLETSLKETIESLREKGFVTSESSHL

SEQ ID NO: 14998 - DNA, 1345 bp, Triticum aestivum
  misc_feature (1)..(1345): Ceres Seq. ID no. 13503553
ttttccggtaccaaacgtcaccttcttcccagcttcctcctccgtccacccacgccgccgacgcgcctccgccggtccggtctacatataccagcgccctcgccatcccccatttccttcctccccaacccgccattttccgtcctcaccgagacggttcccatccccgcgcatctgcctctgccgtctccgcccggtgccatcttcttcgctcactccgcgcaggccaactaatctttctgatcggccggccggtcgaaatgggccacgagggagccaagtacggcgacgacggccgccccacctgcgactgcctcctcttcgaccttgatgacacgctctacccggtgggatcaggcatcggcctcgacgtcatgaagaacatccaagaatacatggtcgagaagctcggcatcgacaagagcatcagccacgagctctgcatcctgctgtacaagcagtacggaaccaccatggccggtctgcgggctgtcgggtaccagttcgactacgatgatttccacggctttgttcatggaaggttggcctacgaaaagctcaagcctgaccctgtgctcaggaacatccttctgagcctaccaatccgcaaactcgtgttcacgaatggtgacaggctccatgcttcgagggccatgaagaggcttgggatcgaggactgctttgagggagttctgtgctttgagacattgaacccgccatcgcccactcctgcgccagccagcaaagttgagatctttgatataatgaagcacctggctcatccggagcctggggttgagctgccaaggtcaccaatcctgtgcaaaccgaatatagatgcaatgctgcatgccctcaagcttgccgacatcaatcctcagactactatattttttgatgacagcgtcaggaacatccaggccgggaagcaaatcggaatgcacactgtcctggttggaacttctgaaaagattaaaggtgctgaccatgccttggaaagcctccacaacatgaaggaagcgtttccagaactgtgggaggaggctgtgaaggatgaggacgtcaggaaatcgagcaaagttggaatcgagacatcggtgatcgcttaaaatccctcatgaactgactcatggttttgggcaaagggcacatgagacgaccagatccagtatctgtttgtctgacagtagacatgctgattagaccaagagaaaattgttgtaatcgttaagggaactgatgccactttcgttatgtttgtcccttgtaataagaaataaaatgttctgaacctcgctgtaactccgttcacggggcaatagacctgctatgctagtactatttg

SEQ ID NO: 14999 - protein, 368 aa, Triticum aestivum
  peptide (1)..(368): Ceres Seq. ID no. 13503554
  misc_feature (103)..(321): Pfam Name: Pfam Description:  haloacid dehalogenase-like hydrolase
  misc_feature (92)..(241): NCBI GI NO: 34906034 NR Description: P0518C01.30
  misc_feature (270)..(368): NCBI GI NO: 34906034 NR Description: P0518C01.30
  misc_feature (93)..(238): NCBI GI NO: 7406669 NR Description: putative ripening-related protein [Vitis vinifera]
  misc_feature (235)..(368): NCBI GI NO: 7406669 NR Description: putative ripening-related protein [Vitis vinifera]
  misc_feature (93)..(368): NCBI GI NO: 15241720 NR Description: haloacid dehalogenase-like hydrolase family
  misc_feature (93)..(368): NCBI GI NO: 21593165 NR Description: unknown [Arabidopsis thaliana]
  misc_feature (103)..(364): NCBI GI NO: 30697234 NR Description: haloacid dehalogenase-like hydrolase family
  misc_feature (103)..(364): NCBI GI NO: 30697236 NR Description: haloacid dehalogenase-like hydrolase family
  misc_feature (103)..(364): NCBI GI NO: 21618155 NR Description: putative ripening-related protein-like
  misc_feature (100)..(368): NCBI GI NO: 8885554 NR Description: ripening-related protein-like; hydrolase-like
FRYQTSPSSQLPPPSTHAADAPPPVRSTYTSALAIPHFLPPQPAIFRPHRDGSHPRASASAVSARCHLLRSLRAGQLIFLIGRPVEMGHEGAKYGDDGRPTCDCLLFDLDDTLYPVGSGIGLDVMKNIQEYMVEKLGIDKSISHELCILLYKQYGTTMAGLRAVGYQFDYDDFHGFVHGRLAYEKLKPDPVLRNILLSLPIRKLVFTNGDRLHASRAMKRLGIEDCFEGVLCFETLNPPSPTPAPASKVEIFDIMKHLAHPEPGVELPRSPILCKPNIDAMLHALKLADINPQTTIFFDDSVRNIQAGKQIGMHTVLVGTSEKIKGADHALESLHNMKEAFPELWEEAVKDEDVRKSSKVGIETSVIA

SEQ ID NO: 15000 - protein, 282 aa, Triticum aestivum
  peptide (1)..(282): Ceres Seq. ID no. 13503555
  misc_feature (17)..(235): Pfam Name: Pfam Description:  haloacid dehalogenase-like hydrolase
  misc_feature (6)..(155): NCBI GI NO: 34906034 NR Description: P0518C01.30
  misc_feature (184)..(282): NCBI GI NO: 34906034 NR Description: P0518C01.30
  misc_feature (7)..(152): NCBI GI NO: 7406669 NR Description: putative ripening-related protein [Vitis vinifera]
  misc_feature (149)..(282): NCBI GI NO: 7406669 NR Description: putative ripening-related protein [Vitis vinifera]
  misc_feature (7)..(282): NCBI GI NO: 15241720 NR Description: haloacid dehalogenase-like hydrolase family
  misc_feature (7)..(282): NCBI GI NO: 21593165 NR Description: unknown [Arabidopsis thaliana]
  misc_feature (17)..(278): NCBI GI NO: 30697234 NR Description: haloacid dehalogenase-like hydrolase family
  misc_feature (17)..(278): NCBI GI NO: 30697236 NR Description: haloacid dehalogenase-like hydrolase family
  misc_feature (17)..(278): NCBI GI NO: 21618155 NR Description: putative ripening-related protein-like
  misc_feature (14)..(282): NCBI GI NO: 8885554 NR Description: ripening-related protein-like; hydrolase-like
MGHEGAKYGDDGRPTCDCLLFDLDDTLYPVGSGIGLDVMKNIQEYMVEKLGIDKSISHELCILLYKQYGTTMAGLRAVGYQFDYDDFHGFVHGRLAYEKLKPDPVLRNILLSLPIRKLVFTNGDRLHASRAMKRLGIEDCFEGVLCFETLNPPSPTPAPASKVEIFDIMKHLAHPEPGVELPRSPILCKPNIDAMLHALKLADINPQTTIFFDDSVRNIQAGKQIGMHTVLVGTSEKIKGADHALESLHNMKEAFPELWEEAVKDEDVRKSSKVGIETSVIA

SEQ ID NO: 15001 - protein, 244 aa, Triticum aestivum
  peptide (1)..(244): Ceres Seq. ID no. 13503556
  misc_feature (1)..(197): Pfam Name: Pfam Description:  haloacid dehalogenase-like hydrolase
  misc_feature (1)..(117): NCBI GI NO: 34906034 NR Description: P0518C01.30
  misc_feature (146)..(244): NCBI GI NO: 34906034 NR Description: P0518C01.30
  misc_feature (1)..(114): NCBI GI NO: 7406669 NR Description: putative ripening-related protein [Vitis vinifera]
  misc_feature (111)..(244): NCBI GI NO: 7406669 NR Description: putative ripening-related protein [Vitis vinifera]
  misc_feature (1)..(244): NCBI GI NO: 15241720 NR Description: haloacid dehalogenase-like hydrolase family
  misc_feature (1)..(244): NCBI GI NO: 21593165 NR Description: unknown [Arabidopsis thaliana]
  misc_feature (1)..(240): NCBI GI NO: 30697234 NR Description: haloacid dehalogenase-like hydrolase family
  misc_feature (1)..(240): NCBI GI NO: 30697236 NR Description: haloacid dehalogenase-like hydrolase family
  misc_feature (1)..(240): NCBI GI NO: 21618155 NR Description: putative ripening-related protein-like
  misc_feature (1)..(244): NCBI GI NO: 8885554 NR Description: ripening-related protein-like; hydrolase-like
MKNIQEYMVEKLGIDKSISHELCILLYKQYGTTMAGLRAVGYQFDYDDFHGFVHGRLAYEKLKPDPVLRNILLSLPIRKLVFTNGDRLHASRAMKRLGIEDCFEGVLCFETLNPPSPTPAPASKVEIFDIMKHLAHPEPGVELPRSPILCKPNIDAMLHALKLADINPQTTIFFDDSVRNIQAGKQIGMHTVLVGTSEKIKGADHALESLHNMKEAFPELWEEAVKDEDVRKSSKVGIETSVIA

SEQ ID NO: 15002 - DNA, 1896 bp, Triticum aestivum
  misc_feature (1)..(1896): Ceres Seq. ID no. 15169643
atcgcgtcacatccgagggaggcaaaaccctaggcagatccctcccgaagcctaccgcgaccttccgcccccggaggagatgcagggcggcaaccacatgctcctcgaggagcccgtccgcctcgcctccgtcctcgcccccgccaagcccaaagttttcccatccctcactaagattgttgggacgcttgggcccaactcgcactcagtcgaagtgattgaagaatgtctcactgctgggatgtcagttgcgcggtttgatttctcttggaaggatgctacttatcatcaggagaccctcgacaatctgaggaaagcggcacagaatgtgaagaagttatgtcctataatgctggatacagtgggtccagaaattcaggttcacaattcaactggtggagcaatcgagttgataggggggaatcatgtcacaataacaccagatctttctaaagctccttcggctgatatcctaccaattaaatttggcgatcttgcaaaagttgtgaagaagggtgatactcttttcattggtcaatatcttttcacaggaagtgaaacaacatctctatggcttgaagttacggagacttctggtgcagaagtgatttgttacgtgaagaacacagctacactgtcagggcccattttcactctgcatgtttcacaagtacatatcagtatgcccactttgagtgaatatgataaacaggtcatatcaacgtgggggctgcaaaacagtgttgacattatatcgctttcccatacccgctcttctgaagatgtcagggagcttagagcctttttaaaatctcatgatcttcaagacacacagatatatgcgaaggttgaaaatgctgagggtttggagcattttgatgaaattctccaagaggcggatggtatcatcatatcgcgaggagacctgggaattgacctcccaccagagagggtgttcatgtcccaaaagactggtattcataaatgcaacatggccggcaaacctgtgatcattactagagttgtggacagcatgattgacaatctgcgccctactcgcgcagaagctactgatgttgcaaatgctgtcctagatggaactgatggcattttgctcggtgcggagacacttcgagggcagtatcctgttgacgctgtgcgtactgtgggcagaatatgtgcagaagctgagaccgtgtataaccagtcacttcacttcaagaaagtagtgaggcatgtaggtgaaccaatggtccatgaagaatctgtggcatcatcagcggttcgttctgcaatgaaggtaaaagctgctgcaattgttgtgttcaccttctcggggagagctgctaggttaattgctaaatacagggccccaatgccagttttagcagttgtgttcccgcgtgagggctctgatccatcgaagtggcgttcttatggcacgacacaggcgaggcaatgtttttctgtgagaggtgtctaccctttgatggggagtactgacgatgctgaaactggtgggctcaccaaggaagaatacgggataaaacttgcactgaactatggccggtcagtaggcataataaagccatacgacagggtgattatttttgaaaagatcggtgattcctctgttgtcaagatcatcgagtgcgacgattctgaaagatgaatgacccttctcaggcaacagtttcaactatacgcctgagattgcctcctctttttgttctccattcactttgaccagagataaaagagtagtatagcacgacaaggttgtcatgtttagcaccttggtattttagatttacatacttgttgccctaataaagtgaagagagctcattcactcaaacatccaagttttggacaaaattataggattgttgagat

SEQ ID NO: 15003 - protein, 556 aa, Triticum aestivum
  peptide (1)..(556): Ceres Seq. ID no. 15169644
  misc_feature (421)..(550): Pfam Name: Pfam Description:  Pyruvate kinase, alpha/beta domain
  misc_feature (31)..(553): NCBI GI NO: 18404169 NR Description: pyruvate kinase, putative [Arabidopsis thaliana]
  misc_feature (31)..(553): NCBI GI NO: 21537122 NR Description: putative pyruvate kinase [Arabidopsis thaliana]
  misc_feature (31)..(553): NCBI GI NO: 18409740 NR Description: pyruvate kinase, putative [Arabidopsis thaliana]
  misc_feature (31)..(553): NCBI GI NO: 23308151 NR Description: At2g36580/F1O11.21 [Arabidopsis thaliana]
  misc_feature (41)..(553): NCBI GI NO: 11260409 NR Description: pyruvate kinase-like protein
  misc_feature (64)..(553): NCBI GI NO: 20562907 NR Description: pyruvate kinase-like [Deschampsia antarctica]
  misc_feature (81)..(553): NCBI GI NO: 25287747 NR Description: probable pyruvate kinase
  misc_feature (57)..(548): NCBI GI NO: 22296820 NR Description: pyruvate kinase [Glycine max]
  misc_feature (57)..(548): NCBI GI NO: 22296818 NR Description: pyruvate kinase [Glycine max]
  misc_feature (57)..(548): NCBI GI NO: 125606 NR Description: Pyruvate kinase, cytosolic isozyme
SRHIRGRQNPRQIPPEAYRDLPPPEEMQGGNHMLLEEPVRLASVLAPAKPKVFPSLTKIVGTLGPNSHSVEVIEECLTAGMSVARFDFSWKDATYHQETLDNLRKAAQNVKKLCPIMLDTVGPEIQVHNSTGGAIELIGGNHVTITPDLSKAPSADILPIKFGDLAKVVKKGDTLFIGQYLFTGSETTSLWLEVTETSGAEVICYVKNTATLSGPIFTLHVSQVHISMPTLSEYDKQVISTWGLQNSVDIISLSHTRSSEDVRELRAFLKSHDLQDTQIYAKVENAEGLEHFDEILQEADGIIISRGDLGIDLPPERVFMSQKTGIHKCNMAGKPVIITRVVDSMIDNLRPTRAEATDVANAVLDGTDGILLGAETLRGQYPVDAVRTVGRICAEAETVYNQSLHFKKVVRHVGEPMVHEESVASSAVRSAMKVKAAAIVVFTFSGRAARLIAKYRAPMPVLAVVFPREGSDPSKWRSYGTTQARQCFSVRGVYPLMGSTDDAETGGLTKEEYGIKLALNYGRSVGIIKPYDRVIIFEKIGDSSVVKIIECDDSER

SEQ ID NO: 15004 - protein, 530 aa, Triticum aestivum
  peptide (1)..(530): Ceres Seq. ID no. 15169645
  misc_feature (395)..(524): Pfam Name: Pfam Description:  Pyruvate kinase, alpha/beta domain
  misc_feature (5)..(527): NCBI GI NO: 18404169 NR Description: pyruvate kinase, putative [Arabidopsis thaliana]
  misc_feature (5)..(527): NCBI GI NO: 21537122 NR Description: putative pyruvate kinase [Arabidopsis thaliana]
  misc_feature (5)..(527): NCBI GI NO: 18409740 NR Description: pyruvate kinase, putative [Arabidopsis thaliana]
  misc_feature (5)..(527): NCBI GI NO: 23308151 NR Description: At2g36580/F1O11.21 [Arabidopsis thaliana]
  misc_feature (15)..(527): NCBI GI NO: 11260409 NR Description: pyruvate kinase-like protein
  misc_feature (38)..(527): NCBI GI NO: 20562907 NR Description: pyruvate kinase-like [Deschampsia antarctica]
  misc_feature (55)..(527): NCBI GI NO: 25287747 NR Description: probable pyruvate kinase
  misc_feature (31)..(522): NCBI GI NO: 22296820 NR Description: pyruvate kinase [Glycine max]
  misc_feature (31)..(522): NCBI GI NO: 22296818 NR Description: pyruvate kinase [Glycine max]
  misc_feature (31)..(522): NCBI GI NO: 125606 NR Description: Pyruvate kinase, cytosolic isozyme
MQGGNHMLLEEPVRLASVLAPAKPKVFPSLTKIVGTLGPNSHSVEVIEECLTAGMSVARFDFSWKDATYHQETLDNLRKAAQNVKKLCPIMLDTVGPEIQVHNSTGGAIELIGGNHVTITPDLSKAPSADILPIKFGDLAKVVKKGDTLFIGQYLFTGSETTSLWLEVTETSGAEVICYVKNTATLSGPIFTLHVSQVHISMPTLSEYDKQVISTWGLQNSVDIISLSHTRSSEDVRELRAFLKSHDLQDTQIYAKVENAEGLEHFDEILQEADGIIISRGDLGIDLPPERVFMSQKTGIHKCNMAGKPVIITRVVDSMIDNLRPTRAEATDVANAVLDGTDGILLGAETLRGQYPVDAVRTVGRICAEAETVYNQSLHFKKVVRHVGEPMVHEESVASSAVRSAMKVKAAAIVVFTFSGRAARLIAKYRAPMPVLAVVFPREGSDPSKWRSYGTTQARQCFSVRGVYPLMGSTDDAETGGLTKEEYGIKLALNYGRSVGIIKPYDRVIIFEKIGDSSVVKIIECDDSER

SEQ ID NO: 15005 - protein, 524 aa, Triticum aestivum
  peptide (1)..(524): Ceres Seq. ID no. 15169646
  misc_feature (389)..(518): Pfam Name: Pfam Description:  Pyruvate kinase, alpha/beta domain
  misc_feature (1)..(521): NCBI GI NO: 18404169 NR Description: pyruvate kinase, putative [Arabidopsis thaliana]
  misc_feature (1)..(521): NCBI GI NO: 21537122 NR Description: putative pyruvate kinase [Arabidopsis thaliana]
  misc_feature (1)..(521): NCBI GI NO: 18409740 NR Description: pyruvate kinase, putative [Arabidopsis thaliana]
  misc_feature (1)..(521): NCBI GI NO: 23308151 NR Description: At2g36580/F1O11.21 [Arabidopsis thaliana]
  misc_feature (9)..(521): NCBI GI NO: 11260409 NR Description: pyruvate kinase-like protein
  misc_feature (32)..(521): NCBI GI NO: 20562907 NR Description: pyruvate kinase-like [Deschampsia antarctica]
  misc_feature (49)..(521): NCBI GI NO: 25287747 NR Description: probable pyruvate kinase
  misc_feature (25)..(516): NCBI GI NO: 22296820 NR Description: pyruvate kinase [Glycine max]
  misc_feature (25)..(516): NCBI GI NO: 22296818 NR Description: pyruvate kinase [Glycine max]
  misc_feature (25)..(516): NCBI GI NO: 125606 NR Description: Pyruvate kinase, cytosolic isozyme
MLLEEPVRLASVLAPAKPKVFPSLTKIVGTLGPNSHSVEVIEECLTAGMSVARFDFSWKDATYHQETLDNLRKAAQNVKKLCPIMLDTVGPEIQVHNSTGGAIELIGGNHVTITPDLSKAPSADILPIKFGDLAKVVKKGDTLFIGQYLFTGSETTSLWLEVTETSGAEVICYVKNTATLSGPIFTLHVSQVHISMPTLSEYDKQVISTWGLQNSVDIISLSHTRSSEDVRELRAFLKSHDLQDTQIYAKVENAEGLEHFDEILQEADGIIISRGDLGIDLPPERVFMSQKTGIHKCNMAGKPVIITRVVDSMIDNLRPTRAEATDVANAVLDGTDGILLGAETLRGQYPVDAVRTVGRICAEAETVYNQSLHFKKVVRHVGEPMVHEESVASSAVRSAMKVKAAAIVVFTFSGRAARLIAKYRAPMPVLAVVFPREGSDPSKWRSYGTTQARQCFSVRGVYPLMGSTDDAETGGLTKEEYGIKLALNYGRSVGIIKPYDRVIIFEKIGDSSVVKIIECDDSER

SEQ ID NO: 15006 - DNA, 900 bp, Triticum aestivum
  misc_feature (1)..(900): Ceres Seq. ID no. 13584899
ccctggcaagcttatcggcaatggcggaaccggtgaagctcatcggcgccttcggcagcccgttcgtccaccgcgccgaggtggccctgcgcctcaagggcgtcccattcgagctcatccttgaagacctcaacaacaagagtgagctgctgctgaagcacaaccccatccacaagacggtgccggtgctcctccatggtgaccggccggccgtcttagagtccctcctcatcgtcgagtatgtggatgaggctttcgacggcccgccgctcctccccgtcgacccctacgggagggccatggctcgcttctgggcccaattcatcgagcaaaagtgctcgaggccgttctggatggcggtgtggttggacgacggggaggcgcgggaggggttcgtgagggacaccaaggagaatctggcgctgctggatgcgcggctgcaggggaagcggttcttcgccggcgacgccgttgggtacctggacctggcggcctgcgggctggcgcacctgctgggcgtgatcgaggaggtggccggggcgagcattgttggcgcgggcgagttccccgcactgcgccggtgggcggaggactacacctccgacgcgaccgtcgccgcgtgcctaccgcggagggagcagctcgccgcacacttcgccgggaagaaggaccgaatcaagctcgccgtcagcgcgatggtggggcgggcgtagttgtcagtttggggcatcgatcaacacagcaggcgtcggcaaaatattcagattacgtactgtattatgatttgtgatttgtctgttatgtgtgtgttccctatggtgcgtatactaaaataaaattcatattagtatttgttgcaacgaaatttatgtcaaattatagtcaaaagtacggaattgc

SEQ ID NO: 15007 - protein, 236 aa, Triticum aestivum
  peptide (1)..(236): Ceres Seq. ID no. 13584900
  misc_feature (11)..(83): Pfam Name: Pfam Description:  Glutathione S-transferase, N-terminal domain
  misc_feature (11)..(231): NCBI GI NO: 11385507 NR Description: glutathione S-transferase GST 28 [Zea mays]
  misc_feature (7)..(233): NCBI GI NO: 19386818 NR Description: putative glutathione S-transferase GST 24
  misc_feature (1)..(235): NCBI GI NO: 13699857 NR Description: glutathione S-transferase GST 24 [Zea mays]
  misc_feature (7)..(233): NCBI GI NO: 34896730 NR Description: putative glutathione transferase
  misc_feature (11)..(232): NCBI GI NO: 11385509 NR Description: glutathione S-transferase GST 29 [Zea mays]
  misc_feature (10)..(235): NCBI GI NO: 19386822 NR Description: putative glutathione S-transferase GST 24
  misc_feature (7)..(233): NCBI GI NO: 19386819 NR Description: putative glutathione S-transferase GST 24
  misc_feature (11)..(231): NCBI GI NO: 19386820 NR Description: putative glutathione S-transferase GST 24
  misc_feature (7)..(231): NCBI GI NO: 4468798 NR Description: GST7 protein [Zea mays]
  misc_feature (8)..(232): NCBI GI NO: 19386816 NR Description: putative glutathione S-transferase GST 24
LASLSAMAEPVKLIGAFGSPFVHRAEVALRLKGVPFELILEDLNNKSELLLKHNPIHKTVPVLLHGDRPAVLESLLIVEYVDEAFDGPPLLPVDPYGRAMARFWAQFIEQKCSRPFWMAVWLDDGEAREGFVRDTKENLALLDARLQGKRFFAGDAVGYLDLAACGLAHLLGVIEEVAGASIVGAGEFPALRRWAEDYTSDATVAACLPRREQLAAHFAGKKDRIKLAVSAMVGRA

SEQ ID NO: 15008 - protein, 230 aa, Triticum aestivum
  peptide (1)..(230): Ceres Seq. ID no. 13584901
  misc_feature (5)..(77): Pfam Name: Pfam Description:  Glutathione S-transferase, N-terminal domain
  misc_feature (5)..(225): NCBI GI NO: 11385507 NR Description: glutathione S-transferase GST 28 [Zea mays]
  misc_feature (1)..(227): NCBI GI NO: 19386818 NR Description: putative glutathione S-transferase GST 24
  misc_feature (1)..(229): NCBI GI NO: 13699857 NR Description: glutathione S-transferase GST 24 [Zea mays]
  misc_feature (1)..(227): NCBI GI NO: 34896730 NR Description: putative glutathione transferase
  misc_feature (5)..(226): NCBI GI NO: 11385509 NR Description: glutathione S-transferase GST 29 [Zea mays]
  misc_feature (4)..(229): NCBI GI NO: 19386822 NR Description: putative glutathione S-transferase GST 24
  misc_feature (1)..(227): NCBI GI NO: 19386819 NR Description: putative glutathione S-transferase GST 24
  misc_feature (5)..(225): NCBI GI NO: 19386820 NR Description: putative glutathione S-transferase GST 24
  misc_feature (1)..(225): NCBI GI NO: 4468798 NR Description: GST7 protein [Zea mays]
  misc_feature (2)..(226): NCBI GI NO: 19386816 NR Description: putative glutathione S-transferase GST 24
MAEPVKLIGAFGSPFVHRAEVALRLKGVPFELILEDLNNKSELLLKHNPIHKTVPVLLHGDRPAVLESLLIVEYVDEAFDGPPLLPVDPYGRAMARFWAQFIEQKCSRPFWMAVWLDDGEAREGFVRDTKENLALLDARLQGKRFFAGDAVGYLDLAACGLAHLLGVIEEVAGASIVGAGEFPALRRWAEDYTSDATVAACLPRREQLAAHFAGKKDRIKLAVSAMVGRA

SEQ ID NO: 15009 - protein, 137 aa, Triticum aestivum
  peptide (1)..(137): Ceres Seq. ID no. 13584902
  misc_feature (1)..(132): NCBI GI NO: 11385507 NR Description: glutathione S-transferase GST 28 [Zea mays]
  misc_feature (1)..(134): NCBI GI NO: 19386818 NR Description: putative glutathione S-transferase GST 24
  misc_feature (1)..(136): NCBI GI NO: 13699857 NR Description: glutathione S-transferase GST 24 [Zea mays]
  misc_feature (1)..(134): NCBI GI NO: 34896730 NR Description: putative glutathione transferase
  misc_feature (1)..(133): NCBI GI NO: 11385509 NR Description: glutathione S-transferase GST 29 [Zea mays]
  misc_feature (1)..(136): NCBI GI NO: 19386822 NR Description: putative glutathione S-transferase GST 24
  misc_feature (1)..(134): NCBI GI NO: 19386819 NR Description: putative glutathione S-transferase GST 24
  misc_feature (1)..(132): NCBI GI NO: 19386820 NR Description: putative glutathione S-transferase GST 24
  misc_feature (1)..(132): NCBI GI NO: 4468798 NR Description: GST7 protein [Zea mays]
  misc_feature (1)..(133): NCBI GI NO: 19386816 NR Description: putative glutathione S-transferase GST 24
MARFWAQFIEQKCSRPFWMAVWLDDGEAREGFVRDTKENLALLDARLQGKRFFAGDAVGYLDLAACGLAHLLGVIEEVAGASIVGAGEFPALRRWAEDYTSDATVAACLPRREQLAAHFAGKKDRIKLAVSAMVGRA

SEQ ID NO: 15010 - DNA, 1890 bp, Triticum aestivum
  misc_feature (1)..(1890): Ceres Seq. ID no. 13503498
cctaatcgaaaaccacgagcggaggcacgtgagcgctgcgcgaagaggaggactcgcagccgcctccaccctcctctgctgatccaatcaggtcaacgcgtgcgccccctccctcctctgctgcggctgctgcggcttagatctccctcttcaatctggagagataggaggattctgagaagcaaaccgagtgggactcctcgaatcaagtccgtgccttcatcagcaaaagaatccccgagtgcccaatccaatacagttcttcgcgtattcgaatcagattatgaagtccggcggtacacctgagaataatcggactgtcgccgaagctccgtatcttcctcctccggcattgggtctttttaagtcgtccaagattgattttgcctatatggaggcctgtagcctagcctggacaatgagcttatggagtctagctatacacccagcatatctgtgctcgctagttctcagagctttgcctaggctgctacgcctcactccaagttcactgaagaaattctgcaagcatcctccactgatcaagactatggagggcgcatcgcctgagctgcctcaggacatcttgatgagcatcttggccaccctcgagatccctgacctcatccgtgccgggtcggtctgctcctcatggcgctccacgtacttgaggctgcgcagccttgggcactacacgcgcccccagacgccgtgcctcctctacacatctgaatctgctggcgagagcgttgcttgcctctacagcctcgcggagaagcggacgtacaagctgactcttccagggccgcctatcagaaataggcatctgattgggtcctcgcaaggcttgcttgttacagttgatgacagatctgagatgcaccttgtcaatcccatcactggtgaacagattgatctcccttcggtgatcaccatcgagcatgtgaaacccagctataatgactccggtgctcttcaccagtacgagtactcatgccacaccgcaaaaagggtttacggtccgccatcgatcttggctcttggagagctgaggaacaagctccactataaagcttttgtgttttctgatgcatgcaatggatacattgtggcgctcatacacaatccagccagtcagctctcggttgcaagggcaggggatgatagttggatatggctgccaccatacaccaactatgacgattgcatttacaagaacggcctgctgtacgcagtcacttcatatggacaaattcacgcttttgacctaagtagccctgttgtcacgatgaagatgattacacgggagccagagcctgatgaccggtttctgaatacttacattgtacaagctccatggggcaatcttcttcaggtgtggagattatatgagcactgtgatttagaacccgagcctggggcatctgtgttttggagcactggaaaattcaaaatatatgaagtcgatgcttcttcaggagagaaaattaagaaaaccagttgcttgcgcgaccatgtgttgtttcttgggcacaatcaatcactttgtcttgctgctcaagactatccggctctcaagggaaaccatgcctactttaccgatgacagtgtgctttggacaaggggattcaagaacagtccccgtgatatgggaattctcgacttgggtaataacagcagggaggaacttgtgtcttcccagctttgctccaactgcccagctccggtgtggattacacccaatcttagaaagatgaacttggcattcaatgaataggttttagcttcctttatctataattatatgtaataattatttagtttggtaggcggtggtcctgtgttgatgaaccctgtactcgtacacttgaaccactttttaagaagttc

SEQ ID NO: 15011 - protein, 497 aa, Triticum aestivum
  peptide (1)..(497): Ceres Seq. ID no. 15223233
  misc_feature (23)..(493): NCBI GI NO: 29150381 NR Description: hypothetical protein
  misc_feature (96)..(269): NCBI GI NO: 34905018 NR Description: P0456B03.17
  misc_feature (269)..(441): NCBI GI NO: 34905018 NR Description: P0456B03.17
  misc_feature (97)..(373): NCBI GI NO: 34905340 NR Description: OJ9990_A01.18
  misc_feature (96)..(222): NCBI GI NO: 34894778 NR Description: P0537A05.16
  misc_feature (139)..(489): NCBI GI NO: 38345136 NR Description: OSJNBb0050N09.2
  misc_feature (93)..(488): NCBI GI NO: 34915188 NR Description: unknown protein
  misc_feature (201)..(486): NCBI GI NO: 34905340 NR Description: OJ9990_A01.18
  misc_feature (139)..(443): NCBI GI NO: 38345140 NR Description: OSJNBb0050N09.7
  misc_feature (90)..(486): NCBI GI NO: 13937296 NR Description: unknown protein [Oryza sativa]
MKSGGTPENNRTVAEAPYLPPPALGLFKSSKIDFAYMEACSLAWTMSLWSLAIHPAYLCSLVLRALPRLLRLTPSSLKKFCKHPPLIKTMEGASPELPQDILMSILATLEIPDLIRAGSVCSSWRSTYLRLRSLGHYTRPQTPCLLYTSESAGESVACLYSLAEKRTYKLTLPGPPIRNRHLIGSSQGLLVTVDDRSEMHLVNPITGEQIDLPSVITIEHVKPSYNDSGALHQYEYSCHTAKRVYGPPSILALGELRNKLHYKAFVFSDACNGYIVALIHNPASQLSVARAGDDSWIWLPPYTNYDDCIYKNGLLYAVTSYGQIHAFDLSSPVVTMKMITREPEPDDRFLNTYIVQAPWGNLLQVWRLYEHCDLEPEPGASVFWSTGKFKIYEVDASSGEKIKKTSCLRDHVLFLGHNQSLCLAAQDYPALKGNHAYFTDDSVLWTRGFKNSPRDMGILDLGNNSREELVSSQLCSNCPAPVWITPNLRKMNLAFNE

SEQ ID NO: 15012 - protein, 461 aa, Triticum aestivum
  peptide (1)..(461): Ceres Seq. ID no. 15223234
  misc_feature (1)..(457): NCBI GI NO: 29150381 NR Description: hypothetical protein
  misc_feature (60)..(233): NCBI GI NO: 34905018 NR Description: P0456B03.17
  misc_feature (233)..(405): NCBI GI NO: 34905018 NR Description: P0456B03.17
  misc_feature (61)..(337): NCBI GI NO: 34905340 NR Description: OJ9990_A01.18
  misc_feature (60)..(186): NCBI GI NO: 34894778 NR Description: P0537A05.16
  misc_feature (103)..(453): NCBI GI NO: 38345136 NR Description: OSJNBb0050N09.2
  misc_feature (57)..(452): NCBI GI NO: 34915188 NR Description: unknown protein
  misc_feature (165)..(450): NCBI GI NO: 34905340 NR Description: OJ9990_A01.18
  misc_feature (103)..(407): NCBI GI NO: 38345140 NR Description: OSJNBb0050N09.7
  misc_feature (54)..(450): NCBI GI NO: 13937296 NR Description: unknown protein [Oryza sativa]
MEACSLAWTMSLWSLAIHPAYLCSLVLRALPRLLRLTPSSLKKFCKHPPLIKTMEGASPELPQDILMSILATLEIPDLIRAGSVCSSWRSTYLRLRSLGHYTRPQTPCLLYTSESAGESVACLYSLAEKRTYKLTLPGPPIRNRHLIGSSQGLLVTVDDRSEMHLVNPITGEQIDLPSVITIEHVKPSYNDSGALHQYEYSCHTAKRVYGPPSILALGELRNKLHYKAFVFSDACNGYIVALIHNPASQLSVARAGDDSWIWLPPYTNYDDCIYKNGLLYAVTSYGQIHAFDLSSPVVTMKMITREPEPDDRFLNTYIVQAPWGNLLQVWRLYEHCDLEPEPGASVFWSTGKFKIYEVDASSGEKIKKTSCLRDHVLFLGHNQSLCLAAQDYPALKGNHAYFTDDSVLWTRGFKNSPRDMGILDLGNNSREELVSSQLCSNCPAPVWITPNLRKMNLAFNE

SEQ ID NO: 15013 - protein, 452 aa, Triticum aestivum
  peptide (1)..(452): Ceres Seq. ID no. 15223235
  misc_feature (1)..(448): NCBI GI NO: 29150381 NR Description: hypothetical protein
  misc_feature (51)..(224): NCBI GI NO: 34905018 NR Description: P0456B03.17
  misc_feature (224)..(396): NCBI GI NO: 34905018 NR Description: P0456B03.17
  misc_feature (52)..(328): NCBI GI NO: 34905340 NR Description: OJ9990_A01.18
  misc_feature (51)..(177): NCBI GI NO: 34894778 NR Description: P0537A05.16
  misc_feature (94)..(444): NCBI GI NO: 38345136 NR Description: OSJNBb0050N09.2
  misc_feature (48)..(443): NCBI GI NO: 34915188 NR Description: unknown protein
  misc_feature (156)..(441): NCBI GI NO: 34905340 NR Description: OJ9990_A01.18
  misc_feature (94)..(398): NCBI GI NO: 38345140 NR Description: OSJNBb0050N09.7
  misc_feature (45)..(441): NCBI GI NO: 13937296 NR Description: unknown protein [Oryza sativa]
MSLWSLAIHPAYLCSLVLRALPRLLRLTPSSLKKFCKHPPLIKTMEGASPELPQDILMSILATLEIPDLIRAGSVCSSWRSTYLRLRSLGHYTRPQTPCLLYTSESAGESVACLYSLAEKRTYKLTLPGPPIRNRHLIGSSQGLLVTVDDRSEMHLVNPITGEQIDLPSVITIEHVKPSYNDSGALHQYEYSCHTAKRVYGPPSILALGELRNKLHYKAFVFSDACNGYIVALIHNPASQLSVARAGDDSWIWLPPYTNYDDCIYKNGLLYAVTSYGQIHAFDLSSPVVTMKMITREPEPDDRFLNTYIVQAPWGNLLQVWRLYEHCDLEPEPGASVFWSTGKFKIYEVDASSGEKIKKTSCLRDHVLFLGHNQSLCLAAQDYPALKGNHAYFTDDSVLWTRGFKNSPRDMGILDLGNNSREELVSSQLCSNCPAPVWITPNLRKMNLAFNE

SEQ ID NO: 15014 - DNA, 1574 bp, Triticum aestivum
  misc_feature (1)..(1574): Ceres Seq. ID no. 12618349
ccctactccctactctctcctactccttccccttcctactccactgacggacgggactcggccttcttcttgccttcctctcccccctcccccctcccgccgccgccttcctccgccggggctggttcagctactaactgcggccgggggaaggagaaaggccgcgtctttcccggccacctttcggctcgcccccagcccacgcgggagccggattgggatggagtcggcggccggcggcgggctgggcagcatgcgcgcggtgctcgccatcctccagtggtggggcttcaacgtcaccgtcatcatcatcaacaaatggatcttccagaagctggatttcaagttccccctgacggtgtcctgcgtccacttcatatgctcttccatcggggcatacgtcgcgatccacgtgctcaaggcgaagccgctgattcaggtcgagcccgaggaccgctggaagaggatcttccccatgtccttcgtgttctgcatgaacatcgtgctcgggaacgtcagcctgcgctacatcccggtctccttcatgcagactatcaaatcgttcacccctgcaaccacagttattctgcagtggttggtttggagcaagcacttcgagtggcgcatatgggcttcgctggtcccgatagtcggggggatcctcctaacctcaatgacagagctcagcttcaacatttttggtttctgtgctgccatgattggctgcctcgccacgtctaccaagaccatcttggcagagtccctgctccatggatacaaatttgacagcattaacacagtgtactacatggcaccctttgccaccatgatactggctctaccagcaatgttgcttgaaggaggtggcgtaatcgactggttctacacgcacgactctgtcttttcttcgctgattatcatcctaggctcaggggtgcttgcgttttgcctcaacttctccatcttctacgtgatccattcaaccaccgctgtgaccttcaatgttgctggcaaccttaaagttgctgtcgccgtgttggtctcgtggttgatcttccggaacccaatctcccccatgaatgcaattggatgcgcaatcacgctcgtcggctgtactttctatgggtatgtgaggcatctcatctcccaacagcaggctgctgcgcccctagggagccaaggaacgaactcgccgagaagtcgggtggagatgctcccccttgtaggcgacaaggaagataaggtctagcaaggcaatactcccatattcaagagccgttcatttcagcggttgacggtacattacagtttggcacacagatgctgagttgagggaggccagtaaattggtaggggggcaacacttttttgtgaagctacattatgttgtactcgggcaaactgcgagggtttgttcagttactagttctcatagggttactagttatctacttaatcaaatccccccggacaattcgtgcgattaggatggtgcttctgttttcttgttttgctgccatatgtttagaccttaaactgctggtatgaaaattaatggcattatgatacgagcc

SEQ ID NO: 15015 - protein, 415 aa, Triticum aestivum
  peptide (1)..(415): Ceres Seq. ID no. 12618350
  misc_feature (101)..(225): Pfam Name: Pfam Description:  Integral membrane protein DUF6
  misc_feature (73)..(415): NCBI GI NO: 38567832 NR Description: OSJNBb0020J19.10
  misc_feature (83)..(415): NCBI GI NO: 18411611 NR Description: expressed protein; protein id: At1g77610
  misc_feature (86)..(415): NCBI GI NO: 15219121 NR Description: glucose 6 phosphate/phosphate translocator
  misc_feature (91)..(374): NCBI GI NO: 9759107 NR Description: phosphate/phosphoenolpyruvate translocator protein-like
  misc_feature (91)..(374): NCBI GI NO: 30681126 NR Description: phosphate translocator-related
  misc_feature (64)..(374): NCBI GI NO: 27476065 NR Description: Putative phosphate/phosphoenolpyruvate translocatorprotein
  misc_feature (91)..(375): NCBI GI NO: 15237644 NR Description: phosphate/phosphoenolpyruvate translocator
  misc_feature (91)..(375): NCBI GI NO: 17064798 NR Description: phosphate/phosphoenolpyruvate translocator-like
  misc_feature (226)..(374): NCBI GI NO: 15229717 NR Description: integral membrane protein, putative
  misc_feature (74)..(224): NCBI GI NO: 15229717 NR Description: integral membrane protein, putative
PTPYSLLLLPLPTPLTDGTRPSSCLPLPPPPSRRRLPPPGLVQLLTAAGGRRKAASFPATFRLAPSPRGSRIGMESAAGGGLGSMRAVLAILQWWGFNVTVIIINKWIFQKLDFKFPLTVSCVHFICSSIGAYVAIHVLKAKPLIQVEPEDRWKRIFPMSFVFCMNIVLGNVSLRYIPVSFMQTIKSFTPATTVILQWLVWSKHFEWRIWASLVPIVGGILLTSMTELSFNIFGFCAAMIGCLATSTKTILAESLLHGYKFDSINTVYYMAPFATMILALPAMLLEGGGVIDWFYTHDSVFSSLIIILGSGVLAFCLNFSIFYVIHSTTAVTFNVAGNLKVAVAVLVSWLIFRNPISPMNAIGCAITLVGCTFYGYVRHLISQQQAAAPLGSQGTNSPRSRVEMLPLVGDKEDKV

SEQ ID NO: 15016 - protein, 342 aa, Triticum aestivum
  peptide (1)..(342): Ceres Seq. ID no. 12618351
  misc_feature (28)..(152): Pfam Name: Pfam Description:  Integral membrane protein DUF6
  misc_feature (1)..(342): NCBI GI NO: 38567832 NR Description: OSJNBb0020J19.10
  misc_feature (10)..(342): NCBI GI NO: 18411611 NR Description: expressed protein; protein id: At1g77610
  misc_feature (13)..(342): NCBI GI NO: 15219121 NR Description: glucose 6 phosphate/phosphate translocator
  misc_feature (18)..(301): NCBI GI NO: 9759107 NR Description: phosphate/phosphoenolpyruvate translocator protein-like
  misc_feature (18)..(301): NCBI GI NO: 30681126 NR Description: phosphate translocator-related
  misc_feature (1)..(301): NCBI GI NO: 27476065 NR Description: Putative phosphate/phosphoenolpyruvate translocatorprotein
  misc_feature (18)..(302): NCBI GI NO: 15237644 NR Description: phosphate/phosphoenolpyruvate translocator
  misc_feature (18)..(302): NCBI GI NO: 17064798 NR Description: phosphate/phosphoenolpyruvate translocator-like
  misc_feature (153)..(301): NCBI GI NO: 15229717 NR Description: integral membrane protein, putative
  misc_feature (1)..(151): NCBI GI NO: 15229717 NR Description: integral membrane protein, putative
MESAAGGGLGSMRAVLAILQWWGFNVTVIIINKWIFQKLDFKFPLTVSCVHFICSSIGAYVAIHVLKAKPLIQVEPEDRWKRIFPMSFVFCMNIVLGNVSLRYIPVSFMQTIKSFTPATTVILQWLVWSKHFEWRIWASLVPIVGGILLTSMTELSFNIFGFCAAMIGCLATSTKTILAESLLHGYKFDSINTVYYMAPFATMILALPAMLLEGGGVIDWFYTHDSVFSSLIIILGSGVLAFCLNFSIFYVIHSTTAVTFNVAGNLKVAVAVLVSWLIFRNPISPMNAIGCAITLVGCTFYGYVRHLISQQQAAAPLGSQGTNSPRSRVEMLPLVGDKEDKV

SEQ ID NO: 15017 - protein, 331 aa, Triticum aestivum
  peptide (1)..(331): Ceres Seq. ID no. 12618352
  misc_feature (17)..(141): Pfam Name: Pfam Description:  Integral membrane protein DUF6
  misc_feature (1)..(331): NCBI GI NO: 38567832 NR Description: OSJNBb0020J19.10
  misc_feature (1)..(331): NCBI GI NO: 18411611 NR Description: expressed protein; protein id: At1g77610
  misc_feature (2)..(331): NCBI GI NO: 15219121 NR Description: glucose 6 phosphate/phosphate translocator
  misc_feature (7)..(290): NCBI GI NO: 9759107 NR Description: phosphate/phosphoenolpyruvate translocator protein-like
  misc_feature (7)..(290): NCBI GI NO: 30681126 NR Description: phosphate translocator-related
  misc_feature (1)..(290): NCBI GI NO: 27476065 NR Description: Putative phosphate/phosphoenolpyruvate translocatorprotein
  misc_feature (7)..(291): NCBI GI NO: 15237644 NR Description: phosphate/phosphoenolpyruvate translocator
  misc_feature (7)..(291): NCBI GI NO: 17064798 NR Description: phosphate/phosphoenolpyruvate translocator-like
  misc_feature (142)..(290): NCBI GI NO: 15229717 NR Description: integral membrane protein, putative
  misc_feature (1)..(140): NCBI GI NO: 15229717 NR Description: integral membrane protein, putative
MRAVLAILQWWGFNVTVIIINKWIFQKLDFKFPLTVSCVHFICSSIGAYVAIHVLKAKPLIQVEPEDRWKRIFPMSFVFCMNIVLGNVSLRYIPVSFMQTIKSFTPATTVILQWLVWSKHFEWRIWASLVPIVGGILLTSMTELSFNIFGFCAAMIGCLATSTKTILAESLLHGYKFDSINTVYYMAPFATMILALPAMLLEGGGVIDWFYTHDSVFSSLIIILGSGVLAFCLNFSIFYVIHSTTAVTFNVAGNLKVAVAVLVSWLIFRNPISPMNAIGCAITLVGCTFYGYVRHLISQQQAAAPLGSQGTNSPRSRVEMLPLVGDKEDKV

SEQ ID NO: 15018 - DNA, 1236 bp, Triticum aestivum
  misc_feature (1)..(1236): Ceres Seq. ID no. 13597324
  misc_feature (613)..(613): n is a, c, t, g, unknown, or other
  misc_feature (612)..(612): n is a, c, t, g, unknown, or other
gcttgttctatagcttggccgctcgggaggtcaagccgcccgccctcccgtaaaccctatcttctcctgttccccttcgtccccggccggcgacgacgccgcgcgcgcagcgaacccagcccctcctccggttgcagtaagcaaggaaggatgagtaggcgctggagccggaccatttacgttgggaacctcccaggggatatcagggagcgggaggtggaggatctgttctacaagtatggacggatagttgaaattgacttgaaggtccccccaaggccacctggctttgcttttgttgagtttgaagatccccgtgatgctgaagatgcgattcatggtcgagatggttacaactttgatgggaatcgtctgcgggttgaacttgcacatggcgggagggccaactcttcatcccttccgaacagctatggtggcggaggacgccgtggtggtgtctctaggcatacagagtatcgtgttctggttactggactaccttcttctgcatcatgtcaagatctaaaggatcatatgagaaaggctggtgatgtttgtttctctgaggtgtatcgtggagggtggtggtactattggrattgttgattatannaactatgatgatatgaagtatgctataaggaagcttgatgatactgaatttaaaaatgccttctctcgagcgcctataagggtaaaggagtatgctggaaaaagcagccgctcctattcacgcagccgtagcagaagccgaagtggcagctacagcaggagtccaagtccaaagaaaaaaccatcacgtcgttcagcgtcaagatctcggtcgagatcagtttcttcccattcaaggtcaccgtcaaaggaacgctctccatcaagatcaccagcaaaatcccaatcccctgtcgccgcatctcccgtcgtcaatggtgaagcagcaagccccaagagggacccaagcaagagcccatcacgttcccggtctcctgatgccaaatcagagtaaaactgatgcgaggttaggggcggtgagaggcggagccatgggcttcaaattcttcatattttgtcttcgccgacttctgcatccgctgttatagtactatctgtgttcggttattctaggttccttgatgtttctgtaaaacttgtttggatggatttttgagatttatgtactctcttcattgtcagcatttttacttggattattatctatgcatggtcgttggttcg

SEQ ID NO: 15019 - protein, 201 aa, Triticum aestivum
  peptide (1)..(201): Ceres Seq. ID no. 15222073
  misc_feature (48)..(194): NCBI GI NO: 33146854 NR Description: putative pre-mRNA splicing factor SF2
  misc_feature (51)..(192): NCBI GI NO: 30678391 NR Description: pre-mRNA splicing factor SF2 (SR1 protein)
  misc_feature (51)..(192): NCBI GI NO: 5815235 NR Description: splicing factor SR1 [Arabidopsis thaliana]
  misc_feature (51)..(192): NCBI GI NO: 2129717 NR Description: splicing factor SF-2 homolog
  misc_feature (51)..(192): NCBI GI NO: 12324445 NR Description: putative splicing factor; 53460-55514
  misc_feature (51)..(192): NCBI GI NO: 34894608 NR Description: putative pre-mRNA splicing factor SF2
  misc_feature (51)..(192): NCBI GI NO: 2443473 NR Description: ASF/SF2 homolog [Arabidopsis thaliana]
  misc_feature (51)..(192): NCBI GI NO: 30678395 NR Description: pre-mRNA splicing factor SF2 (SR1 protein)
  misc_feature (51)..(191): NCBI GI NO: 4775270 NR Description: SF2/ASF-like splicing modulator Srp30
  misc_feature (51)..(192): NCBI GI NO: 5815236 NR Description: splicing factor SR1B [Arabidopsis thaliana]
  misc_feature (200)..(200): Xaa is any aa, unknown or other
ACSIAWPLGRSSRPPSRKPYLLLFPFVPGRRRRRARSEPSPSSGCSKQGRMSRRWSRTIYVGNLPGDIREREVEDLFYKYGRIVEIDLKVPPRPPGFAFVEFEDPRDAEDAIHGRDGYNFDGNRLRVELAHGGRANSSSLPNSYGGGGRRGGVSRHTEYRVLVTGLPSSASCQDLKDHMRKAGDVCFSEVYRGGWWYYWXC

SEQ ID NO: 15020 - protein, 151 aa, Triticum aestivum
  peptide (1)..(151): Ceres Seq. ID no. 15222074
  misc_feature (10)..(151): NCBI GI NO: 33146854 NR Description: putative pre-mRNA splicing factor SF2
  misc_feature (13)..(146): NCBI GI NO: 30678391 NR Description: pre-mRNA splicing factor SF2 (SR1 protein)
  misc_feature (13)..(146): NCBI GI NO: 5815235 NR Description: splicing factor SR1 [Arabidopsis thaliana]
  misc_feature (13)..(146): NCBI GI NO: 2129717 NR Description: splicing factor SF-2 homolog
  misc_feature (10)..(142): NCBI GI NO: 12324445 NR Description: putative splicing factor; 53460-55514
  misc_feature (10)..(119): NCBI GI NO: 34894608 NR Description: putative pre-mRNA splicing factor SF2
  misc_feature (13)..(118): NCBI GI NO: 2443473 NR Description: ASF/SF2 homolog [Arabidopsis thaliana]
  misc_feature (13)..(118): NCBI GI NO: 30678395 NR Description: pre-mRNA splicing factor SF2 (SR1 protein)
  misc_feature (13)..(127): NCBI GI NO: 4775270 NR Description: SF2/ASF-like splicing modulator Srp30
  misc_feature (13)..(118): NCBI GI NO: 5815236 NR Description: splicing factor SR1B [Arabidopsis thaliana]
  misc_feature (16)..(16): Xaa is any aa, unknown or other
  misc_feature (21)..(21): Xaa is any aa, unknown or other
MFVSLRCIVEGGGTIXIVDYXNYDDMKYAIRKLDDTEFKNAFSRAPIRVKEYAGKSSRSYSRSRSRSRSGSYSRSPSPKKKPSRRSASRSRSRSVSSHSRSPSKERSPSRSPAKSQSPVAASPVVNGEAASPKRDPSKSPSRSRSPDAKSE

SEQ ID NO: 15021 - protein, 151 aa, Triticum aestivum
  peptide (1)..(151): Ceres Seq. ID no. 15222075
  misc_feature (1)..(144): NCBI GI NO: 33146854 NR Description: putative pre-mRNA splicing factor SF2
  misc_feature (1)..(142): NCBI GI NO: 30678391 NR Description: pre-mRNA splicing factor SF2 (SR1 protein)
  misc_feature (1)..(142): NCBI GI NO: 5815235 NR Description: splicing factor SR1 [Arabidopsis thaliana]
  misc_feature (1)..(142): NCBI GI NO: 2129717 NR Description: splicing factor SF-2 homolog
  misc_feature (1)..(142): NCBI GI NO: 12324445 NR Description: putative splicing factor; 53460-55514
  misc_feature (1)..(142): NCBI GI NO: 34894608 NR Description: putative pre-mRNA splicing factor SF2
  misc_feature (1)..(142): NCBI GI NO: 2443473 NR Description: ASF/SF2 homolog [Arabidopsis thaliana]
  misc_feature (1)..(142): NCBI GI NO: 30678395 NR Description: pre-mRNA splicing factor SF2 (SR1 protein)
  misc_feature (1)..(141): NCBI GI NO: 4775270 NR Description: SF2/ASF-like splicing modulator Srp30
  misc_feature (1)..(142): NCBI GI NO: 5815236 NR Description: splicing factor SR1B [Arabidopsis thaliana]
  misc_feature (150)..(150): Xaa is any aa, unknown or other
MSRRWSRTIYVGNLPGDIREREVEDLFYKYGRIVEIDLKVPPRPPGFAFVEFEDPRDAEDAIHGRDGYNFDGNRLRVELAHGGRANSSSLPNSYGGGGRRGGVSRHTEYRVLVTGLPSSASCQDLKDHMRKAGDVCFSEVYRGGWWYYWXC

SEQ ID NO: 15022 - DNA, 1103 bp, Triticum aestivum
  misc_feature (1)..(1103): Ceres Seq. ID no. 15173069
cagctatttctgctccttccaatgcagcattatctctggtgatcagagacaaaagtagtggagattctggttctgtgaaacagactcgttttaccgagatggtagctgtgcagatttacagagtagcctttcttattatgaaattcctctgcagtcaagccaaagaggcagtaaaaagggcaggagaattagaatttgtcgatcttgcacattttcctgaacttcccatgccagatattcttcatggtctgcaggatcaagtggtttctatcgttacggaagtactgggggcaaatggatcgagcgccctcagcggggagaccgatagggtatgccgtcttctgttggtgacccttgaggcatcgctctacatggaactgtgtgtgtcccagtcatgcagcatcaggccagtgctgggccggttcgaagatttctccaagggaattaaggcgatgcttcacgctttggagaaacattccagtttgaaaccattggttaggtcactcgctcagattacgacactgctgtatcctgggcttgctcaaagcaacttcctcaccatgtaatcagtgtgtagattgcatctctgcggctggttaagtcttttgctatggttcatacttcatagatggaaacaggttcagtaaaatcgacccgtttacagtggagccctgagtttaatctgctgctatggttatgagtgaatctacactttaaactatgtctatatacatccgtatgtagtccatatcgaaatctctaaaaagacttatactccctccgttctaaattactcgtcgcagaaatggatgtatctagaactaaaatacatctagatatattcatacctgcgacaagtaattcggaacggagggggtatttaggaatggagggagtagatgaaatcgtttagtcagctaacatgtcacataacgttcatgcatgtatttttctgtatgcttgcatgcatgtatgtacagtaggaaaactatcaagagtttccacccgttctgagcgacatgtcagtggtggaatggcaccctgctatacgtacggtgaatatggtgaatgcgtattattgtctgctagttatggtctgaatc

SEQ ID NO: 15023 - protein, 187 aa, Triticum aestivum
  peptide (1)..(187): Ceres Seq. ID no. 15173070
  misc_feature (1)..(166): NCBI GI NO: 21306600 NR Description: Hypothetical protein
  misc_feature (2)..(178): NCBI GI NO: 15234782 NR Description: expressed protein [Arabidopsis thaliana]
AISAPSNAALSLVIRDKSSGDSGSVKQTRFTEMVAVQIYRVAFLIMKFLCSQAKEAVKRAGELEFVDLAHFPELPMPDILHGLQDQVVSIVTEVLGANGSSALSGETDRVCRLLLVTLEASLYMELCVSQSCSIRPVLGRFEDFSKGIKAMLHALEKHSSLKPLVRSLAQITTLLYPGLAQSNFLTM

SEQ ID NO: 15024 - protein, 155 aa, Triticum aestivum
  peptide (1)..(155): Ceres Seq. ID no. 15173071
  misc_feature (1)..(134): NCBI GI NO: 21306600 NR Description: Hypothetical protein
  misc_feature (1)..(146): NCBI GI NO: 15234782 NR Description: expressed protein [Arabidopsis thaliana]
MVAVQIYRVAFLIMKFLCSQAKEAVKRAGELEFVDLAHFPELPMPDILHGLQDQVVSIVTEVLGANGSSALSGETDRVCRLLLVTLEASLYMELCVSQSCSIRPVLGRFEDFSKGIKAMLHALEKHSSLKPLVRSLAQITTLLYPGLAQSNFLTM

SEQ ID NO: 15025 - protein, 142 aa, Triticum aestivum
  peptide (1)..(142): Ceres Seq. ID no. 15173072
  misc_feature (1)..(121): NCBI GI NO: 21306600 NR Description: Hypothetical protein
  misc_feature (1)..(133): NCBI GI NO: 15234782 NR Description: expressed protein [Arabidopsis thaliana]
MKFLCSQAKEAVKRAGELEFVDLAHFPELPMPDILHGLQDQVVSIVTEVLGANGSSALSGETDRVCRLLLVTLEASLYMELCVSQSCSIRPVLGRFEDFSKGIKAMLHALEKHSSLKPLVRSLAQITTLLYPGLAQSNFLTM

SEQ ID NO: 15026 - DNA, 1748 bp, Triticum aestivum
  misc_feature (1)..(1748): Ceres Seq. ID no. 13597843
aatttcgtttcccattttgtacgcagctaataattctcgagcagcgttgcctgcacgcccagcctgtggtaaaaaacaagacccgccgtgtcacccgctcaaaagcttcctcgaccgcgggcataatccatccgagactcctagccgatcgtgcaccaaccagatgacgaccccgaccgtcgtgctgctgccggtctgggccgccggccacctcatgtccatgctcgacgccggcaagcggctgctcgcgcgcagcggcggcgcgctgtcgctcacggtgctcgtcatgccggcgccgggggagaaccacaggtgcgaggtcgccgcccacatacagagggaggaggcgtccggcctggacatccgcttccaccacctccccgccgtcgagcccccgacggactgcctgggcatcgaggagttcgtctcccggttcgtgcagctccacgcggcccacgtgaaggcggccgtctccggcctggcgtgccccgtggccgcgctcgtcctcgacttcttctgcacgaccatgctcgacgtgtcccgggagctcgccgtaccggcctacgtgtacatcaccgccgacgccgccttctgcgcgctcctcctgcgcctgccggcgctccacgaggaggtggccgtcgagttcgaggagatggagggcatggtgggcgtgcctggcctgccgccggtgccgccgtcgtccctcccggttccggtgatggacaagaagaaccccaactacacgtggttcatgtaccacggcaggcgtttcacggaggccaagggcgtcatcatcaacacggtcaccgagctggagcagagcgttcttgcagccatcggcgacggctggtgcgcgcccggatttcctgccccggcggtctatccagtaggccccgtgctctccgtgaccccgccagcggagcagccgcacgaatgcgtgcggtggctggacgcgcagcctccggcgtccgtggtgctcctctgcttcggcagcatggggttctccacggcggcacaggcgcacgagatagcccacgggctggagcgcagcgggcaccgcttcctgtgggctctgcgcggcccgccggctgccggcgcgggaccaggacagccctcggacgcggacctcggggagctgctcccggaggggttcctggagaggacgaaggagaagggcctggtgtggccgacgaaggccccgcagaaggagatcctggcgcacgccgccgtggggggcttcgtgacgcacggcgggtggaactcgaccctggagagcctgtggttcggcgtgccgatggtgccgtggccgctgtacgcggagcagcacctcaacgcgttcacgctggtggcctacatgggcgtggccgtggccatggaggtggaccggaagaggaacaactttgtcgccgcgtcggagctggagcgggccgtgaaggcgctcatggagcgcgactccgaggaggggaagagggcgagggagaaggccgcggagatgaaggccgcgtgccggaaggccgtcgaggagggcgggtcctcctactctgccctcgggaggctctctgaggcgataatcaaaggcgccagtaagtaattgacgaacatccggagacgaacttggagagtgtgggtgctctgtggttgcagttcttgttctgcctgccgatcattccgagttgtgtgccggcatcgcgagcaatccacctccggtagagagccttaataaaaccacatgctcctcgtttggtctc

SEQ ID NO: 15027 - protein, 529 aa, Triticum aestivum
  peptide (1)..(529): Ceres Seq. ID no. 13597844
  misc_feature (59)..(525): Pfam Name: Pfam Description:  UDP-glucoronosyl and UDP-glucosyl transferase
  misc_feature (55)..(523): NCBI GI NO: 34394683 NR Description: putative flavonol 3-O-glucosyltransferase
  misc_feature (55)..(527): NCBI GI NO: 34394651 NR Description: putative glucosyltransferase
  misc_feature (58)..(528): NCBI GI NO: 34394680 NR Description: putative glucosyltransferase
  misc_feature (55)..(527): NCBI GI NO: 34394653 NR Description: putative glucosyltransferase-3
  misc_feature (55)..(525): NCBI GI NO: 34898742 NR Description: putative betanidin 6-O-glucosyltransferase
  misc_feature (59)..(521): NCBI GI NO: 34394688 NR Description: putative glucosyltransferase
  misc_feature (55)..(528): NCBI GI NO: 34394676 NR Description: putative glucosyltransferase
  misc_feature (50)..(528): NCBI GI NO: 22535568 NR Description: putative glucosyltransferase
  misc_feature (235)..(421): NCBI GI NO: 19911213 NR Description: glucosyltransferase like protein [Vigna angularis]
  misc_feature (69)..(525): NCBI GI NO: 2501491 NR Description: Flavonol 3-O-glucosyltransferase 1
ISFPILYAANNSRAALPARPACGKKQDPPCHPLKSFLDRGHNPSETPSRSCTNQMTTPTVVLLPVWAAGHLMSMLDAGKRLLARSGGALSLTVLVMPAPGENHRCEVAAHIQREEASGLDIRFHHLPAVEPPTDCLGIEEFVSRFVQLHAAHVKAAVSGLACPVAALVLDFFCTTMLDVSRELAVPAYVYITADAAFCALLLRLPALHEEVAVEFEEMEGMVGVPGLPPVPPSSLPVPVMDKKNPNYTWFMYHGRRFTEAKGVIINTVTELEQSVLAAIGDGWCAPGFPAPAVYPVGPVLSVTPPAEQPHECVRWLDAQPPASVVLLCFGSMGFSTAAQAHEIAHGLERSGHRFLWALRGPPAAGAGPGQPSDADLGELLPEGFLERTKEKGLVWPTKAPQKEILAHAAVGGFVTHGGWNSTLESLWFGVPMVPWPLYAEQHLNAFTLVAYMGVAVAMEVDRKRNNFVAASELERAVKALMERDSEEGKRAREKAAEMKAACRKAVEEGGSSYSALGRLSEAIIKGASK

SEQ ID NO: 15028 - protein, 475 aa, Triticum aestivum
  peptide (1)..(475): Ceres Seq. ID no. 13597845
  misc_feature (5)..(471): Pfam Name: Pfam Description:  UDP-glucoronosyl and UDP-glucosyl transferase
  misc_feature (1)..(469): NCBI GI NO: 34394683 NR Description: putative flavonol 3-O-glucosyltransferase
  misc_feature (1)..(473): NCBI GI NO: 34394651 NR Description: putative glucosyltransferase
  misc_feature (4)..(474): NCBI GI NO: 34394680 NR Description: putative glucosyltransferase
  misc_feature (1)..(473): NCBI GI NO: 34394653 NR Description: putative glucosyltransferase-3
  misc_feature (1)..(471): NCBI GI NO: 34898742 NR Description: putative betanidin 6-O-glucosyltransferase
  misc_feature (5)..(467): NCBI GI NO: 34394688 NR Description: putative glucosyltransferase
  misc_feature (1)..(474): NCBI GI NO: 34394676 NR Description: putative glucosyltransferase
  misc_feature (1)..(474): NCBI GI NO: 22535568 NR Description: putative glucosyltransferase
  misc_feature (181)..(367): NCBI GI NO: 19911213 NR Description: glucosyltransferase like protein [Vigna angularis]
  misc_feature (15)..(471): NCBI GI NO: 2501491 NR Description: Flavonol 3-O-glucosyltransferase 1
MTTPTVVLLPVWAAGHLMSMLDAGKRLLARSGGALSLTVLVMPAPGENHRCEVAAHIQREEASGLDIRFHHLPAVEPPTDCLGIEEFVSRFVQLHAAHVKAAVSGLACPVAALVLDFFCTTMLDVSRELAVPAYVYITADAAFCALLLRLPALHEEVAVEFEEMEGMVGVPGLPPVPPSSLPVPVMDKKNPNYTWFMYHGRRFTEAKGVIINTVTELEQSVLAAIGDGWCAPGFPAPAVYPVGPVLSVTPPAEQPHECVRWLDAQPPASVVLLCFGSMGFSTAAQAHEIAHGLERSGHRFLWALRGPPAAGAGPGQPSDADLGELLPEGFLERTKEKGLVWPTKAPQKEILAHAAVGGFVTHGGWNSTLESLWFGVPMVPWPLYAEQHLNAFTLVAYMGVAVAMEVDRKRNNFVAASELERAVKALMERDSEEGKRAREKAAEMKAACRKAVEEGGSSYSALGRLSEAIIKGASK

SEQ ID NO: 15029 - protein, 458 aa, Triticum aestivum
  peptide (1)..(458): Ceres Seq. ID no. 13597846
  misc_feature (1)..(454): Pfam Name: Pfam Description:  UDP-glucoronosyl and UDP-glucosyl transferase
  misc_feature (1)..(452): NCBI GI NO: 34394683 NR Description: putative flavonol 3-O-glucosyltransferase
  misc_feature (1)..(456): NCBI GI NO: 34394651 NR Description: putative glucosyltransferase
  misc_feature (1)..(457): NCBI GI NO: 34394680 NR Description: putative glucosyltransferase
  misc_feature (1)..(456): NCBI GI NO: 34394653 NR Description: putative glucosyltransferase-3
  misc_feature (1)..(454): NCBI GI NO: 34898742 NR Description: putative betanidin 6-O-glucosyltransferase
  misc_feature (1)..(450): NCBI GI NO: 34394688 NR Description: putative glucosyltransferase
  misc_feature (1)..(457): NCBI GI NO: 34394676 NR Description: putative glucosyltransferase
  misc_feature (1)..(457): NCBI GI NO: 22535568 NR Description: putative glucosyltransferase
  misc_feature (164)..(350): NCBI GI NO: 19911213 NR Description: glucosyltransferase like protein [Vigna angularis]
  misc_feature (1)..(454): NCBI GI NO: 2501491 NR Description: Flavonol 3-O-glucosyltransferase 1
MSMLDAGKRLLARSGGALSLTVLVMPAPGENHRCEVAAHIQREEASGLDIRFHHLPAVEPPTDCLGIEEFVSRFVQLHAAHVKAAVSGLACPVAALVLDFFCTTMLDVSRELAVPAYVYITADAAFCALLLRLPALHEEVAVEFEEMEGMVGVPGLPPVPPSSLPVPVMDKKNPNYTWFMYHGRRFTEAKGVIINTVTELEQSVLAAIGDGWCAPGFPAPAVYPVGPVLSVTPPAEQPHECVRWLDAQPPASVVLLCFGSMGFSTAAQAHEIAHGLERSGHRFLWALRGPPAAGAGPGQPSDADLGELLPEGFLERTKEKGLVWPTKAPQKEILAHAAVGGFVTHGGWNSTLESLWFGVPMVPWPLYAEQHLNAFTLVAYMGVAVAMEVDRKRNNFVAASELERAVKALMERDSEEGKRAREKAAEMKAACRKAVEEGGSSYSALGRLSEAIIKGASK

SEQ ID NO: 15030 - DNA, 1079 bp, Triticum aestivum
  misc_feature (1)..(1079): Ceres Seq. ID no. 12587737
aaggacgattctgctcgcgccgccggttccccgatggcggaggactcaggcgccatcctccgccacatctcctccctcaaggacatgcttgacaaggtcaatgaagaaattgaacagaatatacaaaggaccagggaaagagagtcagaaatagtgaagcattctgaaactgaaaaggactatctcgtgaaggaatctgagctaatgaaaggagtatcggttgctgagtttgaacttgatgggcttatgcaagtggaagctgctggaacagattcacttaaagcgatggagggcaatttggaattccggaaagctactctgaatgcaattacgaaactattctacgataaaatggaaaggttcatcgctgaatctaaagacttccaagttaacatgcttggaggttcaattgaggatttacctctcctactaaaggaaagagattcactagagaatgagagtgagaacttgaggatgaagatcaacgccatacaaagttcatcaaaggaatacattgctgagattcttgaggaggtaaatgtggaaaattcagttctggagtctgatgtacagtataggatttcggaatacatggaaattctcaaggatataaacaacctgaagattctatttagttcgagcaattcttaagaagggtcttcattgttgcaggctcatgacccatcaaagttgccacatgtttcttgtgtcttcagtatgccattttggtttggctgtcaagaatcttcagcaagctcaatggaagtaccttgtacatgtttcttctgtcgagaaggttacaccagatctagcacgaatttactgcactaccaaacatgtattggtcctggattgtatatacagttcagttaacctctgtactttagatttcaagctgagggatagtaggaaaaggcaaagtgcctaggaatgcagattggaaaaacagcagtgtcttttgtgggcaattgttgtttttcaaatctgatcgaggagatgtgagaacgtcagatattgcgagaaattgttagtaatggaatagttggttcatcttaagggaatgtaccagtgaagaaagg

SEQ ID NO: 15031 - protein, 216 aa, Triticum aestivum
  peptide (1)..(216): Ceres Seq. ID no. 12587738
  misc_feature (14)..(100): NCBI GI NO: 15219928 NR Description: hypothetical protein; protein id: At1g61450.1
  misc_feature (14)..(100): NCBI GI NO: 25373190 NR Description: protein T1F9.6 [imported] - Arabidopsis thaliana
KDDSARAAGSPMAEDSGAILRHISSLKDMLDKVNEEIEQNIQRTRERESEIVKHSETEKDYLVKESELMKGVSVAEFELDGLMQVEAAGTDSLKAMEGNLEFRKATLNAITKLFYDKMERFIAESKDFQVNMLGGSIEDLPLLLKERDSLENESENLRMKINAIQSSSKEYIAEILEEVNVENSVLESDVQYRISEYMEILKDINNLKILFSSSNS

SEQ ID NO: 15032 - protein, 205 aa, Triticum aestivum
  peptide (1)..(205): Ceres Seq. ID no. 12587739
  misc_feature (3)..(89): NCBI GI NO: 15219928 NR Description: hypothetical protein; protein id: At1g61450.1
  misc_feature (3)..(89): NCBI GI NO: 25373190 NR Description: protein T1F9.6 [imported] - Arabidopsis thaliana
MAEDSGAILRHISSLKDMLDKVNEEIEQNIQRTRERESEIVKHSETEKDYLVKESELMKGVSVAEFELDGLMQVEAAGTDSLKAMEGNLEFRKATLNAITKLFYDKMERFIAESKDFQVNMLGGSIEDLPLLLKERDSLENESENLRMKINAIQSSSKEYIAEILEEVNVENSVLESDVQYRISEYMEILKDINNLKILFSSSNS

SEQ ID NO: 15033 - protein, 188 aa, Triticum aestivum
  peptide (1)..(188): Ceres Seq. ID no. 12587740
  misc_feature (1)..(72): NCBI GI NO: 15219928 NR Description: hypothetical protein; protein id: At1g61450.1
  misc_feature (1)..(72): NCBI GI NO: 25373190 NR Description: protein T1F9.6 [imported] - Arabidopsis thaliana
MLDKVNEEIEQNIQRTRERESEIVKHSETEKDYLVKESELMKGVSVAEFELDGLMQVEAAGTDSLKAMEGNLEFRKATLNAITKLFYDKMERFIAESKDFQVNMLGGSIEDLPLLLKERDSLENESENLRMKINAIQSSSKEYIAEILEEVNVENSVLESDVQYRISEYMEILKDINNLKILFSSSNS

SEQ ID NO: 15034 - DNA, 1274 bp, Triticum aestivum
  misc_feature (1)..(1274): Ceres Seq. ID no. 13597847
accgttcccgacctcattttttacagagactccggcgactccagtccatcgctcgtggaaaatctcagggtcaaagcaggaggcacaccttgatggcgcccctggagtcaggctcctcacagctcttcttcgacagcagtgcgatcgacggcccgttcgatgtctacgagtgcggtaccttggcaggcaccagagtcgtgccagatccacctccacctggaacctcttatggcaagcagagaagttccaggaatgctaaaaaggctcgtcgtgttcatggctctgaggaggtcgaggactgctggaacaggctattcttggaaggatatcaagccgatgtccgcgtatcgacgggcgatggcagccagatcttatcgcattcgtgcattcttggcatcagatctccggttctgagaagtatgttggaagaagctagaattgaacatggtttcagaaacatcctgatttccggtgtcccatcagaagtagtccgtgtcttcatcagatttctgtattcttcacgctttgagcagggtgagatgaagaagtatgcccttcatttgctcgtactctctcatgttttctcggtacaatcgctgaagatcgtctgcaccgaccagctcgagaggttttttcttgctcctgataacgtggtggacgttctacaactggctagactctgtgacgcaccaaggctctcgctcatctgtacccgtatgatcgttggagatttcaagaccatctctctgtcagaagggtggaaagtgatgagacgggccaacccaagcctggagcaagagcttcttgagtttcttgttgaagtggacacaagaaggcaagaaagagctaaaaggatggaggaaaagaaggtttatcttcagttgtatgaagctatggaagctcttgttcatatatgccgagacggttgtaggacgattggcccctgggatcagaaactcaagggcagtcaggttgtttgcaagtttcctgcctgcaagggcatcgagttgctcgtgcgccatttctcggcatgcaaaaaacgtgtgcctcgcggctgcgccaactgcaagcgcatgtggcagcttcttgagctgcattctcgaatgtgttccacaccagacacctgcagggttcctctatgcaggtgaggtcttgtctttgttggtcaggatcatttcatttagacacacaagttttctaggttaatacaacagatgtttgctttcataaaaaaaaaaaaaaaaaagcttatcgataccgtcgacctcgagggg

SEQ ID NO: 15035 - protein, 381 aa, Triticum aestivum
  peptide (1)..(381): Ceres Seq. ID no. 13597848
  misc_feature (105)..(208): Pfam Name: Pfam Description:  BTB/POZ domain
  misc_feature (51)..(351): NCBI GI NO: 34907566 NR Description: B1078G07.24
  misc_feature (61)..(380): NCBI GI NO: 15221235 NR Description: hypothetical protein [Arabidopsis thaliana]
  misc_feature (48)..(381): NCBI GI NO: 15240763 NR Description: expressed protein [Arabidopsis thaliana]
  misc_feature (34)..(276): NCBI GI NO: 29367535 NR Description: unknown [Oryza sativa (japonica cultivar-group)]
  misc_feature (67)..(380): NCBI GI NO: 7485765 NR Description: hypothetical protein F19F18
  misc_feature (67)..(380): NCBI GI NO: 18420081 NR Description: expressed protein [Arabidopsis thaliana]
  misc_feature (67)..(380): NCBI GI NO: 26453150 NR Description: unknown protein [Arabidopsis thaliana]
  misc_feature (67)..(380): NCBI GI NO: 21537174 NR Description: unknown [Arabidopsis thaliana]
  misc_feature (102)..(381): NCBI GI NO: 15242656 NR Description: expressed protein [Arabidopsis thaliana]
  misc_feature (111)..(381): NCBI GI NO: 18408618 NR Description: expressed protein [Arabidopsis thaliana]
RSRPHFLQRLRRLQSIARGKSQGQSRRHTLMAPLESGSSQLFFDSSAIDGPFDVYECGTLAGTRVVPDPPPPGTSYGKQRSSRNAKKARRVHGSEEVEDCWNRLFLEGYQADVRVSTGDGSQILSHSCILGIRSPVLRSMLEEARIEHGFRNILISGVPSEVVRVFIRFLYSSRFEQGEMKKYALHLLVLSHVFSVQSLKIVCTDQLERFFLAPDNVVDVLQLARLCDAPRLSLICTRMIVGDFKTISLSEGWKVMRRANPSLEQELLEFLVEVDTRRQERAKRMEEKKVYLQLYEAMEALVHICRDGCRTIGPWDQKLKGSQVVCKFPACKGIELLVRHFSACKKRVPRGCANCKRMWQLLELHSRMCSTPDTCRVPLCR

SEQ ID NO: 15036 - protein, 351 aa, Triticum aestivum
  peptide (1)..(351): Ceres Seq. ID no. 13597849
  misc_feature (75)..(178): Pfam Name: Pfam Description:  BTB/POZ domain
  misc_feature (21)..(321): NCBI GI NO: 34907566 NR Description: B1078G07.24
  misc_feature (31)..(350): NCBI GI NO: 15221235 NR Description: hypothetical protein [Arabidopsis thaliana]
  misc_feature (18)..(351): NCBI GI NO: 15240763 NR Description: expressed protein [Arabidopsis thaliana]
  misc_feature (4)..(246): NCBI GI NO: 29367535 NR Description: unknown [Oryza sativa (japonica cultivar-group)]
  misc_feature (37)..(350): NCBI GI NO: 7485765 NR Description: hypothetical protein F19F18
  misc_feature (37)..(350): NCBI GI NO: 26453150 NR Description: unknown protein [Arabidopsis thaliana]
  misc_feature (37)..(350): NCBI GI NO: 18420081 NR Description: expressed protein [Arabidopsis thaliana]
  misc_feature (37)..(350): NCBI GI NO: 21537174 NR Description: unknown [Arabidopsis thaliana]
  misc_feature (72)..(351): NCBI GI NO: 15242656 NR Description: expressed protein [Arabidopsis thaliana]
  misc_feature (81)..(351): NCBI GI NO: 18408618 NR Description: expressed protein [Arabidopsis thaliana]
MAPLESGSSQLFFDSSAIDGPFDVYECGTLAGTRVVPDPPPPGTSYGKQRSSRNAKKARRVHGSEEVEDCWNRLFLEGYQADVRVSTGDGSQILSHSCILGIRSPVLRSMLEEARIEHGFRNILISGVPSEVVRVFIRFLYSSRFEQGEMKKYALHLLVLSHVFSVQSLKIVCTDQLERFFLAPDNVVDVLQLARLCDAPRLSLICTRMIVGDFKTISLSEGWKVMRRANPSLEQELLEFLVEVDTRRQERAKRMEEKKVYLQLYEAMEALVHICRDGCRTIGPWDQKLKGSQVVCKFPACKGIELLVRHFSACKKRVPRGCANCKRMWQLLELHSRMCSTPDTCRVPLCR

SEQ ID NO: 15037 - protein, 242 aa, Triticum aestivum
  peptide (1)..(242): Ceres Seq. ID no. 13597850
  misc_feature (1)..(69): Pfam Name: Pfam Description:  BTB/POZ domain
  misc_feature (1)..(212): NCBI GI NO: 34907566 NR Description: B1078G07.24
  misc_feature (1)..(241): NCBI GI NO: 15221235 NR Description: hypothetical protein [Arabidopsis thaliana]
  misc_feature (1)..(242): NCBI GI NO: 15240763 NR Description: expressed protein [Arabidopsis thaliana]
  misc_feature (1)..(137): NCBI GI NO: 29367535 NR Description: unknown [Oryza sativa (japonica cultivar-group)]
  misc_feature (1)..(241): NCBI GI NO: 7485765 NR Description: hypothetical protein F19F18
  misc_feature (1)..(241): NCBI GI NO: 26453150 NR Description: unknown protein [Arabidopsis thaliana]
  misc_feature (1)..(241): NCBI GI NO: 18420081 NR Description: expressed protein [Arabidopsis thaliana]
  misc_feature (1)..(241): NCBI GI NO: 21537174 NR Description: unknown [Arabidopsis thaliana]
  misc_feature (1)..(242): NCBI GI NO: 15242656 NR Description: expressed protein [Arabidopsis thaliana]
  misc_feature (1)..(242): NCBI GI NO: 18408618 NR Description: expressed protein [Arabidopsis thaliana]
MLEEARIEHGFRNILISGVPSEVVRVFIRFLYSSRFEQGEMKKYALHLLVLSHVFSVQSLKIVCTDQLERFFLAPDNVVDVLQLARLCDAPRLSLICTRMIVGDFKTISLSEGWKVMRRANPSLEQELLEFLVEVDTRRQERAKRMEEKKVYLQLYEAMEALVHICRDGCRTIGPWDQKLKGSQVVCKFPACKGIELLVRHFSACKKRVPRGCANCKRMWQLLELHSRMCSTPDTCRVPLCR

SEQ ID NO: 15038 - DNA, 1580 bp, Triticum aestivum
  misc_feature (1)..(1580): Ceres Seq. ID no. 15224517
gactttcgtgcaaacatccattcttcctctcagccttaagcgaaaaaaccctagcactggacgacctccaaaaccctagagccgtccccaatggcgagccacgaaaccgacccgtcccctgccgccccctccaagaagaagaagaggcactccaagaagcgcaaggccatcgaagtcactgtagatgcctcctttcctggcgccgccgcccccgtcgtcggctactttccgacgggctacgacccccttgcggccgcagagcccccacgtgcgcggttgttccgccacgagaagcaccataaccgcgtcgagctagtggtccgcgcccctggtggaggccccgacttcgtcggccggagctacgccggcgaggccgctgcgccgcagctctgcggctacgccctcggcgtcctcgacaaggccaccagcactctgaagattgtccccatcgcctccaacaagattttgaggctagagccacactttgaagtgcagcaaccggctcattcacaacagtcagcagcagaagcaggttcttctgtagcagatactgaattgaacagacaagatcttacccaggcttatgggaccaagaaagataaggataaggataataagtggaagtcactaaaagaacaaaggaatgacccttctgcttatttggaccttgatcttggagagtccaagaccactgcagatgccactgatagtcaggcatcaatggaagttcgcaacattccaccttatgatcctgctgcagatacatctgaaaaggcatatctttttgatgagatcattccaaaaaatatacggccacaccttcttgatattgtgggacactttgaatcgggagaatttggtttgaaaggctatgggagttttgtctcgaatcgtgtgaataagttgcaggaacttcagggtgaagatcaggaaaggcttgcttggatactatcctatatcacacatctcctgtccttgttggcgcgcaacagctccatgtccaagcagaaaagaaaagaaaaagaccagaccatccgtggaccaatgatcccacaggcggtgcaccgcaagctgttgctgatgttcacggagccagggtcttcttccttgtcgacagagaaacacgagcttctgatcaattacattttagtactcacactttttgctgatgacttcagatctgaacctacggatatatgtgcggacttgaaaatgaaccgccagatgcttaaaccatattatgaccagctgggatgcaagtccgtgtcaacaggtgcttttaaaccagtttttatgacacttccagcacccctcaagttcccacaacaagtcacaaggagaaggcggcgaaaataaccatcttagttattggtttccatttgatatggttgtgataggaaaggtatgcattgccaccgtcgaacctatgtgccctcagctcagtttcaccaatgtagtggagaaaatgatgaaggtggttgttctgtttttgttttctattgtcacttgggaattgctacgagaggaaccatattactgatatataatttgcttgctaccgaaatttgttttttgatgct

SEQ ID NO: 15039 - protein, 421 aa, Triticum aestivum
  peptide (1)..(421): Ceres Seq. ID no. 15224518
  misc_feature (1)..(421): NCBI GI NO: 15231416 NR Description: expressed protein [Arabidopsis thaliana]
MASHETDPSPAAPSKKKKRHSKKRKAIEVTVDASFPGAAAPVVGYFPTGYDPLAAAEPPRARLFRHEKHHNRVELVVRAPGGGPDFVGRSYAGEAAAPQLCGYALGVLDKATSTLKIVPIASNKILRLEPHFEVQQPAHSQQSAAEAGSSVADTELNRQDLTQAYGTKKDKDKDNKWKSLKEQRNDPSAYLDLDLGESKTTADATDSQASMEVRNIPPYDPAADTSEKAYLFDEIIPKNIRPHLLDIVGHFESGEFGLKGYGSFVSNRVNKLQELQGEDQERLAWILSYITHLLSLLARNSSMSKQKRKEKDQTIRGPMIPQAVHRKLLLMFTEPGSSSLSTEKHELLINYILVLTLFADDFRSEPTDICADLKMNRQMLKPYYDQLGCKSVSTGAFKPVFMTLPAPLKFPQQVTRRRRRK

SEQ ID NO: 15040 - protein, 211 aa, Triticum aestivum
  peptide (1)..(211): Ceres Seq. ID no. 15224519
  misc_feature (1)..(211): NCBI GI NO: 15231416 NR Description: expressed protein [Arabidopsis thaliana]
MEVRNIPPYDPAADTSEKAYLFDEIIPKNIRPHLLDIVGHFESGEFGLKGYGSFVSNRVNKLQELQGEDQERLAWILSYITHLLSLLARNSSMSKQKRKEKDQTIRGPMIPQAVHRKLLLMFTEPGSSSLSTEKHELLINYILVLTLFADDFRSEPTDICADLKMNRQMLKPYYDQLGCKSVSTGAFKPVFMTLPAPLKFPQQVTRRRRRK

SEQ ID NO: 15041 - DNA, 1376 bp, Triticum aestivum
  misc_feature (1)..(1376): Ceres Seq. ID no. 13598635
aactcaacacgccaaggcaaagcaccagtagtcacacaagagaaaagcaagagcagcaagcagcacagagctagagaaaagaggagcgtctcatcgggaggaggagaaagaaaaagcgagcgaggatgtgtggcggagcgatcctcgccgagctcatcccgggcgcgccggcgcggcgcgccacgtccggccatggccacgtctggccgggcaagggcgccaagcagaccaaggccgccgcggccgacgacttcgaggccgcgttccgggagttcaacgaggactctgatgtggaggacgacgtcgtgatggtgatggagcggcgggaggaggtggccgagagcaagcccttcgtgttcgccgcttcgcccaagaagcagcagcaggaggaggaggaggcggcgcccgtccgccgcaggaagccggcgcagtaccggggcgtgcggcgccggccgtggggcaagtgggccgccgagatccgcgaccccgtcaagggcgtccgcgtctggctcggcaccttcccctccgccgaggccgccgcgctcgcctacgacgaagccgcgcgcgccatccgcgggcccagggccaagctcaacttctcctcctcctctgccgtcgccgccgcggccccgggagcgcgcaagcgcggccgcgccgcgccccccgctgccaagccagcgccggtcatcaccctcgtcgacgatgaggaggagcacgcgtcgtccttcgtcaagcacgaggccgaggcgagcgagggctccgagtccagcggcgccctccccgacttctcgtggcagggcatatcggcgttcgacgaggccccggcgtaccccgccccggagccggagaccgagcagctgacaaagcgggcgaggacgacggaggcggaagacaccgacgagggcatgtcggcccacccggcatcagactccgactccgacgcgctcttcgacgccctcctcttcgccgaccagttcgccttcttcaacggcggcgcctacgagtccctcgacagcctcttcagcgccgacgccgtgcagagcagcgccaccgccaccgccgtgaacgaggcggccctggggctctggaccttcgacgacgactgcctcgtcgacgagtgcagcctgtcgttctagatcttgttccgtgtgcgtccgttcatgtcatgagatgcggtggtgtaaatagagtagcttgccttgtgatgaaatccgttcgtccgtcgtcgcttcttggatcagcaagcgatgatggattctgtgtaagagtttggcatcgtcgtgaaagattttgcctacgccttcgatgcaaaagctcgacttccgtttctgaaatgttcaaaaaaaaaaaaaaaaaacggcacgagaagcttatcg

SEQ ID NO: 15042 - protein, 336 aa, Triticum aestivum
  peptide (1)..(336): Ceres Seq. ID no. 13598636
  misc_feature (100)..(162): Pfam Name: Pfam Description:  AP2 domain
  misc_feature (1)..(336): NCBI GI NO: 15217288 NR Description: Putative EREBP-like protein [Oryza sativa]
  misc_feature (1)..(328): NCBI GI NO: 15217289 NR Description: Putative AP2 domain containing transcription factor
  misc_feature (1)..(325): NCBI GI NO: 15217291 NR Description: Putative AP2 domain containing protein
  misc_feature (1)..(179): NCBI GI NO: 33331083 NR Description: ethylene responsive protein [Glycine max]
  misc_feature (1)..(239): NCBI GI NO: 37533936 NR Description: putative protein containing AP2 DNA binding domain
  misc_feature (1)..(325): NCBI GI NO: 34906702 NR Description: EREBP
  misc_feature (1)..(325): NCBI GI NO: 33146866 NR Description: EREB-like protein
  misc_feature (1)..(183): NCBI GI NO: 38343926 NR Description: ethylene transcription factor [Fagus sylvatica]
  misc_feature (1)..(201): NCBI GI NO: 37538128 NR Description: JERF3 [Lycopersicon esculentum]
  misc_feature (1)..(194): NCBI GI NO: 30961941 NR Description: C-repeat/DRE-binding factor [Nicotiana tabacum]
MCGGAILAELIPGAPARRATSGHGHVWPGKGAKQTKAAAADDFEAAFREFNEDSDVEDDVVMVMERREEVAESKPFVFAASPKKQQQEEEEAAPVRRRKPAQYRGVRRRPWGKWAAEIRDPVKGVRVWLGTFPSAEAAALAYDEAARAIRGPRAKLNFSSSSAVAAAAPGARKRGRAAPPAAKPAPVITLVDDEEEHASSFVKHEAEASEGSESSGALPDFSWQGISAFDEAPAYPAPEPETEQLTKRARTTEAEDTDEGMSAHPASDSDSDALFDALLFADQFAFFNGGAYESLDSLFSADAVQSSATATAVNEAALGLWTFDDDCLVDECSLSF

SEQ ID NO: 15043 - protein, 275 aa, Triticum aestivum
  peptide (1)..(275): Ceres Seq. ID no. 13598637
  misc_feature (39)..(101): Pfam Name: Pfam Description:  AP2 domain
  misc_feature (1)..(275): NCBI GI NO: 15217288 NR Description: Putative EREBP-like protein [Oryza sativa]
  misc_feature (1)..(267): NCBI GI NO: 15217289 NR Description: Putative AP2 domain containing transcription factor
  misc_feature (1)..(264): NCBI GI NO: 15217291 NR Description: Putative AP2 domain containing protein
  misc_feature (1)..(118): NCBI GI NO: 33331083 NR Description: ethylene responsive protein [Glycine max]
  misc_feature (1)..(178): NCBI GI NO: 37533936 NR Description: putative protein containing AP2 DNA binding domain
  misc_feature (1)..(264): NCBI GI NO: 34906702 NR Description: EREBP
  misc_feature (1)..(264): NCBI GI NO: 33146866 NR Description: EREB-like protein
  misc_feature (1)..(122): NCBI GI NO: 38343926 NR Description: ethylene transcription factor [Fagus sylvatica]
  misc_feature (1)..(140): NCBI GI NO: 37538128 NR Description: JERF3 [Lycopersicon esculentum]
  misc_feature (1)..(133): NCBI GI NO: 30961941 NR Description: C-repeat/DRE-binding factor [Nicotiana tabacum]
MVMERREEVAESKPFVFAASPKKQQQEEEEAAPVRRRKPAQYRGVRRRPWGKWAAEIRDPVKGVRVWLGTFPSAEAAALAYDEAARAIRGPRAKLNFSSSSAVAAAAPGARKRGRAAPPAAKPAPVITLVDDEEEHASSFVKHEAEASEGSESSGALPDFSWQGISAFDEAPAYPAPEPETEQLTKRARTTEAEDTDEGMSAHPASDSDSDALFDALLFADQFAFFNGGAYESLDSLFSADAVQSSATATAVNEAALGLWTFDDDCLVDECSLSF

SEQ ID NO: 15044 - protein, 273 aa, Triticum aestivum
  peptide (1)..(273): Ceres Seq. ID no. 13598638
  misc_feature (37)..(99): Pfam Name: Pfam Description:  AP2 domain
  misc_feature (1)..(273): NCBI GI NO: 15217288 NR Description: Putative EREBP-like protein [Oryza sativa]
  misc_feature (1)..(265): NCBI GI NO: 15217289 NR Description: Putative AP2 domain containing transcription factor
  misc_feature (1)..(262): NCBI GI NO: 15217291 NR Description: Putative AP2 domain containing protein
  misc_feature (1)..(116): NCBI GI NO: 33331083 NR Description: ethylene responsive protein [Glycine max]
  misc_feature (1)..(176): NCBI GI NO: 37533936 NR Description: putative protein containing AP2 DNA binding domain
  misc_feature (1)..(262): NCBI GI NO: 34906702 NR Description: EREBP
  misc_feature (1)..(262): NCBI GI NO: 33146866 NR Description: EREB-like protein
  misc_feature (1)..(120): NCBI GI NO: 38343926 NR Description: ethylene transcription factor [Fagus sylvatica]
  misc_feature (1)..(138): NCBI GI NO: 37538128 NR Description: JERF3 [Lycopersicon esculentum]
  misc_feature (1)..(131): NCBI GI NO: 30961941 NR Description: C-repeat/DRE-binding factor [Nicotiana tabacum]
MERREEVAESKPFVFAASPKKQQQEEEEAAPVRRRKPAQYRGVRRRPWGKWAAEIRDPVKGVRVWLGTFPSAEAAALAYDEAARAIRGPRAKLNFSSSSAVAAAAPGARKRGRAAPPAAKPAPVITLVDDEEEHASSFVKHEAEASEGSESSGALPDFSWQGISAFDEAPAYPAPEPETEQLTKRARTTEAEDTDEGMSAHPASDSDSDALFDALLFADQFAFFNGGAYESLDSLFSADAVQSSATATAVNEAALGLWTFDDDCLVDECSLSF

SEQ ID NO: 15045 - DNA, 1155 bp, Triticum aestivum
  misc_feature (1)..(1155): Ceres Seq. ID no. 13597851
accgatcatttccacccgacgcttccaccgcccgaatccagccagccagccagccaggcgaagctgcgaggatgtaccgagatcccaatcccttcgacgagggcgccgacgacagcgccttctccaatgggggaggacgcggtggtgccgctggtggtggtggcggcaagtcgcagttccagtttcgcccgacggagcccgtcggattcggcgccggtggcaacggggacgccgccgtcgacatcccccttgacaacatgaacggttcgaatggcaagcaaagtgagctctcgcagtggcaggcagatctcaagaggcgagaggcggacataaagaggagggaggaagctctcaagagtgctggggtgcccatggaggacaagaactggccgccattcttcccaatcatccaccacgacattgcccatgaaataccagccaacgcgcagcggttgcagtatcttgcttttgctagctggctcggcatcgtgctttgcctcgtttggaatttcattgctgtcacagtctgttggatcagagggggggactctaaactgtttttcctggctactatctacggtatgcttggagtacctttgtcctacttgatgtggtataggcctctgtaccgtgcaatgagaactgacagcgcattcagctttgggtggtttttcctttgttacatgctccacattggcttttgtataattgctgccattgctccgccgatcgtatttcgtgggaagtcattaacgggtatactggctgcaatcgataccttctctgatcatgcattagttgggatactttactttgttggatttgccttgttttcactggagacagttgtgagcatttgggttcttcagagagtatacatgtatttcagagggcacaagtgaagcgggcaacggaagaaaatacagaagtccaccggtgtcatcggagcgtgctgcggttctgtgcatacatatgagtacatgccattctttgtatgttatggtagttatgggaataatttgcctcagaaattcagaagtttgtttatttgttgcaagagagtagaagtgtaacaaacgttgtattagtgttatctcttgaactgtctgttgtttaaaaccttggatcttacctatataaactgcatgttgttgg

SEQ ID NO: 15046 - protein, 299 aa, Triticum aestivum
  peptide (1)..(299): Ceres Seq. ID no. 15222209
  misc_feature (125)..(299): Pfam Name: Pfam Description:  SCAMP family
  misc_feature (24)..(299): NCBI GI NO: 38347080 NR Description: OSJNBa0006A01.21
  misc_feature (109)..(289): NCBI GI NO: 38567965 NR Description: OSJNBa0093F12.6
  misc_feature (24)..(96): NCBI GI NO: 38567965 NR Description: OSJNBa0093F12.6
  misc_feature (25)..(299): NCBI GI NO: 15222550 NR Description: secretory carrier membrane protein -related
  misc_feature (22)..(299): NCBI GI NO: 15219893 NR Description: secretory carrier membrane protein
  misc_feature (27)..(299): NCBI GI NO: 3941289 NR Description: similarity to SCAMP37 [Pisum sativum]
  misc_feature (27)..(297): NCBI GI NO: 15220305 NR Description: secretory carrier membrane protein -related
  misc_feature (77)..(299): NCBI GI NO: 15226410 NR Description: secretory carrier-associated membrane protein -related
  misc_feature (27)..(299): NCBI GI NO: 34899754 NR Description: putative secretory carrier membrane protein
  misc_feature (27)..(299): NCBI GI NO: 7109232 NR Description: secretory carrier membrane protein [Oryza sativa]
RSFPPDASTARIQPASQPGEAARMYRDPNPFDEGADDSAFSNGGGRGGAAGGGGGKSQFQFRPTEPVGFGAGGNGDAAVDIPLDNMNGSNGKQSELSQWQADLKRREADIKRREEALKSAGVPMEDKNWPPFFPIIHHDIAHEIPANAQRLQYLAFASWLGIVLCLVWNFIAVTVCWIRGGDSKLFFLATIYGMLGVPLSYLMWYRPLYRAMRTDSAFSFGWFFLCYMLHIGFCIIAAIAPPIVFRGKSLTGILAAIDTFSDHALVGILYFVGFALFSLETVVSIWVLQRVYMYFRGHK

SEQ ID NO: 15047 - protein, 276 aa, Triticum aestivum
  peptide (1)..(276): Ceres Seq. ID no. 15222210
  misc_feature (102)..(276): Pfam Name: Pfam Description:  SCAMP family
  misc_feature (1)..(276): NCBI GI NO: 38347080 NR Description: OSJNBa0006A01.21
  misc_feature (86)..(266): NCBI GI NO: 38567965 NR Description: OSJNBa0093F12.6
  misc_feature (1)..(73): NCBI GI NO: 38567965 NR Description: OSJNBa0093F12.6
  misc_feature (2)..(276): NCBI GI NO: 15222550 NR Description: secretory carrier membrane protein -related
  misc_feature (1)..(276): NCBI GI NO: 15219893 NR Description: secretory carrier membrane protein
  misc_feature (4)..(276): NCBI GI NO: 3941289 NR Description: similarity to SCAMP37 [Pisum sativum]
  misc_feature (4)..(274): NCBI GI NO: 15220305 NR Description: secretory carrier membrane protein -related
  misc_feature (54)..(276): NCBI GI NO: 15226410 NR Description: secretory carrier-associated membrane protein -related
  misc_feature (4)..(276): NCBI GI NO: 34899754 NR Description: putative secretory carrier membrane protein
  misc_feature (4)..(276): NCBI GI NO: 7109232 NR Description: secretory carrier membrane protein [Oryza sativa]
MYRDPNPFDEGADDSAFSNGGGRGGAAGGGGGKSQFQFRPTEPVGFGAGGNGDAAVDIPLDNMNGSNGKQSELSQWQADLKRREADIKRREEALKSAGVPMEDKNWPPFFPIIHHDIAHEIPANAQRLQYLAFASWLGIVLCLVWNFIAVTVCWIRGGDSKLFFLATIYGMLGVPLSYLMWYRPLYRAMRTDSAFSFGWFFLCYMLHIGFCIIAAIAPPIVFRGKSLTGILAAIDTFSDHALVGILYFVGFALFSLETVVSIWVLQRVYMYFRGHK

SEQ ID NO: 15048 - protein, 214 aa, Triticum aestivum
  peptide (1)..(214): Ceres Seq. ID no. 15222211
  misc_feature (40)..(214): Pfam Name: Pfam Description:  SCAMP family
  misc_feature (1)..(214): NCBI GI NO: 38347080 NR Description: OSJNBa0006A01.21
  misc_feature (24)..(204): NCBI GI NO: 38567965 NR Description: OSJNBa0093F12.6
  misc_feature (1)..(11): NCBI GI NO: 38567965 NR Description: OSJNBa0093F12.6
  misc_feature (1)..(214): NCBI GI NO: 15222550 NR Description: secretory carrier membrane protein -related
  misc_feature (1)..(214): NCBI GI NO: 15219893 NR Description: secretory carrier membrane protein
  misc_feature (1)..(214): NCBI GI NO: 3941289 NR Description: similarity to SCAMP37 [Pisum sativum]
  misc_feature (1)..(212): NCBI GI NO: 15220305 NR Description: secretory carrier membrane protein -related
  misc_feature (1)..(214): NCBI GI NO: 15226410 NR Description: secretory carrier-associated membrane protein -related
  misc_feature (1)..(214): NCBI GI NO: 34899754 NR Description: putative secretory carrier membrane protein
  misc_feature (1)..(214): NCBI GI NO: 7109232 NR Description: secretory carrier membrane protein [Oryza sativa]
MNGSNGKQSELSQWQADLKRREADIKRREEALKSAGVPMEDKNWPPFFPIIHHDIAHEIPANAQRLQYLAFASWLGIVLCLVWNFIAVTVCWIRGGDSKLFFLATIYGMLGVPLSYLMWYRPLYRAMRTDSAFSFGWFFLCYMLHIGFCIIAAIAPPIVFRGKSLTGILAAIDTFSDHALVGILYFVGFALFSLETVVSIWVLQRVYMYFRGHK

SEQ ID NO: 15049 - DNA, 1809 bp, Triticum aestivum
  misc_feature (1)..(1809): Ceres Seq. ID no. 13597532
attaaacccattcacccctttcctaagccctccccgctcccacccgaccgctcgaccatgtccaccaggaaggacgccggcccctcgccggcggcggcgcccgccaccgcgcctgccctaacgccttccccattcatgcccatgtgtcagatgcggcgggatgagtgcgcagacctcctcaagctgatctccggcgtctcgcgccctctcgaggacgtcgtggcggatttcctcgcccgcgtcccgcccgagcgccgcctccgcttcggttccgccatcaagtttctcctcgaggacaaggtgatgtttcaaccagctgagcgtttaattgcactcgcaattcttcatcaagggtattcctcacagctgacaaatccgtttgttccattcttaataaatgttgcctgtgatgaaatttctgagagaccagaacgtgtttttctccagcttttgctaacttcagctaatggggacaacaacaaggagatcttgaaacagtctgcagaagattacttgaaggagccttcttatgcatctcaggtgttgctgccaagagaccagcttgaaagccaatactcctgcaatgatgttcagctgcagacatacactagttgcgcagctgctacggttagaagtgctattcctgacccagatgtttcccaaagctgcggtgattcatcaggattatcaccgaccaaactaaatagagataatgtggtgacaaatttacttcaacaaacaccactgagaggattgtctcctccatggattaggccctctccccccagacttgaaatacttgaaggggagttgcagtggttgaacctggacaacaaccatgagctactatgggatggtagcatgtgtgctgacactagccgaggagcttcaatccgtgatttggtcggaagagcctgtaaaggaccacttgcacctgcccaacaagagcaagttgttttagatttagccagggactggaagctagtttatcattgcggaatgacaccagagaagcttcccgaccttgttgaacataatccactcattgctgttgatgttctttcaaagctgatcaattgtcctgacatggattcttatttcaatgttcttgtgcacatggaaatgagcctgcattcaatggaagttgtaaacaggcttactacagcagtagatctaccaccaggattcattcatgactacatctcaaattgtattcggtcatgccaaaatatcaaggataagtacatgcaaaacagacttgtgagactagtttgtgtttttctacaaagtctcattcggaacaagataataaatgttgaagatctattcattgaggtacaagccttctgcattgcgttttctcgaataagagaagcagctggtttgttcaggcttctcaaatctctagagtgaagaaggttgtatgagttaccggagttcagctctataaacaaattttttcatgctgtacattcatagtcttatattttcgtgttgatctgccaattcagggttgtacttcatagatcatagctcttgttgatgtatttattgtcattaagctgttgccctcacctaaagaaaggtcaaaagatatcagaactattacccaggctttgatagttccgctgaatcattttgatgtggacttaaaccacatgttctttaggtgagacaaattagcaattacctttagcctgttgaaagatagctgaacaatgggcgcctgcttctcagttgaggctcccgagtacaagtaatttgagagatttcttaatttaaattcagatgtaaagactagttgtactc

SEQ ID NO: 15050 - protein, 470 aa, Triticum aestivum
  peptide (1)..(470): Ceres Seq. ID no. 15222122
  misc_feature (48)..(470): NCBI GI NO: 15238813 NR Description: expressed protein [Arabidopsis thaliana]
  misc_feature (48)..(470): NCBI GI NO: 30686822 NR Description: expressed protein [Arabidopsis thaliana]
  misc_feature (48)..(470): NCBI GI NO: 21539503 NR Description: putative protein [Arabidopsis thaliana]
  misc_feature (27)..(470): NCBI GI NO: 26553441 NR Description: DNA segment
  misc_feature (27)..(470): NCBI GI NO: 6048964 NR Description: unknown [Homo sapiens]
  misc_feature (27)..(470): NCBI GI NO: 40538809 NR Description: hypothetical protein C40 [Homo sapiens]
  misc_feature (27)..(470): NCBI GI NO: 37588935 NR Description: C40 protein [Homo sapiens]
  misc_feature (198)..(470): NCBI GI NO: 26334389 NR Description: unnamed protein product [Mus musculus]
  misc_feature (260)..(470): NCBI GI NO: 24762515 NR Description: CG13567-PB [Drosophila melanogaster]
  misc_feature (367)..(470): NCBI GI NO: 34875640 NR Description: similar to DNA segment
IKPIHPFPKPSPLPPDRSTMSTRKDAGPSPAAAPATAPALTPSPFMPMCQMRRDECADLLKLISGVSRPLEDVVADFLARVPPERRLRFGSAIKFLLEDKVMFQPAERLIALAILHQGYSSQLTNPFVPFLINVACDEISERPERVFLQLLLTSANGDNNKEILKQSAEDYLKEPSYASQVLLPRDQLESQYSCNDVQLQTYTSCAAATVRSAIPDPDVSQSCGDSSGLSPTKLNRDNVVTNLLQQTPLRGLSPPWIRPSPPRLEILEGELQWLNLDNNHELLWDGSMCADTSRGASIRDLVGRACKGPLAPAQQEQVVLDLARDWKLVYHCGMTPEKLPDLVEHNPLIAVDVLSKLINCPDMDSYFNVLVHMEMSLHSMEVVNRLTTAVDLPPGFIHDYISNCIRSCQNIKDKYMQNRLVRLVCVFLQSLIRNKIINVEDLFIEVQAFCIAFSRIREAAGLFRLLKSLE

SEQ ID NO: 15051 - protein, 451 aa, Triticum aestivum
  peptide (1)..(451): Ceres Seq. ID no. 15222123
  misc_feature (29)..(451): NCBI GI NO: 15238813 NR Description: expressed protein [Arabidopsis thaliana]
  misc_feature (29)..(451): NCBI GI NO: 30686822 NR Description: expressed protein [Arabidopsis thaliana]
  misc_feature (29)..(451): NCBI GI NO: 21539503 NR Description: putative protein [Arabidopsis thaliana]
  misc_feature (8)..(451): NCBI GI NO: 26553441 NR Description: DNA segment
  misc_feature (8)..(451): NCBI GI NO: 6048964 NR Description: unknown [Homo sapiens]
  misc_feature (8)..(451): NCBI GI NO: 37588935 NR Description: C40 protein [Homo sapiens]
  misc_feature (8)..(451): NCBI GI NO: 40538809 NR Description: hypothetical protein C40 [Homo sapiens]
  misc_feature (179)..(451): NCBI GI NO: 26334389 NR Description: unnamed protein product [Mus musculus]
  misc_feature (241)..(451): NCBI GI NO: 24762515 NR Description: CG13567-PB [Drosophila melanogaster]
  misc_feature (348)..(451): NCBI GI NO: 34875640 NR Description: similar to DNA segment
MSTRKDAGPSPAAAPATAPALTPSPFMPMCQMRRDECADLLKLISGVSRPLEDVVADFLARVPPERRLRFGSAIKFLLEDKVMFQPAERLIALAILHQGYSSQLTNPFVPFLINVACDEISERPERVFLQLLLTSANGDNNKEILKQSAEDYLKEPSYASQVLLPRDQLESQYSCNDVQLQTYTSCAAATVRSAIPDPDVSQSCGDSSGLSPTKLNRDNVVTNLLQQTPLRGLSPPWIRPSPPRLEILEGELQWLNLDNNHELLWDGSMCADTSRGASIRDLVGRACKGPLAPAQQEQVVLDLARDWKLVYHCGMTPEKLPDLVEHNPLIAVDVLSKLINCPDMDSYFNVLVHMEMSLHSMEVVNRLTTAVDLPPGFIHDYISNCIRSCQNIKDKYMQNRLVRLVCVFLQSLIRNKIINVEDLFIEVQAFCIAFSRIREAAGLFRLLKSLE

SEQ ID NO: 15052 - protein, 425 aa, Triticum aestivum
  peptide (1)..(425): Ceres Seq. ID no. 15222124
  misc_feature (3)..(425): NCBI GI NO: 15238813 NR Description: expressed protein [Arabidopsis thaliana]
  misc_feature (3)..(425): NCBI GI NO: 30686822 NR Description: expressed protein [Arabidopsis thaliana]
  misc_feature (3)..(425): NCBI GI NO: 21539503 NR Description: putative protein [Arabidopsis thaliana]
  misc_feature (1)..(425): NCBI GI NO: 26553441 NR Description: DNA segment
  misc_feature (1)..(425): NCBI GI NO: 6048964 NR Description: unknown [Homo sapiens]
  misc_feature (1)..(425): NCBI GI NO: 37588935 NR Description: C40 protein [Homo sapiens]
  misc_feature (1)..(425): NCBI GI NO: 40538809 NR Description: hypothetical protein C40 [Homo sapiens]
  misc_feature (153)..(425): NCBI GI NO: 26334389 NR Description: unnamed protein product [Mus musculus]
  misc_feature (215)..(425): NCBI GI NO: 24762515 NR Description: CG13567-PB [Drosophila melanogaster]
  misc_feature (322)..(425): NCBI GI NO: 34875640 NR Description: similar to DNA segment
MPMCQMRRDECADLLKLISGVSRPLEDVVADFLARVPPERRLRFGSAIKFLLEDKVMFQPAERLIALAILHQGYSSQLTNPFVPFLINVACDEISERPERVFLQLLLTSANGDNNKEILKQSAEDYLKEPSYASQVLLPRDQLESQYSCNDVQLQTYTSCAAATVRSAIPDPDVSQSCGDSSGLSPTKLNRDNVVTNLLQQTPLRGLSPPWIRPSPPRLEILEGELQWLNLDNNHELLWDGSMCADTSRGASIRDLVGRACKGPLAPAQQEQVVLDLARDWKLVYHCGMTPEKLPDLVEHNPLIAVDVLSKLINCPDMDSYFNVLVHMEMSLHSMEVVNRLTTAVDLPPGFIHDYISNCIRSCQNIKDKYMQNRLVRLVCVFLQSLIRNKIINVEDLFIEVQAFCIAFSRIREAAGLFRLLKSLE

SEQ ID NO: 15053 - DNA, 1277 bp, Triticum aestivum
  misc_feature (1)..(1277): Ceres Seq. ID no. 13590776
tacctttccaccccctccattccacccagacagcccgacccgctcctcagctcacctcacgccgtaacctaagccaggttttcctcctccacctccacctccaccggcatcacctcggacgcgcggcggcgtgcagccatggcgatggtggcacaggcgggcttcggcctcacccgcgtcgtcatgctcgtcggcgcgggcgtggccggctccgtcgtcctacgaaacggccgcctctcggagatcctcaccgagatacaggagtttctggagaagggggagatgggtaagggaggaggcggtggtgcggaccacggcatcaacgacgcgctcaacgaggtgcgccaacttgctatgcaggtacgcaatctaggttctccacgttcgataactgttctcagtggaggttctggacaaacaggagtatcaggactaatagtacctgcagcaactgttggagcactgggttatggttatatgtggtggaaaggcatctcctttggggacttaatgtatgtcaccaagcaaaacatggctaatgttgtttcaaatatgactaaacatctggagcaagttcagagctctcttgctgctgctaaaaagcatttgacacaacgcattgagaagttggatgacaaattggatcagcagaaggcgctttctgggcaaataaaagatgatgttactggcgcacgactgaagcttgagaatattggttcagagattaagaacatcaaagaattggtctggggactggatgagaagatggattcaatggaagccaaacagaatttttcatgcgctggtgtgatgtacctctgccaattcatagagcaaagtggtgggaaactccctgaacgcctggaaggcattgaaccatcagcgaagcgatttgaaacaattggcatacaggggttgcaactagccatagaaacagggaattttagtgatttcagcaatgctgattccactgacaagataagcaggtccaactcgttaaagtctgccaactaattttcttcggggttggcgagacatgtatccagattcgttacttagtggaacattgtaaagggagattcttgctggataaaatgtaaagagtcccagcctttttgttatttgcttgcaggaagtgctgtttgttaaatttgaaaacgtgtgcgaagtagtagctactatggaatctagaccagatgttattctggcatcacttatgccttgcatttttatgcaatacttgccgtaaataaatggacgacacttcagtttccttg

SEQ ID NO: 15054 - protein, 291 aa, Triticum aestivum
  peptide (1)..(291): Ceres Seq. ID no. 13590777
  misc_feature (1)..(266): NCBI GI NO: 34906300 NR Description: unnamed protein product
  misc_feature (3)..(289): NCBI GI NO: 18396143 NR Description: bZIP family transcription factor
  misc_feature (3)..(289): NCBI GI NO: 21537323 NR Description: unknown [Arabidopsis thaliana]
  misc_feature (3)..(289): NCBI GI NO: 25361065 NR Description: protein T7N9.6 [imported] - Arabidopsis thaliana
  misc_feature (3)..(242): NCBI GI NO: 15227027 NR Description: expressed protein [Arabidopsis thaliana]
  misc_feature (3)..(242): NCBI GI NO: 7487252 NR Description: hypothetical protein At2g02730
  misc_feature (3)..(229): NCBI GI NO: 18390460 NR Description: expressed protein [Arabidopsis thaliana]
  misc_feature (10)..(217): NCBI GI NO: 34894218 NR Description: P0439B06.30
  misc_feature (11)..(291): NCBI GI NO: 30688826 NR Description: expressed protein [Arabidopsis thaliana]
  misc_feature (11)..(257): NCBI GI NO: 22329773 NR Description: expressed protein [Arabidopsis thaliana]
MAMVAQAGFGLTRVVMLVGAGVAGSVVLRNGRLSEILTEIQEFLEKGEMGKGGGGGADHGINDALNEVRQLAMQVRNLGSPRSITVLSGGSGQTGVSGLIVPAATVGALGYGYMWWKGISFGDLMYVTKQNMANVVSNMTKHLEQVQSSLAAAKKHLTQRIEKLDDKLDQQKALSGQIKDDVTGARLKLENIGSEIKNIKELVWGLDEKMDSMEAKQNFSCAGVMYLCQFIEQSGGKLPERLEGIEPSAKRFETIGIQGLQLAIETGNFSDFSNADSTDKISRSNSLKSAN

SEQ ID NO: 15055 - protein, 289 aa, Triticum aestivum
  peptide (1)..(289): Ceres Seq. ID no. 13590778
  misc_feature (1)..(264): NCBI GI NO: 34906300 NR Description: unnamed protein product
  misc_feature (1)..(287): NCBI GI NO: 18396143 NR Description: bZIP family transcription factor
  misc_feature (1)..(287): NCBI GI NO: 21537323 NR Description: unknown [Arabidopsis thaliana]
  misc_feature (1)..(287): NCBI GI NO: 25361065 NR Description: protein T7N9.6 [imported] - Arabidopsis thaliana
  misc_feature (1)..(240): NCBI GI NO: 15227027 NR Description: expressed protein [Arabidopsis thaliana]
  misc_feature (1)..(240): NCBI GI NO: 7487252 NR Description: hypothetical protein At2g02730
  misc_feature (1)..(227): NCBI GI NO: 18390460 NR Description: expressed protein [Arabidopsis thaliana]
  misc_feature (8)..(215): NCBI GI NO: 34894218 NR Description: P0439B06.30
  misc_feature (9)..(289): NCBI GI NO: 30688826 NR Description: expressed protein [Arabidopsis thaliana]
  misc_feature (9)..(255): NCBI GI NO: 22329773 NR Description: expressed protein [Arabidopsis thaliana]
MVAQAGFGLTRVVMLVGAGVAGSVVLRNGRLSEILTEIQEFLEKGEMGKGGGGGADHGINDALNEVRQLAMQVRNLGSPRSITVLSGGSGQTGVSGLIVPAATVGALGYGYMWWKGISFGDLMYVTKQNMANVVSNMTKHLEQVQSSLAAAKKHLTQRIEKLDDKLDQQKALSGQIKDDVTGARLKLENIGSEIKNIKELVWGLDEKMDSMEAKQNFSCAGVMYLCQFIEQSGGKLPERLEGIEPSAKRFETIGIQGLQLAIETGNFSDFSNADSTDKISRSNSLKSAN

SEQ ID NO: 15056 - protein, 276 aa, Triticum aestivum
  peptide (1)..(276): Ceres Seq. ID no. 13590779
  misc_feature (1)..(251): NCBI GI NO: 34906300 NR Description: unnamed protein product
  misc_feature (1)..(274): NCBI GI NO: 18396143 NR Description: bZIP family transcription factor
  misc_feature (1)..(274): NCBI GI NO: 21537323 NR Description: unknown [Arabidopsis thaliana]
  misc_feature (1)..(274): NCBI GI NO: 25361065 NR Description: protein T7N9.6 [imported] - Arabidopsis thaliana
  misc_feature (1)..(227): NCBI GI NO: 15227027 NR Description: expressed protein [Arabidopsis thaliana]
  misc_feature (1)..(227): NCBI GI NO: 7487252 NR Description: hypothetical protein At2g02730
  misc_feature (1)..(214): NCBI GI NO: 18390460 NR Description: expressed protein [Arabidopsis thaliana]
  misc_feature (1)..(202): NCBI GI NO: 34894218 NR Description: P0439B06.30
  misc_feature (1)..(276): NCBI GI NO: 30688826 NR Description: expressed protein [Arabidopsis thaliana]
  misc_feature (1)..(242): NCBI GI NO: 22329773 NR Description: expressed protein [Arabidopsis thaliana]
MLVGAGVAGSVVLRNGRLSEILTEIQEFLEKGEMGKGGGGGADHGINDALNEVRQLAMQVRNLGSPRSITVLSGGSGQTGVSGLIVPAATVGALGYGYMWWKGISFGDLMYVTKQNMANVVSNMTKHLEQVQSSLAAAKKHLTQRIEKLDDKLDQQKALSGQIKDDVTGARLKLENIGSEIKNIKELVWGLDEKMDSMEAKQNFSCAGVMYLCQFIEQSGGKLPERLEGIEPSAKRFETIGIQGLQLAIETGNFSDFSNADSTDKISRSNSLKSAN

SEQ ID NO: 15057 - DNA, 1096 bp, Triticum aestivum
  misc_feature (1)..(1096): Ceres Seq. ID no. 13655804
gcaaaccaacagctgctactccagcatccacccatccatccatctctcatcttcttcttcttgcaacgaaacgagagcatctagcttacagcgagctaaagattcgaacgatggccgttcttgtggcgaggcaggggcgcgagctgcagcggtacagcgcgagcacccgcgggcgcatcgtggtggggtgcatcccctaccgggtgcgcggcggcggcggcgagggcgagggcgagctggaggtgctggtgatcagctcgcagaaggggcacggcatgatgttccccaagggcgggtgggagctggacgagtccatggacgacgccgcccggcgcgaggccctggaggaggccggcgtccgcggggagatgggcaaggtgctcggctgctggcactaccagagccgccgctaccagaccacctacgagggcatcatgtacccgctccgcgtcaccgacgagctccagcagtggcccgagatggcctcccgcaagcgcacctgggccacggtgcagcaggtcatggagggatgccagcactgctggatgcgggaggcgctcgaggagctcgtcgcccggcacgccaagccgcagtccgccctgtgaacgatcaagcaagcgggcgggtggggtgactggagctcgagcgcgcgcgactctcgcgagaagaggcctggagcgagcaccaacgtccgtccgtccgtcgtcctcgtcgtctctctctcctttcctcggtgcagcggcaggcctgccggcgtgtccggcgtcgtacgacgaccggaccggagcatatatttggccgcccttgccggagagacggactggggacgatggcacgcgcgcgtcaaccctttctcgaggcgtagagtcgtcgtcgtcgtcgccgcggcaaataatagggacgaacttagaaatgtgtagatcgaaagcgaacggggcacgaaaacttgacaaaacaccgcccttcctggtggtacgagcaagctcacgattctttctttaggctcttggagtaaaagatcaatcaaattgtaaattaatttaagtagccgcttttctgtggcacgctcgatcaatcaaacgattactacaatctg

SEQ ID NO: 15058 - protein, 210 aa, Triticum aestivum
  peptide (1)..(210): Ceres Seq. ID no. 13655805
QTNSCYSSIHPSIHLSSSSSCNETRASSLQRAKDSNDGRSCGEAGARAAAVQREHPRAHRGGVHPLPGARRRRRGRGRAGGAGDQLAEGARHDVPQGRVGAGRVHGRRRPARGPGGGRRPRGDGQGARLLALPEPPLPDHLRGHHVPAPRHRRAPAVARDGLPQAHLGHGAAGHGGMPALLDAGGARGARRPARQAAVRPVNDQASGRVG

SEQ ID NO: 15059 - protein, 200 aa, Triticum aestivum
  peptide (1)..(200): Ceres Seq. ID no. 13655806
  misc_feature (58)..(192): Pfam Name: Pfam Description:  NUDIX domain
  misc_feature (34)..(198): NCBI GI NO: 18379275 NR Description: MutT/nudix family protein [Arabidopsis thaliana]
  misc_feature (37)..(198): NCBI GI NO: 21595695 NR Description: unknown [Arabidopsis thaliana]
  misc_feature (37)..(192): NCBI GI NO: 15223919 NR Description: MutT/nudix family protein [Arabidopsis thaliana]
  misc_feature (40)..(197): NCBI GI NO: 22330598 NR Description: MutT/nudix family protein [Arabidopsis thaliana]
  misc_feature (40)..(197): NCBI GI NO: 25367539 NR Description: unknown protein [imported] - Arabidopsis thaliana
  misc_feature (33)..(190): NCBI GI NO: 15221055 NR Description: MutT/nudix family protein [Arabidopsis thaliana]
  misc_feature (59)..(192): NCBI GI NO: 31747031 NR Description: MutT-like protein [Cucumis sativus]
  misc_feature (37)..(186): NCBI GI NO: 38175436 NR Description: MutT-like protein
  misc_feature (37)..(186): NCBI GI NO: 34900054 NR Description: MutT-like protein~contains ESTsAU085960
  misc_feature (37)..(188): NCBI GI NO: 18399682 NR Description: MutT/nudix family protein [Arabidopsis thaliana]
KPTAATPASTHPSISHLLLLATKREHLAYSELKIRTMAVLVARQGRELQRYSASTRGRIVVGCIPYRVRGGGGEGEGELEVLVISSQKGHGMMFPKGGWELDESMDDAARREALEEAGVRGEMGKVLGCWHYQSRRYQTTYEGIMYPLRVTDELQQWPEMASRKRTWATVQQVMEGCQHCWMREALEELVARHAKPQSAL

SEQ ID NO: 15060 - protein, 164 aa, Triticum aestivum
  peptide (1)..(164): Ceres Seq. ID no. 13655807
  misc_feature (22)..(156): Pfam Name: Pfam Description:  NUDIX domain
  misc_feature (1)..(162): NCBI GI NO: 18379275 NR Description: MutT/nudix family protein [Arabidopsis thaliana]
  misc_feature (1)..(162): NCBI GI NO: 21595695 NR Description: unknown [Arabidopsis thaliana]
  misc_feature (1)..(156): NCBI GI NO: 15223919 NR Description: MutT/nudix family protein [Arabidopsis thaliana]
  misc_feature (4)..(161): NCBI GI NO: 22330598 NR Description: MutT/nudix family protein [Arabidopsis thaliana]
  misc_feature (4)..(161): NCBI GI NO: 25367539 NR Description: unknown protein [imported] - Arabidopsis thaliana
  misc_feature (1)..(154): NCBI GI NO: 15221055 NR Description: MutT/nudix family protein [Arabidopsis thaliana]
  misc_feature (23)..(156): NCBI GI NO: 31747031 NR Description: MutT-like protein [Cucumis sativus]
  misc_feature (1)..(150): NCBI GI NO: 38175436 NR Description: MutT-like protein
  misc_feature (1)..(150): NCBI GI NO: 34900054 NR Description: MutT-like protein~contains ESTsAU085960
  misc_feature (1)..(152): NCBI GI NO: 18399682 NR Description: MutT/nudix family protein [Arabidopsis thaliana]
MAVLVARQGRELQRYSASTRGRIVVGCIPYRVRGGGGEGEGELEVLVISSQKGHGMMFPKGGWELDESMDDAARREALEEAGVRGEMGKVLGCWHYQSRRYQTTYEGIMYPLRVTDELQQWPEMASRKRTWATVQQVMEGCQHCWMREALEELVARHAKPQSAL

SEQ ID NO: 15061 - DNA, 1188 bp, Triticum aestivum
  misc_feature (1)..(1188): Ceres Seq. ID no. 15170682
aattcttaaccctagaaacagagcgcaggagggccagccgcaaccgggacaaaagcggaaacaagccaacccaagcctcgattcctcctccatcgccgcggcagaagctcgaggtccagaagggagcgcgagaagcttgcgtgaaggactcagccatggcgagcgcggatctgctgcggagggaggaggagttctacgagtccctgttcgattccgccaaaggcgatgccgctgccgccaagacgcgtgggcagatgattgagaggaagattgaagccttggaggacatggcaaccaaggttagtaaccggaggtctcgcagatggttgaatgatcgcttgctgattgagctcgtccctcgtcttcatgttgaagaaatcaaaggcctctttgcccctccgccatttggtgaggaagcaccactgtcagcattttgcaggacaagtgttggtgagtgggatgccttcaggagcattgacatggacgttgaggcaagatttatgcaacggatgaaacaatcctcagctaagcagaagaatcttgtgaatgaagatgagtcaattgtgctgaatgcttggcgccgtatagattgccaaacaagagaagctatgaagagaaacttcctacctgaactgcttgaaatatatgaggaacggatcagggccttcattgaagacactaccgataaagatgtgcttgtgttgaatgtccaggacccatttcagaggttgctattacatggtgtgtgcgagttctacaacgtaacgtctacgacaacgggtactgtgcaagatggaaagccgtggaagacgacaacaatcaagaagcgttcggggacgggtgttgcccccatgatcacattggttagtttcctgagaacaaagaagaatgggtcacacgttgcctcgtgaggactggaagccccatattctggccatgagcccatgatcatgctcctgggagaagcaaaagttgtttctttaggttttgcttaggatgtacacagatgtaaattaattaccaatttactatgcttcgtctaaagaggtgacaaggcatgcaagtgatgagtcacttcgcagccaagcaagtactgtacctgtttcgcgttaaaccttaccttactgccagcttactggtggtggtgccaaacaatggttttcaactgacttctgatttacatggttc

SEQ ID NO: 15062 - protein, 302 aa, Triticum aestivum
  peptide (1)..(302): Ceres Seq. ID no. 15170683
  misc_feature (52)..(298): NCBI GI NO: 18379075 NR Description: expressed protein [Arabidopsis thaliana]
  misc_feature (52)..(253): NCBI GI NO: 25372999 NR Description: hypothetical protein F15K9.15
FLTLETERRRASRNRDKSGNKPTQASIPPPSPRQKLEVQKGAREACVKDSAMASADLLRREEEFYESLFDSAKGDAAAAKTRGQMIERKIEALEDMATKVSNRRSRRWLNDRLLIELVPRLHVEEIKGLFAPPPFGEEAPLSAFCRTSVGEWDAFRSIDMDVEARFMQRMKQSSAKQKNLVNEDESIVLNAWRRIDCQTREAMKRNFLPELLEIYEERIRAFIEDTTDKDVLVLNVQDPFQRLLLHGVCEFYNVTSTTTGTVQDGKPWKTTTIKKRSGTGVAPMITLVSFLRTKKNGSHVAS

SEQ ID NO: 15063 - protein, 251 aa, Triticum aestivum
  peptide (1)..(251): Ceres Seq. ID no. 15170684
  misc_feature (1)..(247): NCBI GI NO: 18379075 NR Description: expressed protein [Arabidopsis thaliana]
  misc_feature (1)..(202): NCBI GI NO: 25372999 NR Description: hypothetical protein F15K9.15
MASADLLRREEEFYESLFDSAKGDAAAAKTRGQMIERKIEALEDMATKVSNRRSRRWLNDRLLIELVPRLHVEEIKGLFAPPPFGEEAPLSAFCRTSVGEWDAFRSIDMDVEARFMQRMKQSSAKQKNLVNEDESIVLNAWRRIDCQTREAMKRNFLPELLEIYEERIRAFIEDTTDKDVLVLNVQDPFQRLLLHGVCEFYNVTSTTTGTVQDGKPWKTTTIKKRSGTGVAPMITLVSFLRTKKNGSHVAS

SEQ ID NO: 15064 - protein, 218 aa, Triticum aestivum
  peptide (1)..(218): Ceres Seq. ID no. 15170685
  misc_feature (1)..(214): NCBI GI NO: 18379075 NR Description: expressed protein [Arabidopsis thaliana]
  misc_feature (1)..(169): NCBI GI NO: 25372999 NR Description: hypothetical protein F15K9.15
MIERKIEALEDMATKVSNRRSRRWLNDRLLIELVPRLHVEEIKGLFAPPPFGEEAPLSAFCRTSVGEWDAFRSIDMDVEARFMQRMKQSSAKQKNLVNEDESIVLNAWRRIDCQTREAMKRNFLPELLEIYEERIRAFIEDTTDKDVLVLNVQDPFQRLLLHGVCEFYNVTSTTTGTVQDGKPWKTTTIKKRSGTGVAPMITLVSFLRTKKNGSHVAS

SEQ ID NO: 15065 - DNA, 1545 bp, Triticum aestivum
  misc_feature (1)..(1545): Ceres Seq. ID no. 14302768
acacgttgctcgctgctcggagagaggttcacacggctgcggttgtctcgtcgccgtcttggtctccccgtcccggtccgcgcgtcgcggttctcacatgaccaccgggccgcgctagttttcacggcgtggccatggccgtcgtcgtctgcgtcaccggcgccggcggcttcatcggctcctggatcgtcaagctcctcctcgcccgcggctacgccgtccgcggcacctcccgccgcgccgatgaccccaagaacgcgcacctgtgggcgctcgacggcgcggcggagcggctgacgatggtgcaggtcgacctgctcgaccgggccagcctccgcgccgccttccacggctgcgacggcgttatccacaccgcatcaccgatgcacgacacccccgaggagatcatcgagccggtgatcaccgggacgctcaacgtggtggagatggccgcggacgccggcgtccggcgcgtggtgctgtcctccaccatcggcaccatgtacatgaacccccaccgcgacccggacgcgccgctcgacgagtcgtgctggagcgacctcgactactgcaaacaaaccaagaactggtactgctacgccaagacgatcgcggagcggggcgcgtgggaggcggcgcgggcgctggggctggacctggcggtggtgatcccggtggtgacgctgggcgagctgctgcagccgagcatgaacaccagcaccaggcacatactcaagtacctcaccggcgaggccaaggcgtacgtcaacgagtcgcacgcctacgtgcatgtcaaggacgccgccgaggcgcacgtcagggtgctcgaggcgcccaacgccgggggacggcgctacgtctgcgccgagaggacgctgcaccgcggcgagctctgccggatcctcgccgggctcttcccggagtacccgattcccacaagatgtaaggacgaggtaaatccgccaaagaagggttacaagtacaccaaccagcctctgaaggaccttggcatgaagttcacccctgtgcaagaatacctctatgaagcggtgaaatccctgcaagagaagggattcattcagaaggcttctggcaacaaggggcttgctagtagagggagttcgccgcctcaaaattcaacggcgcccgtgtttatgtcgaaactttgatgggcttctgcacaaagtaacaatgcagttcgccgtcatgtgaattgtaattcatttgattaagtgatatgttgctggacagttcttgtatgtggcaaactgccaactttgtgtagtagcgccgtgttgcctggaacagtacaccgctacagagcaacttcagtgatgcatgccaaatattttccctggtcgatgttcttctaccaccacctagttgttcaccttgtctgactcagcgggtacaaaaacccgatcaagttggcacttggcagcagagcatacaagcgtgccctctttggagtctcgttcggagagtgatgctgttttggccaacttctgcttgttgttggtcgtgatcttgtttatgcgctttctc

SEQ ID NO: 15066 - protein, 344 aa, Triticum aestivum
  peptide (1)..(344): Ceres Seq. ID no. 14302769
  misc_feature (5)..(313): Pfam Name: Pfam Description:  3-beta hydroxysteroid dehydrogenase/ isomerase family
  misc_feature (5)..(315): NCBI GI NO: 28544965 NR Description: cinnamoyl-CoA reductase [Zea mays]
  misc_feature (5)..(315): NCBI GI NO: 3668115 NR Description: cinnamoyl-CoA reductase [Zea mays]
  misc_feature (5)..(315): NCBI GI NO: 28544959 NR Description: cinnamoyl-CoA reductase [Zea mays]
  misc_feature (4)..(315): NCBI GI NO: 25140434 NR Description: cinnamoyl CoA reductase [Solanum tuberosum]
  misc_feature (5)..(315): NCBI GI NO: 9998901 NR Description: cinnamoyl-CoA reductase
  misc_feature (5)..(321): NCBI GI NO: 9964087 NR Description: cinnamoyl CoA reductase [Lolium perenne]
  misc_feature (5)..(315): NCBI GI NO: 25140432 NR Description: cinnamoyl CoA reductase [Hordeum vulgare]
  misc_feature (5)..(315): NCBI GI NO: 2960364 NR Description: cinnamoyl CoA reductase
  misc_feature (5)..(315): NCBI GI NO: 7431407 NR Description: cinnamoyl-CoA reductase (EC 1
  misc_feature (5)..(315): NCBI GI NO: 40233135 NR Description: cinnamoyl CoA reductase [Populus tomentosa]
MAVVVCVTGAGGFIGSWIVKLLLARGYAVRGTSRRADDPKNAHLWALDGAAERLTMVQVDLLDRASLRAAFHGCDGVIHTASPMHDTPEEIIEPVITGTLNVVEMAADAGVRRVVLSSTIGTMYMNPHRDPDAPLDESCWSDLDYCKQTKNWYCYAKTIAERGAWEAARALGLDLAVVIPVVTLGELLQPSMNTSTRHILKYLTGEAKAYVNESHAYVHVKDAAEAHVRVLEAPNAGGRRYVCAERTLHRGELCRILAGLFPEYPIPTRCKDEVNPPKKGYKYTNQPLKDLGMKFTPVQEYLYEAVKSLQEKGFIQKASGNKGLASRGSSPPQNSTAPVFMSKL

SEQ ID NO: 15067 - protein, 289 aa, Triticum aestivum
  peptide (1)..(289): Ceres Seq. ID no. 14302770
  misc_feature (1)..(258): Pfam Name: Pfam Description:  3-beta hydroxysteroid dehydrogenase/ isomerase family
  misc_feature (1)..(260): NCBI GI NO: 28544965 NR Description: cinnamoyl-CoA reductase [Zea mays]
  misc_feature (1)..(260): NCBI GI NO: 3668115 NR Description: cinnamoyl-CoA reductase [Zea mays]
  misc_feature (1)..(260): NCBI GI NO: 28544959 NR Description: cinnamoyl-CoA reductase [Zea mays]
  misc_feature (1)..(260): NCBI GI NO: 25140434 NR Description: cinnamoyl CoA reductase [Solanum tuberosum]
  misc_feature (1)..(260): NCBI GI NO: 9998901 NR Description: cinnamoyl-CoA reductase
  misc_feature (1)..(266): NCBI GI NO: 9964087 NR Description: cinnamoyl CoA reductase [Lolium perenne]
  misc_feature (1)..(260): NCBI GI NO: 25140432 NR Description: cinnamoyl CoA reductase [Hordeum vulgare]
  misc_feature (1)..(260): NCBI GI NO: 2960364 NR Description: cinnamoyl CoA reductase
  misc_feature (1)..(260): NCBI GI NO: 7431407 NR Description: cinnamoyl-CoA reductase (EC 1
  misc_feature (1)..(260): NCBI GI NO: 40233135 NR Description: cinnamoyl CoA reductase [Populus tomentosa]
MVQVDLLDRASLRAAFHGCDGVIHTASPMHDTPEEIIEPVITGTLNVVEMAADAGVRRVVLSSTIGTMYMNPHRDPDAPLDESCWSDLDYCKQTKNWYCYAKTIAERGAWEAARALGLDLAVVIPVVTLGELLQPSMNTSTRHILKYLTGEAKAYVNESHAYVHVKDAAEAHVRVLEAPNAGGRRYVCAERTLHRGELCRILAGLFPEYPIPTRCKDEVNPPKKGYKYTNQPLKDLGMKFTPVQEYLYEAVKSLQEKGFIQKASGNKGLASRGSSPPQNSTAPVFMSKL

SEQ ID NO: 15068 - protein, 261 aa, Triticum aestivum
  peptide (1)..(261): Ceres Seq. ID no. 14302771
  misc_feature (1)..(230): Pfam Name: Pfam Description:  3-beta hydroxysteroid dehydrogenase/ isomerase family
  misc_feature (1)..(232): NCBI GI NO: 28544965 NR Description: cinnamoyl-CoA reductase [Zea mays]
  misc_feature (1)..(232): NCBI GI NO: 3668115 NR Description: cinnamoyl-CoA reductase [Zea mays]
  misc_feature (1)..(232): NCBI GI NO: 28544959 NR Description: cinnamoyl-CoA reductase [Zea mays]
  misc_feature (1)..(232): NCBI GI NO: 25140434 NR Description: cinnamoyl CoA reductase [Solanum tuberosum]
  misc_feature (1)..(232): NCBI GI NO: 9998901 NR Description: cinnamoyl-CoA reductase
  misc_feature (1)..(238): NCBI GI NO: 9964087 NR Description: cinnamoyl CoA reductase [Lolium perenne]
  misc_feature (1)..(232): NCBI GI NO: 25140432 NR Description: cinnamoyl CoA reductase [Hordeum vulgare]
  misc_feature (1)..(232): NCBI GI NO: 2960364 NR Description: cinnamoyl CoA reductase
  misc_feature (1)..(232): NCBI GI NO: 7431407 NR Description: cinnamoyl-CoA reductase (EC 1
  misc_feature (1)..(232): NCBI GI NO: 40233135 NR Description: cinnamoyl CoA reductase [Populus tomentosa]
MHDTPEEIIEPVITGTLNVVEMAADAGVRRVVLSSTIGTMYMNPHRDPDAPLDESCWSDLDYCKQTKNWYCYAKTIAERGAWEAARALGLDLAVVIPVVTLGELLQPSMNTSTRHILKYLTGEAKAYVNESHAYVHVKDAAEAHVRVLEAPNAGGRRYVCAERTLHRGELCRILAGLFPEYPIPTRCKDEVNPPKKGYKYTNQPLKDLGMKFTPVQEYLYEAVKSLQEKGFIQKASGNKGLASRGSSPPQNSTAPVFMSKL

SEQ ID NO: 15069 - DNA, 1720 bp, Triticum aestivum
  misc_feature (1)..(1720): Ceres Seq. ID no. 14303546
acttgctatccagctcctgctaccctaacaatggcagtggctggtgccccacctgttctccagctcctgccccaacaatggcagctgattctagccatcctcctcgtcccactcggcttcctcctccttcggggaaggtcgggctccggcctgaagctcccaccgggccccatgaggctgcctttcgtgggcaacctgcaccagatcgggccactgccgcaccggagcctggctgcgctggcccggcggcatgggcctgtgatgatgctgcggctgggcatggtgccgacggtggtgctgacatcgccagaggcggcccgggaagccctcaagaccaaggatgatgactgcagcagccgtcccctgtcggcagggccagggctgctgtcttacggctacaaggacgtggccttctcgccgtggagcgactacgtccgcgagatgcgcaagttgttcatcatcgagctgctcagcaggcggcgcgtgcagtctgcctactacgcgagggatgcacagatcgacaagctgattgagaccctcaccgtggtggggccgaacccggtacccctggaggcccacatcttcgccaccatggaccggattgtgggcttgttcgcgttcggcgagagctacgcgggggagcagttcaaggggcagtttgtgcccttactcaacgcaaccatggacatgttgggtagcttctctgcccaagacttcttccccaacgccgttggccgcctcatcgaccgcatcaccggcgtcaaagcccaccgccagagggtctttcgtcagctcgaccgcttctttgagcatatcatcgagcagtgcgatgggagaaaggccaccggcggcggcggatcggacctggtgcaggagctgctggacatcatgaaaaggcccgccgcctccgctgcaggaaccttcaccagagatcatgtcaaggccattctcatgaacacattcattggtagcattgacaccaccacagtgaccataacctgggcaatggcagagctgatccggaaaccaagggttctgcaaagggcacaacttgagattaggactgccgctggaggaggcagcagagtgcaccaagctgacatgcccaaaatgagctacctgaggatggtgctgtccgagaccctacggctgcatcccccagcaacactactcgtaccgagagagacgctgcggccgatccaggtggctggctacgacatcccagccaagacccaggtcattgtcaatgcgtgggccatcagcagggacccttccgcgtggaaggaccccgaggagtttaacccggagcggttccaggacactgacgtggacttcaacggcagccacttcgagttcatccccttcggcgcgggccgccggatctgccccgggctggccatgggggtggcaaacgccgagtacatccttgccaacttgctctactgcttcaactgggcgctgcccaacggggtgagccgggagggtgtgaacatggaggaggaaggggtgctcacttaccggaagaagacctcactcatgctcgtgccaacaccttaccacccagcccaggagaaagaggaggagtattagtactcacttatttttctatatattctgttcctcgtgcattatcatttgttgttgttgttgttgttgttgttgttgtttattttaataaatcaatatgaataaaattctcaaattccgttccccgtacatc

SEQ ID NO: 15070 - protein, 529 aa, Triticum aestivum
  peptide (1)..(529): Ceres Seq. ID no. 14303547
  misc_feature (20)..(519): NCBI GI NO: 34897434 NR Description: putative cytochrome P450
  misc_feature (11)..(519): NCBI GI NO: 5915841 NR Description: Cytochrome P450 71E1
  misc_feature (19)..(516): NCBI GI NO: 37788136 NR Description: cytochrome P450 protein CYP71E [Manihot esculenta]
  misc_feature (17)..(523): NCBI GI NO: 27817968 NR Description: putative cytochrome P450 71E1
  misc_feature (33)..(519): NCBI GI NO: 16507125 NR Description: cytochrome P450 [Citrus sinensis]
  misc_feature (31)..(516): NCBI GI NO: 15222174 NR Description: cytochrome P450 family [Arabidopsis thaliana]
  misc_feature (31)..(516): NCBI GI NO: 25282603 NR Description: cytochrome P450 monooxygenase
  misc_feature (29)..(519): NCBI GI NO: 15231542 NR Description: cytochrome p450 family [Arabidopsis thaliana]
  misc_feature (27)..(519): NCBI GI NO: 15231538 NR Description: cytochrome P450 family [Arabidopsis thaliana]
  misc_feature (27)..(516): NCBI GI NO: 13878390 NR Description: Cytochrome P450 71B10
TCYPAPATLTMAVAGAPPVLQLLPQQWQLILAILLVPLGFLLLRGRSGSGLKLPPGPMRLPFVGNLHQIGPLPHRSLAALARRHGPVMMLRLGMVPTVVLTSPEAAREALKTKDDDCSSRPLSAGPGLLSYGYKDVAFSPWSDYVREMRKLFIIELLSRRRVQSAYYARDAQIDKLIETLTVVGPNPVPLEAHIFATMDRIVGLFAFGESYAGEQFKGQFVPLLNATMDMLGSFSAQDFFPNAVGRLIDRITGVKAHRQRVFRQLDRFFEHIIEQCDGRKATGGGGSDLVQELLDIMKRPAASAAGTFTRDHVKAILMNTFIGSIDTTTVTITWAMAELIRKPRVLQRAQLEIRTAAGGGSRVHQADMPKMSYLRMVLSETLRLHPPATLLVPRETLRPIQVAGYDIPAKTQVIVNAWAISRDPSAWKDPEEFNPERFQDTDVDFNGSHFEFIPFGAGRRICPGLAMGVANAEYILANLLYCFNWALPNGVSREGVNMEEEGVLTYRKKTSLMLVPTPYHPAQEKEEEY

SEQ ID NO: 15071 - protein, 519 aa, Triticum aestivum
  peptide (1)..(519): Ceres Seq. ID no. 14303548
  misc_feature (10)..(509): NCBI GI NO: 34897434 NR Description: putative cytochrome P450
  misc_feature (1)..(509): NCBI GI NO: 5915841 NR Description: Cytochrome P450 71E1
  misc_feature (9)..(506): NCBI GI NO: 37788136 NR Description: cytochrome P450 protein CYP71E [Manihot esculenta]
  misc_feature (7)..(513): NCBI GI NO: 27817968 NR Description: putative cytochrome P450 71E1
  misc_feature (23)..(509): NCBI GI NO: 16507125 NR Description: cytochrome P450 [Citrus sinensis]
  misc_feature (21)..(506): NCBI GI NO: 15222174 NR Description: cytochrome P450 family [Arabidopsis thaliana]
  misc_feature (21)..(506): NCBI GI NO: 25282603 NR Description: cytochrome P450 monooxygenase
  misc_feature (19)..(509): NCBI GI NO: 15231542 NR Description: cytochrome p450 family [Arabidopsis thaliana]
  misc_feature (17)..(509): NCBI GI NO: 15231538 NR Description: cytochrome P450 family [Arabidopsis thaliana]
  misc_feature (17)..(506): NCBI GI NO: 13878390 NR Description: Cytochrome P450 71B10
MAVAGAPPVLQLLPQQWQLILAILLVPLGFLLLRGRSGSGLKLPPGPMRLPFVGNLHQIGPLPHRSLAALARRHGPVMMLRLGMVPTVVLTSPEAAREALKTKDDDCSSRPLSAGPGLLSYGYKDVAFSPWSDYVREMRKLFIIELLSRRRVQSAYYARDAQIDKLIETLTVVGPNPVPLEAHIFATMDRIVGLFAFGESYAGEQFKGQFVPLLNATMDMLGSFSAQDFFPNAVGRLIDRITGVKAHRQRVFRQLDRFFEHIIEQCDGRKATGGGGSDLVQELLDIMKRPAASAAGTFTRDHVKAILMNTFIGSIDTTTVTITWAMAELIRKPRVLQRAQLEIRTAAGGGSRVHQADMPKMSYLRMVLSETLRLHPPATLLVPRETLRPIQVAGYDIPAKTQVIVNAWAISRDPSAWKDPEEFNPERFQDTDVDFNGSHFEFIPFGAGRRICPGLAMGVANAEYILANLLYCFNWALPNGVSREGVNMEEEGVLTYRKKTSLMLVPTPYHPAQEKEEEY

SEQ ID NO: 15072 - protein, 472 aa, Triticum aestivum
  peptide (1)..(472): Ceres Seq. ID no. 14303549
  misc_feature (1)..(462): NCBI GI NO: 34897434 NR Description: putative cytochrome P450
  misc_feature (1)..(462): NCBI GI NO: 5915841 NR Description: Cytochrome P450 71E1
  misc_feature (1)..(459): NCBI GI NO: 37788136 NR Description: cytochrome P450 protein CYP71E [Manihot esculenta]
  misc_feature (1)..(466): NCBI GI NO: 27817968 NR Description: putative cytochrome P450 71E1
  misc_feature (1)..(462): NCBI GI NO: 16507125 NR Description: cytochrome P450 [Citrus sinensis]
  misc_feature (1)..(459): NCBI GI NO: 15222174 NR Description: cytochrome P450 family [Arabidopsis thaliana]
  misc_feature (1)..(459): NCBI GI NO: 25282603 NR Description: cytochrome P450 monooxygenase
  misc_feature (1)..(462): NCBI GI NO: 15231542 NR Description: cytochrome p450 family [Arabidopsis thaliana]
  misc_feature (1)..(462): NCBI GI NO: 15231538 NR Description: cytochrome P450 family [Arabidopsis thaliana]
  misc_feature (1)..(459): NCBI GI NO: 13878390 NR Description: Cytochrome P450 71B10
MRLPFVGNLHQIGPLPHRSLAALARRHGPVMMLRLGMVPTVVLTSPEAAREALKTKDDDCSSRPLSAGPGLLSYGYKDVAFSPWSDYVREMRKLFIIELLSRRRVQSAYYARDAQIDKLIETLTVVGPNPVPLEAHIFATMDRIVGLFAFGESYAGEQFKGQFVPLLNATMDMLGSFSAQDFFPNAVGRLIDRITGVKAHRQRVFRQLDRFFEHIIEQCDGRKATGGGGSDLVQELLDIMKRPAASAAGTFTRDHVKAILMNTFIGSIDTTTVTITWAMAELIRKPRVLQRAQLEIRTAAGGGSRVHQADMPKMSYLRMVLSETLRLHPPATLLVPRETLRPIQVAGYDIPAKTQVIVNAWAISRDPSAWKDPEEFNPERFQDTDVDFNGSHFEFIPFGAGRRICPGLAMGVANAEYILANLLYCFNWALPNGVSREGVNMEEEGVLTYRKKTSLMLVPTPYHPAQEKEEEY

SEQ ID NO: 15073 - DNA, 1233 bp, Triticum aestivum
  misc_feature (1)..(1233): Ceres Seq. ID no. 12617583
gcggctgcgggtgcgcgtgcagaggggacgacagagagagaagaggagccaacctccgccgccacggcttccgcgtgctaggaagacgaagcagagcggcagcaaagagagggaggccgcgatggaggtgggcttcctggggctgggcatcatgggcaaggcaatggcggccaacctcctccgccacggcttccgcgtcaccgtctggaaccggaccctctccaagtgcgacgagctcgtcgcgatgggtgccgccgtcggggacacgccggcgtccgtcgtcgccaagtgcaagtacaccatcgccatgctctccgatcccagcgccgcgctatctgttgttttcgacaaggatggcgtgctcgagcaaatcggagagggcaagggctacgtggacatgtccactgtcgatgctgcaacttcttgcaagataagcgaggcggttaaacaaaagggcggagcttttgttgaagctccagtttcagggagcaagaagccagctgaagatggccaattggtcattcttgctgcaggcgacaaggcactatatgatgatatggtccctgcatttgatgtacttgggaagaagtcgttctttctgggggagatgggaaatggagcaaagatgaaactggtggtcaacatgatcatgggaagtatgatgaatgctttttctgagggactctgtttggctgacaaaagtgggttgagcccccagacgcttcttgatgtcctggatctcggtgcaatcgcaaatccgatgttcaagatgaaagggccttcaatgctgcagggcagctacaatccagcatttcccctgaaacatcagcagaaggatatgaggctggctctgtcgttgggagatgaaaatgccgtgtccatgccagtggcagctgctgccaatgaggcattcaagaaagcaagaagcttgggacttggtgacctggattttcccgcggtgcacgaggttctgaaaggcactggtggttcaggctaaagcgtgattgggggctgaatgtttaaaaccacatgccatgggcatgcagatattcttgtagttcgtccaacccatgtggcttatcatcgtactattgatatgtacattcaacagttgatgctggattgtgctgtacgatgttttttttctagcaaggcttgtgcatgaacgaaccattgggatttgggacttgaatgccgccacgccagatggaaatataagtgcaagttctgtct

SEQ ID NO: 15074 - protein, 331 aa, Triticum aestivum
  peptide (1)..(331): Ceres Seq. ID no. 12617584
  misc_feature (42)..(202): Pfam Name: Pfam Description:  NAD binding domain of 6-phosphogluconate dehydrogenase
  misc_feature (41)..(331): NCBI GI NO: 29368238 NR Description: gamma hydroxybutyrate dehydrogenase-like protein
  misc_feature (41)..(325): NCBI GI NO: 15375068 NR Description: gamma hydroxybutyrate dehydrogenase
  misc_feature (41)..(325): NCBI GI NO: 18404556 NR Description: expressed protein; protein id: At3g25530
  misc_feature (41)..(266): NCBI GI NO: 15146314 NR Description: AT3g25530/MWL2_15 [Arabidopsis thaliana]
  misc_feature (34)..(325): NCBI GI NO: 18394513 NR Description: Expressed protein; protein id: At1g17650
  misc_feature (44)..(325): NCBI GI NO: 23054597 NR Description: hypothetical protein [Geobacter metallireducens]
  misc_feature (111)..(325): NCBI GI NO: 8778467 NR Description: F1L3.35 [Arabidopsis thaliana]
  misc_feature (34)..(111): NCBI GI NO: 8778467 NR Description: F1L3.35 [Arabidopsis thaliana]
  misc_feature (44)..(325): NCBI GI NO: 39996474 NR Description: 3-hydroxyisobutyrate dehydrogenase family protein
  misc_feature (42)..(321): NCBI GI NO: 13277568 NR Description: Similar to RIKEN cDNA 3930401K13 gene
RLRVRVQRGRQREKRSQPPPPRLPRARKTKQSGSKEREAAMEVGFLGLGIMGKAMAANLLRHGFRVTVWNRTLSKCDELVAMGAAVGDTPASVVAKCKYTIAMLSDPSAALSVVFDKDGVLEQIGEGKGYVDMSTVDAATSCKISEAVKQKGGAFVEAPVSGSKKPAEDGQLVILAAGDKALYDDMVPAFDVLGKKSFFLGEMGNGAKMKLVVNMIMGSMMNAFSEGLCLADKSGLSPQTLLDVLDLGAIANPMFKMKGPSMLQGSYNPAFPLKHQQKDMRLALSLGDENAVSMPVAAAANEAFKKARSLGLGDLDFPAVHEVLKGTGGSG

SEQ ID NO: 15075 - protein, 291 aa, Triticum aestivum
  peptide (1)..(291): Ceres Seq. ID no. 12617585
  misc_feature (2)..(162): Pfam Name: Pfam Description:  NAD binding domain of 6-phosphogluconate dehydrogenase
  misc_feature (1)..(291): NCBI GI NO: 29368238 NR Description: gamma hydroxybutyrate dehydrogenase-like protein
  misc_feature (1)..(285): NCBI GI NO: 15375068 NR Description: gamma hydroxybutyrate dehydrogenase
  misc_feature (1)..(285): NCBI GI NO: 18404556 NR Description: expressed protein; protein id: At3g25530
  misc_feature (1)..(226): NCBI GI NO: 15146314 NR Description: AT3g25530/MWL2_15 [Arabidopsis thaliana]
  misc_feature (1)..(285): NCBI GI NO: 18394513 NR Description: Expressed protein; protein id: At1g17650
  misc_feature (4)..(285): NCBI GI NO: 23054597 NR Description: hypothetical protein [Geobacter metallireducens]
  misc_feature (71)..(285): NCBI GI NO: 8778467 NR Description: F1L3.35 [Arabidopsis thaliana]
  misc_feature (1)..(71): NCBI GI NO: 8778467 NR Description: F1L3.35 [Arabidopsis thaliana]
  misc_feature (4)..(285): NCBI GI NO: 39996474 NR Description: 3-hydroxyisobutyrate dehydrogenase family protein
  misc_feature (2)..(281): NCBI GI NO: 13277568 NR Description: Similar to RIKEN cDNA 3930401K13 gene
MEVGFLGLGIMGKAMAANLLRHGFRVTVWNRTLSKCDELVAMGAAVGDTPASVVAKCKYTIAMLSDPSAALSVVFDKDGVLEQIGEGKGYVDMSTVDAATSCKISEAVKQKGGAFVEAPVSGSKKPAEDGQLVILAAGDKALYDDMVPAFDVLGKKSFFLGEMGNGAKMKLVVNMIMGSMMNAFSEGLCLADKSGLSPQTLLDVLDLGAIANPMFKMKGPSMLQGSYNPAFPLKHQQKDMRLALSLGDENAVSMPVAAAANEAFKKARSLGLGDLDFPAVHEVLKGTGGSG

SEQ ID NO: 15076 - protein, 281 aa, Triticum aestivum
  peptide (1)..(281): Ceres Seq. ID no. 12617586
  misc_feature (1)..(152): Pfam Name: Pfam Description:  NAD binding domain of 6-phosphogluconate dehydrogenase
  misc_feature (1)..(281): NCBI GI NO: 29368238 NR Description: gamma hydroxybutyrate dehydrogenase-like protein
  misc_feature (1)..(275): NCBI GI NO: 15375068 NR Description: gamma hydroxybutyrate dehydrogenase
  misc_feature (1)..(275): NCBI GI NO: 18404556 NR Description: expressed protein; protein id: At3g25530
  misc_feature (1)..(216): NCBI GI NO: 15146314 NR Description: AT3g25530/MWL2_15 [Arabidopsis thaliana]
  misc_feature (1)..(275): NCBI GI NO: 18394513 NR Description: Expressed protein; protein id: At1g17650
  misc_feature (1)..(275): NCBI GI NO: 23054597 NR Description: hypothetical protein [Geobacter metallireducens]
  misc_feature (61)..(275): NCBI GI NO: 8778467 NR Description: F1L3.35 [Arabidopsis thaliana]
  misc_feature (1)..(61): NCBI GI NO: 8778467 NR Description: F1L3.35 [Arabidopsis thaliana]
  misc_feature (1)..(275): NCBI GI NO: 39996474 NR Description: 3-hydroxyisobutyrate dehydrogenase family protein
  misc_feature (1)..(271): NCBI GI NO: 13277568 NR Description: Similar to RIKEN cDNA 3930401K13 gene
MGKAMAANLLRHGFRVTVWNRTLSKCDELVAMGAAVGDTPASVVAKCKYTIAMLSDPSAALSVVFDKDGVLEQIGEGKGYVDMSTVDAATSCKISEAVKQKGGAFVEAPVSGSKKPAEDGQLVILAAGDKALYDDMVPAFDVLGKKSFFLGEMGNGAKMKLVVNMIMGSMMNAFSEGLCLADKSGLSPQTLLDVLDLGAIANPMFKMKGPSMLQGSYNPAFPLKHQQKDMRLALSLGDENAVSMPVAAAANEAFKKARSLGLGDLDFPAVHEVLKGTGGSG

SEQ ID NO: 15077 - DNA, 1237 bp, Triticum aestivum
  misc_feature (1)..(1237): Ceres Seq. ID no. 13655808
cctagaacatcctaatcgaaaagattacaataataaacacacatgacacatctcctctctcgctctccctcccaggcagcatccaaagaagcggctagctttgctgctgctgctccaaccgaaaaggcgaggggagacggaggaggggcggccgtggggaggagcgtgaggccgcgagctccagctccagctcaaccctgaagaagaaggcctctccccttcccccgagctcaagcccagagcaaagctcacttatgtctgcctatggagtcatctacaactgatgccggtgataagcatttggagagctacctgacattgggtttgacagtatcgcagtcaaagaaagggaataccaagtttccaaaggtcctgtcgcttcttgccacatatctgggcagatcagttcagaagaatgaagaattactaggttcaaatggaataaaggaggcagccaccatctttcatggccagaaggtgccagatctcagtatacagctctatgcagaacgcatcttcaagtatgctgagtgcagtccatcctgctttgtgttggcacttrtctacatggagagatatctacagcagccaaatgtgtacatgacgcccttcagcgttcatcgcttgctgattacaagtgtggtggttgctgccaaattcacagatgacgcgtttttcaacaatgcattctacgctagagtgggaggaatccgcacaatcgagatgaatcggcttgaactggatttgttatttaatctggacttcaggctgaaagtgaacctagagacgtttgggagctactgcttgcaactggagaaacatgcaccggtgtcaccagagagactgccggttcaggttcatcgtgtcaatggatctaaagatttgagctatagcaacagcagcgccgacgagttttgccagagcaagcttgtaagctacagcagccaggctctccaaggatgcagctgaccaatctatttatggcctaaagttttgcaaagcatgtgacctgattactgataattcttttagatctgacatttgtgcattcagattgcattaagttgttctgagggtgtttgattagtagggattcgattctgctttacttgtgtaacactgtaattcttgcaaaccactttgtttaaaatgttcacaatctagttgggaaacaccaggtctgaatattattcagtcctgtgattccaatgccgcggttttaccggatctgctgccc

SEQ ID NO: 15078 - protein, 234 aa, Triticum aestivum
  peptide (1)..(234): Ceres Seq. ID no. 15220555
  misc_feature (36)..(170): Pfam Name: Pfam Description:  Cyclin, N-terminal domain
  misc_feature (20)..(185): NCBI GI NO: 25493992 NR Description: PREG-like protein
  misc_feature (1)..(185): NCBI GI NO: 15229382 NR Description: cyclin family [Arabidopsis thaliana]
  misc_feature (1)..(185): NCBI GI NO: 21593009 NR Description: unknown [Arabidopsis thaliana]
  misc_feature (35)..(185): NCBI GI NO: 15224950 NR Description: cyclin family [Arabidopsis thaliana]
  misc_feature (6)..(185): NCBI GI NO: 15233185 NR Description: cyclin family [Arabidopsis thaliana]
  misc_feature (34)..(185): NCBI GI NO: 15240794 NR Description: cyclin family [Arabidopsis thaliana]
  misc_feature (34)..(184): NCBI GI NO: 37536902 NR Description: hypothetical protein
  misc_feature (65)..(194): NCBI GI NO: 6729043 NR Description: hypothetical protein [Arabidopsis thaliana]
  misc_feature (24)..(185): NCBI GI NO: 15232360 NR Description: cyclin family [Arabidopsis thaliana]
  misc_feature (34)..(185): NCBI GI NO: 15240306 NR Description: cyclin family [Arabidopsis thaliana]
  misc_feature (100)..(100): Xaa is any aa, unknown or other
MESSTTDAGDKHLESYLTLGLTVSQSKKGNTKFPKVLSLLATYLGRSVQKNEELLGSNGIKEAATIFHGQKVPDLSIQLYAERIFKYAECSPSCFVLALXYMERYLQQPNVYMTPFSVHRLLITSVVVAAKFTDDAFFNNAFYARVGGIRTIEMNRLELDLLFNLDFRLKVNLETFGSYCLQLEKHAPVSPERLPVQVHRVNGSKDLSYSNSSADEFCQSKLVSYSSQALQGCS

SEQ ID NO: 15079 - protein, 133 aa, Triticum aestivum
  peptide (1)..(133): Ceres Seq. ID no. 15220556
  misc_feature (1)..(69): Pfam Name: Pfam Description:  Cyclin, N-terminal domain
  misc_feature (1)..(84): NCBI GI NO: 25493992 NR Description: PREG-like protein
  misc_feature (1)..(84): NCBI GI NO: 15229382 NR Description: cyclin family [Arabidopsis thaliana]
  misc_feature (1)..(84): NCBI GI NO: 21593009 NR Description: unknown [Arabidopsis thaliana]
  misc_feature (1)..(84): NCBI GI NO: 15224950 NR Description: cyclin family [Arabidopsis thaliana]
  misc_feature (1)..(84): NCBI GI NO: 15233185 NR Description: cyclin family [Arabidopsis thaliana]
  misc_feature (1)..(84): NCBI GI NO: 15240794 NR Description: cyclin family [Arabidopsis thaliana]
  misc_feature (1)..(83): NCBI GI NO: 37536902 NR Description: hypothetical protein
  misc_feature (1)..(93): NCBI GI NO: 6729043 NR Description: hypothetical protein [Arabidopsis thaliana]
  misc_feature (1)..(84): NCBI GI NO: 15232360 NR Description: cyclin family [Arabidopsis thaliana]
  misc_feature (1)..(84): NCBI GI NO: 15240306 NR Description: cyclin family [Arabidopsis thaliana]
MERYLQQPNVYMTPFSVHRLLITSVVVAAKFTDDAFFNNAFYARVGGIRTIEMNRLELDLLFNLDFRLKVNLETFGSYCLQLEKHAPVSPERLPVQVHRVNGSKDLSYSNSSADEFCQSKLVSYSSQALQGCS

SEQ ID NO: 15080 - protein, 122 aa, Triticum aestivum
  peptide (1)..(122): Ceres Seq. ID no. 15220557
  misc_feature (1)..(58): Pfam Name: Pfam Description:  Cyclin, N-terminal domain
  misc_feature (1)..(73): NCBI GI NO: 25493992 NR Description: PREG-like protein
  misc_feature (1)..(73): NCBI GI NO: 15229382 NR Description: cyclin family [Arabidopsis thaliana]
  misc_feature (1)..(73): NCBI GI NO: 21593009 NR Description: unknown [Arabidopsis thaliana]
  misc_feature (1)..(73): NCBI GI NO: 15224950 NR Description: cyclin family [Arabidopsis thaliana]
  misc_feature (1)..(73): NCBI GI NO: 15233185 NR Description: cyclin family [Arabidopsis thaliana]
  misc_feature (1)..(73): NCBI GI NO: 15240794 NR Description: cyclin family [Arabidopsis thaliana]
  misc_feature (1)..(72): NCBI GI NO: 37536902 NR Description: hypothetical protein
  misc_feature (1)..(82): NCBI GI NO: 6729043 NR Description: hypothetical protein [Arabidopsis thaliana]
  misc_feature (1)..(73): NCBI GI NO: 15232360 NR Description: cyclin family [Arabidopsis thaliana]
  misc_feature (1)..(73): NCBI GI NO: 15240306 NR Description: cyclin family [Arabidopsis thaliana]
MTPFSVHRLLITSVVVAAKFTDDAFFNNAFYARVGGIRTIEMNRLELDLLFNLDFRLKVNLETFGSYCLQLEKHAPVSPERLPVQVHRVNGSKDLSYSNSSADEFCQSKLVSYSSQALQGCS

SEQ ID NO: 15081 - DNA, 1368 bp, Triticum aestivum
  misc_feature (1)..(1368): Ceres Seq. ID no. 13656160
ctagaacatcctaatcgaaaaaattgctctggttaatggatctgaatttgcaattatctctcttatagactcagagaatgacttcaggattccagaatcattgccatgccttcatgataaggtacttgcagcagcagctgaagcagctatgagcatctcgatagaccagaaaggaaagcagaatccagcagcaggagttattggtggcattattaaaggattaaaaggaaaagcggatgaaaatgcaaacctgagaaaaagtttcaattcccaaacccccagtgaactattggagtcaattttcttgaaaggaccatatgttgaaccatcactagcttatcctgatgatccaatagaagaactgtcaattgatgacatagaaattgatgatgaagtgcccctatcccctccgccagcatcatcctctgcttgtcacatgaataagaaagcaacagtagaggacgagagagcgaaactgtttgaagggtcaagtgatgctgacaaaccaagaatgagaagtacccaagaaattctcaccaaatataagtttggcggggatgcaacagcagcagctgcccatgcgaaggataagctcatgcagcggcaggagaaactcgagagaataagccagcggaccgcagagcttcaagacggggcggaaaatttcgcctcgctcgcccaggagctcgcgaaaacaatggagaacaagaagtggtggaaactgtaacctattcggggttttcacatcactgcatcctatcctacacaaagtacgtccagctctcggtacttgggaatgccttatttgccggttgttatttatcgtggcatggttccgcccattccgccccgcctttgtgctgtgtatatttatgttcatggacaactgcagcttgtcaaggtgattgtctaccttgccactaggttgactcactcactgacagacagacagacagcatggcttgtttggatgcattagcttaggtttatgttgtatatcaccatgtaatcatatgcaccatgggtggaaagcgtggggcggaacctacttgccgtacatgatttcttttgggtggtcattcagtcgttcgttctgtctgtaaaggtaaaaggagacaataaaccgaacggcttacattgagaaacttcaaagagcctgtgtggcattgttagttggtggtatctgatgtgacaccttctcactaatacttgaactgtggttatcaagttgcaatgtgtatgtttttgttttttgttttttgtttaaaaaaaaaaaaaaaaaaaaaaaaaaaaaaaaaaaaaaaaaataaaaaaaaaaaaaaaaaagygtttawacacratammgtyggamctsgagggggggcccgg

SEQ ID NO: 15082 - protein, 192 aa, Triticum aestivum
  peptide (1)..(192): Ceres Seq. ID no. 15219805
  misc_feature (124)..(184): Pfam Name: Pfam Description:  Synaptobrevin
  misc_feature (1)..(192): NCBI GI NO: 34898238 NR Description: P0034A04.30
  misc_feature (1)..(192): NCBI GI NO: 15239173 NR Description: transducin / WD-40 repeat protein family
  misc_feature (1)..(188): NCBI GI NO: 38345401 NR Description: OSJNBa0017B10.7
MSISIDQKGKQNPAAGVIGGIIKGLKGKADENANLRKSFNSQTPSELLESIFLKGPYVEPSLAYPDDPIEELSIDDIEIDDEVPLSPPPASSSACHMNKKATVEDERAKLFEGSSDADKPRMRSTQEILTKYKFGGDATAAAAHAKDKLMQRQEKLERISQRTAELQDGAENFASLAQELAKTMENKKWWKL

SEQ ID NO: 15083 - protein, 96 aa, Triticum aestivum
  peptide (1)..(96): Ceres Seq. ID no. 15219806
  misc_feature (28)..(88): Pfam Name: Pfam Description:  Synaptobrevin
  misc_feature (1)..(96): NCBI GI NO: 34898238 NR Description: P0034A04.30
  misc_feature (1)..(96): NCBI GI NO: 15239173 NR Description: transducin / WD-40 repeat protein family
  misc_feature (1)..(92): NCBI GI NO: 38345401 NR Description: OSJNBa0017B10.7
MNKKATVEDERAKLFEGSSDADKPRMRSTQEILTKYKFGGDATAAAAHAKDKLMQRQEKLERISQRTAELQDGAENFASLAQELAKTMENKKWWKL

SEQ ID NO: 15084 - DNA, 1654 bp, Triticum aestivum
  misc_feature (1)..(1654): Ceres Seq. ID no. 13656161
accgatctcgcctcgccaagcccaccaaccggctcacgccgcatcgcatcgcgatccagcgttcctctcgagccttccatccagagccctcccaaacccctccgccgaccccccgagcccccgcccgccgccgccgccgccgcgccggagatggtgtacatcggcgcgcacggcgtggagacgctgaagcgctacaggtacagcggccaggaccactcggtggtggccaagtacgtgctgcagcccttctggagccgctgcgtcaccctcttcccgctctggatgccaccaaacatgatcacactcatgggatttatgtttctacttacatcttcgctgcttagctatatttattcaccccaccttgacacagctccccctcggtgggtccatcttgcccatggaatacttctcttcttgtaccagacttttgatgccgttgatggtaaacaagcaaggcgcaccagctcatcaagtcctctaggagaactttttgatcatggatgtgatgcccttgcctgcgcttttgaagccttggcccttggaagcaccttgatgtgtggaaggttgacattctgttactgggtggttgctgctgtcccattttatctggcaacatgggaacactactttacaaatactcttattcttcctgtaataaatggaccaacggaaggcctgatgctgatctatgtctcccacctttttacctgttttactggtgctgaatggtgggcgcaagattttcggaaatccctccctcttattagtttggttccacttccatttgttccagaaatccccttatatgttatcgtgctgattctgatgatcacgtttgctgtaatcccaacagttggatccaatattggtaatgtccaaaaagttgttgatgcacggaaagggagcatggaattagcattggcaatgctccttccatttattgcgctgttggctggagttgctgtctggtgttatctctctccttcagatatcatgaggaaccagccacatctgcttgtgatcggaactggttctgcctttggatatttggttggaaggatgatacttgctcatttatgtgacgagcccaaaggtctaaaaacaggaatgtgcatggctctggtgtttcttccatttgctattgcaaatgctctcaccgccaagattaacaatgggacccctttggctgatgagcttttggttattcttctgtactgtgcaacctcagtgggtctttacatgcatcttgccatttcggtttgtcatgaaatcaaggatgctcttggaatctattgcttcaggatagccagaaaagaggcttgaatttgcctgaatccctacgtagcatttgaagcattctgccttccagacattgtccgtctgcattcacaagtcttaacattacaacaacgtatagccatggatgctcaacgaatcctgtcattggaactccatggccaccggttattcatcatgctaaatgcagatatgcagatagatatatcttgtgtggactgtaatgcagatttgtgttaagtagcatatgtacatgtggtgcggtcggtgtaatgtacgtcatgggtagggaagcggtagctttcttaacttaaactagatggtgggatgaccgatgtttctaagattgtgttcc

SEQ ID NO: 15085 - protein, 441 aa, Triticum aestivum
  peptide (1)..(441): Ceres Seq. ID no. 15219807
  misc_feature (136)..(273): Pfam Name: Pfam Description:  CDP-alcohol phosphatidyltransferase
  misc_feature (51)..(441): NCBI GI NO: 7488701 NR Description: probable ethanolaminephosphotransferase (EC2
  misc_feature (51)..(441): NCBI GI NO: 7488522 NR Description: ethanolaminephosphotransferase homolog - turnip
  misc_feature (51)..(441): NCBI GI NO: 15222885 NR Description: aminoalcoholphosphotransferase
  misc_feature (51)..(441): NCBI GI NO: 3927806 NR Description: aminoalcoholphosphotransferase
  misc_feature (51)..(439): NCBI GI NO: 30313359 NR Description: aminoalcoholphosphotransferase
  misc_feature (51)..(441): NCBI GI NO: 15229490 NR Description: aminoalcoholphosphotransferase, putative
  misc_feature (51)..(441): NCBI GI NO: 5917787 NR Description: aminoalcoholphosphotransferase [Brassica rapa]
  misc_feature (51)..(380): NCBI GI NO: 18390098 NR Description: aminoalcoholphosphotransferase [Sorghum bicolor]
  misc_feature (51)..(441): NCBI GI NO: 27762264 NR Description: aminoalcoholphosphotransferase [Brassica napus]
  misc_feature (52)..(439): NCBI GI NO: 2425056 NR Description: LipB [Dictyostelium discoideum]
TDLASPSPPTGSRRIASRSSVPLEPSIQSPPKPLRRPPEPPPAAAAAAPEMVYIGAHGVETLKRYRYSGQDHSVVAKYVLQPFWSRCVTLFPLWMPPNMITLMGFMFLLTSSLLSYIYSPHLDTAPPRWVHLAHGILLFLYQTFDAVDGKQARRTSSSSPLGELFDHGCDALACAFEALALGSTLMCGRLTFCYWVVAAVPFYLATWEHYFTNTLILPVINGPTEGLMLIYVSHLFTCFTGAEWWAQDFRKSLPLISLVPLPFVPEIPLYVIVLILMITFAVIPTVGSNIGNVQKVVDARKGSMELALAMLLPFIALLAGVAVWCYLSPSDIMRNQPHLLVIGTGSAFGYLVGRMILAHLCDEPKGLKTGMCMALVFLPFAIANALTAKINNGTPLADELLVILLYCATSVGLYMHLAISVCHEIKDALGIYCFRIARKEA

SEQ ID NO: 15086 - protein, 391 aa, Triticum aestivum
  peptide (1)..(391): Ceres Seq. ID no. 15219808
  misc_feature (86)..(223): Pfam Name: Pfam Description:  CDP-alcohol phosphatidyltransferase
  misc_feature (1)..(391): NCBI GI NO: 7488701 NR Description: probable ethanolaminephosphotransferase (EC2
  misc_feature (1)..(391): NCBI GI NO: 7488522 NR Description: ethanolaminephosphotransferase homolog - turnip
  misc_feature (1)..(391): NCBI GI NO: 15222885 NR Description: aminoalcoholphosphotransferase
  misc_feature (1)..(391): NCBI GI NO: 3927806 NR Description: aminoalcoholphosphotransferase
  misc_feature (1)..(389): NCBI GI NO: 30313359 NR Description: aminoalcoholphosphotransferase
  misc_feature (1)..(391): NCBI GI NO: 15229490 NR Description: aminoalcoholphosphotransferase, putative
  misc_feature (1)..(391): NCBI GI NO: 5917787 NR Description: aminoalcoholphosphotransferase [Brassica rapa]
  misc_feature (1)..(330): NCBI GI NO: 18390098 NR Description: aminoalcoholphosphotransferase [Sorghum bicolor]
  misc_feature (1)..(391): NCBI GI NO: 27762264 NR Description: aminoalcoholphosphotransferase [Brassica napus]
  misc_feature (2)..(389): NCBI GI NO: 2425056 NR Description: LipB [Dictyostelium discoideum]
MVYIGAHGVETLKRYRYSGQDHSVVAKYVLQPFWSRCVTLFPLWMPPNMITLMGFMFLLTSSLLSYIYSPHLDTAPPRWVHLAHGILLFLYQTFDAVDGKQARRTSSSSPLGELFDHGCDALACAFEALALGSTLMCGRLTFCYWVVAAVPFYLATWEHYFTNTLILPVINGPTEGLMLIYVSHLFTCFTGAEWWAQDFRKSLPLISLVPLPFVPEIPLYVIVLILMITFAVIPTVGSNIGNVQKVVDARKGSMELALAMLLPFIALLAGVAVWCYLSPSDIMRNQPHLLVIGTGSAFGYLVGRMILAHLCDEPKGLKTGMCMALVFLPFAIANALTAKINNGTPLADELLVILLYCATSVGLYMHLAISVCHEIKDALGIYCFRIARKEA

SEQ ID NO: 15087 - protein, 347 aa, Triticum aestivum
  peptide (1)..(347): Ceres Seq. ID no. 15219809
  misc_feature (42)..(179): Pfam Name: Pfam Description:  CDP-alcohol phosphatidyltransferase
  misc_feature (1)..(347): NCBI GI NO: 7488701 NR Description: probable ethanolaminephosphotransferase (EC2
  misc_feature (1)..(347): NCBI GI NO: 7488522 NR Description: ethanolaminephosphotransferase homolog - turnip
  misc_feature (1)..(347): NCBI GI NO: 15222885 NR Description: aminoalcoholphosphotransferase
  misc_feature (1)..(347): NCBI GI NO: 3927806 NR Description: aminoalcoholphosphotransferase
  misc_feature (1)..(345): NCBI GI NO: 30313359 NR Description: aminoalcoholphosphotransferase
  misc_feature (1)..(347): NCBI GI NO: 15229490 NR Description: aminoalcoholphosphotransferase, putative
  misc_feature (1)..(347): NCBI GI NO: 5917787 NR Description: aminoalcoholphosphotransferase [Brassica rapa]
  misc_feature (1)..(286): NCBI GI NO: 18390098 NR Description: aminoalcoholphosphotransferase [Sorghum bicolor]
  misc_feature (1)..(347): NCBI GI NO: 27762264 NR Description: aminoalcoholphosphotransferase [Brassica napus]
  misc_feature (1)..(345): NCBI GI NO: 2425056 NR Description: LipB [Dictyostelium discoideum]
MPPNMITLMGFMFLLTSSLLSYIYSPHLDTAPPRWVHLAHGILLFLYQTFDAVDGKQARRTSSSSPLGELFDHGCDALACAFEALALGSTLMCGRLTFCYWVVAAVPFYLATWEHYFTNTLILPVINGPTEGLMLIYVSHLFTCFTGAEWWAQDFRKSLPLISLVPLPFVPEIPLYVIVLILMITFAVIPTVGSNIGNVQKVVDARKGSMELALAMLLPFIALLAGVAVWCYLSPSDIMRNQPHLLVIGTGSAFGYLVGRMILAHLCDEPKGLKTGMCMALVFLPFAIANALTAKINNGTPLADELLVILLYCATSVGLYMHLAISVCHEIKDALGIYCFRIARKEA

SEQ ID NO: 15088 - DNA, 1175 bp, Triticum aestivum
  misc_feature (1)..(1175): Ceres Seq. ID no. 13662758
attcggcctccagccctttaaaccccacaaaaccctagacttcgcagcgagcagccgtcgtccgatccccacagaaacaccaaagcccgagccatgtcgtcggcgtccctcgccgccaggctcctccgccgcgccgccthttcgtcgcgggcctccaccctatcccgacgctgcgcccactcctccgcgacgtcccgcgcgcccgtttcgcttgcccgtttccaccccgccgccgcctccccttcagggaccactgcccgccgcttcctgtcgtcgcagtccccggcgtcttcctccaagatctccccggacgagaacctgaggcgggtcatcgactccgagatcgagtgcgtcgtcgaatcggaggagggctccgcgcagcaaattgatccaccagaagacttcccctttgagataattgataaccctggtgatcagtccatcgttctcaaaagagagcttgcaggagagactattaaagctactgtctacacaaattttgatactgaggaagatttgaacaatgaggactctggtgctgagaatgatgatgactcatttaagccagcacttcagatggttgtcactgttgagaaaccaggaggctcaatcctggaatttgagtgcaactttaatgatgatgaactggcaattgaaaatatgaggttgctgaatcgcgatgccaagtttactgagaatgcatatgaggggccacaattctctgatctggacgagagcttgcagaagtcctttcacaggtatcttgaggtgagggggatcaagcactcgctgcatgactggctgcacgagtacatgatgagcaaggatgagaaggagtacgtggtttggttgaagaacatgagagagttcatcgagaaatgagtgccactgcccgtcattctcttttaatagaaagaacatgcctggtgctctatgtcaaacctgtctgatcataattgtgccttgctttctggcacaccaagtctcggtggacgctgagctggatttatattttgctggacctgtttagctgtagaaaagtttcggcatcttatctttcgatgtttaacctgtgatccgttcagatatgatcagttcatgtattttcagccgtgagtatattgctacgtacgttctagaagaaaaaaaaaaaaaaaaaagcttatcgataccgt

SEQ ID NO: 15089 - protein, 262 aa, Triticum aestivum
  peptide (1)..(262): Ceres Seq. ID no. 15220188
  misc_feature (80)..(260): Pfam Name: Pfam Description:  Mitochondrial glycoprotein
  misc_feature (10)..(262): NCBI GI NO: 15241669 NR Description: expressed protein [Arabidopsis thaliana]
  misc_feature (10)..(262): NCBI GI NO: 21592321 NR Description: unknown [Arabidopsis thaliana]
  misc_feature (1)..(262): NCBI GI NO: 11357566 NR Description: hypothetical protein F1I16
  misc_feature (20)..(262): NCBI GI NO: 18410318 NR Description: expressed protein [Arabidopsis thaliana]
  misc_feature (5)..(262): NCBI GI NO: 18405164 NR Description: expressed protein [Arabidopsis thaliana]
  misc_feature (5)..(262): NCBI GI NO: 21593469 NR Description: unknown [Arabidopsis thaliana]
  misc_feature (12)..(262): NCBI GI NO: 7487698 NR Description: hypothetical protein At2g39790
  misc_feature (12)..(260): NCBI GI NO: 34895730 NR Description: P0019D06.23
  misc_feature (8)..(261): NCBI GI NO: 15239320 NR Description: expressed protein [Arabidopsis thaliana]
  misc_feature (1)..(262): NCBI GI NO: 34895742 NR Description: P0019D06.29
  misc_feature (16)..(16): Xaa is any aa, unknown or other
MSSASLAARLLRRAAXSSRASTLSRRCAHSSATSRAPVSLARFHPAAASPSGTTARRFLSSQSPASSSKISPDENLRRVIDSEIECVVESEEGSAQQIDPPEDFPFEIIDNPGDQSIVLKRELAGETIKATVYTNFDTEEDLNNEDSGAENDDDSFKPALQMVVTVEKPGGSILEFECNFNDDELAIENMRLLNRDAKFTENAYEGPQFSDLDESLQKSFHRYLEVRGIKHSLHDWLHEYMMSKDEKEYVVWLKNMREFIEK

SEQ ID NO: 15090 - DNA, 1379 bp, Triticum aestivum
  misc_feature (1)..(1379): Ceres Seq. ID no. 13598527
actcacctcacctcatctcacctgccatcgatatcgctcccttatcccgaaccccaaatccccctctccggtccggcgcctccgtctctctcgccgaacaccatgggctccgacttcaaggccatccctctgatcgatatcagcccgctcgtcgagaagatcgacgaccctgccatggccggcgacgagggtctcctcgacgtcgtccggatgctggacgacgcttgcagggaggccgggttcttctatgtgaaaggccatgggatttcggagtcgctaatgacggaagtcagggatgtcacacgcaagttctttcagctccctcgcgaggaaaaactgaagatcaaaatgacacctcagagtggatatagaggatatcagagagtgggagaaaatgttaccaagggtaaacctgatatgcatgaagcaattgattgctacacgcctatcgaaccaggcagatatggagatcttgctaaaccaatggaaggatctaatttgtggccagattatccatcaaattttgatgcgctgctggaaaactatataagccttctacgagatctttcaaggaagatcatgagaggcatagccttggcactgggtgcgccgttggattctttcgaaggcggagtggcgggagatgctttctgggttctcaggttaattggctatccagtctcagatgacatcccacaagaggaacgcactgatattggatgtggagctcatacagattatggtcttctgacattggtgaatcaggatgatgatatatgtgctcttgaggtcagaaaccagtccggtgagtggatatacgccaagccggtccctggaaccttcgtttgcaacatcggcgacatgctgaaggtttggtcgaatgggatataccagcccacgctccacagagtcgtcaataactcccctcgctaccgtgtatctgtcgccttcttctacgagtcgaacttcgacgctgcggtggaacctgtagagttctgccgggagaaaacgggcggcgttgccaagtatgagaaggtggtgtatggggagcacctagtgcagaaagtcctcaccaacttcgtcatgtaacagtttgggggaggggaggtgaaagcctgaaagggaacaaatttctgtagctgtactgaaaatgatccatcaataaaacccttcgacaaatcagcctcctttctggtcggacaaagtaactgtcccggtgtatcgtgaccaggcaaggcagcacatgaggatttcctctcatctggctttctcgctttgcttgcgttctgcggatcgaaccctcacaactggttcacaatccgttgtaatttcgtgacgacaatgtaaatgcaaccaccaatatgtcttgttgttacttc

SEQ ID NO: 15091 - protein, 362 aa, Triticum aestivum
  peptide (1)..(362): Ceres Seq. ID no. 15222359
  misc_feature (217)..(320): Pfam Name: II Pfam Description: 2OG-Fe
  misc_feature (35)..(360): NCBI GI NO: 6984228 NR Description: putative flavonol synthase-like protein
  misc_feature (35)..(362): NCBI GI NO: 18409039 NR Description: oxidoreductase (din11), putative
  misc_feature (35)..(362): NCBI GI NO: 21554579 NR Description: flavonol synthase-like protein
  misc_feature (35)..(360): NCBI GI NO: 11255891 NR Description: hypothetical protein T9C5
  misc_feature (35)..(360): NCBI GI NO: 22331716 NR Description: oxidoreductase (din11), putative
  misc_feature (35)..(360): NCBI GI NO: 19423910 NR Description: unknown protein [Arabidopsis thaliana]
  misc_feature (45)..(360): NCBI GI NO: 15229181 NR Description: oxidoreductase (din11), putative
  misc_feature (35)..(362): NCBI GI NO: 11255902 NR Description: flavonol synthase-like protein
  misc_feature (38)..(331): NCBI GI NO: 23130050 NR Description: hypothetical protein [Nostoc punctiforme]
  misc_feature (41)..(331): NCBI GI NO: 15599386 NR Description: probable iron/ascorbate oxidoreductase
THLTSSHLPSISLPYPEPQIPLSGPAPPSLSPNTMGSDFKAIPLIDISPLVEKIDDPAMAGDEGLLDVVRMLDDACREAGFFYVKGHGISESLMTEVRDVTRKFFQLPREEKLKIKMTPQSGYRGYQRVGENVTKGKPDMHEAIDCYTPIEPGRYGDLAKPMEGSNLWPDYPSNFDALLENYISLLRDLSRKIMRGIALALGAPLDSFEGGVAGDAFWVLRLIGYPVSDDIPQEERTDIGCGAHTDYGLLTLVNQDDDICALEVRNQSGEWIYAKPVPGTFVCNIGDMLKVWSNGIYQPTLHRVVNNSPRYRVSVAFFYESNFDAAVEPVEFCREKTGGVAKYEKVVYGEHLVQKVLTNFVM

SEQ ID NO: 15092 - protein, 328 aa, Triticum aestivum
  peptide (1)..(328): Ceres Seq. ID no. 15222360
  misc_feature (183)..(286): Pfam Name: II Pfam Description: 2OG-Fe
  misc_feature (1)..(326): NCBI GI NO: 6984228 NR Description: putative flavonol synthase-like protein
  misc_feature (1)..(328): NCBI GI NO: 18409039 NR Description: oxidoreductase (din11), putative
  misc_feature (1)..(328): NCBI GI NO: 21554579 NR Description: flavonol synthase-like protein
  misc_feature (1)..(326): NCBI GI NO: 11255891 NR Description: hypothetical protein T9C5
  misc_feature (1)..(326): NCBI GI NO: 19423910 NR Description: unknown protein [Arabidopsis thaliana]
  misc_feature (1)..(326): NCBI GI NO: 22331716 NR Description: oxidoreductase (din11), putative
  misc_feature (11)..(326): NCBI GI NO: 15229181 NR Description: oxidoreductase (din11), putative
  misc_feature (1)..(328): NCBI GI NO: 11255902 NR Description: flavonol synthase-like protein
  misc_feature (4)..(297): NCBI GI NO: 23130050 NR Description: hypothetical protein [Nostoc punctiforme]
  misc_feature (7)..(297): NCBI GI NO: 15599386 NR Description: probable iron/ascorbate oxidoreductase
MGSDFKAIPLIDISPLVEKIDDPAMAGDEGLLDVVRMLDDACREAGFFYVKGHGISESLMTEVRDVTRKFFQLPREEKLKIKMTPQSGYRGYQRVGENVTKGKPDMHEAIDCYTPIEPGRYGDLAKPMEGSNLWPDYPSNFDALLENYISLLRDLSRKIMRGIALALGAPLDSFEGGVAGDAFWVLRLIGYPVSDDIPQEERTDIGCGAHTDYGLLTLVNQDDDICALEVRNQSGEWIYAKPVPGTFVCNIGDMLKVWSNGIYQPTLHRVVNNSPRYRVSVAFFYESNFDAAVEPVEFCREKTGGVAKYEKVVYGEHLVQKVLTNFVM

SEQ ID NO: 15093 - protein, 304 aa, Triticum aestivum
  peptide (1)..(304): Ceres Seq. ID no. 15222361
  misc_feature (159)..(262): Pfam Name: II Pfam Description: 2OG-Fe
  misc_feature (1)..(302): NCBI GI NO: 6984228 NR Description: putative flavonol synthase-like protein
  misc_feature (1)..(304): NCBI GI NO: 18409039 NR Description: oxidoreductase (din11), putative
  misc_feature (1)..(304): NCBI GI NO: 21554579 NR Description: flavonol synthase-like protein
  misc_feature (1)..(302): NCBI GI NO: 11255891 NR Description: hypothetical protein T9C5
  misc_feature (1)..(302): NCBI GI NO: 22331716 NR Description: oxidoreductase (din11), putative
  misc_feature (1)..(302): NCBI GI NO: 19423910 NR Description: unknown protein [Arabidopsis thaliana]
  misc_feature (1)..(302): NCBI GI NO: 15229181 NR Description: oxidoreductase (din11), putative
  misc_feature (1)..(304): NCBI GI NO: 11255902 NR Description: flavonol synthase-like protein
  misc_feature (1)..(273): NCBI GI NO: 23130050 NR Description: hypothetical protein [Nostoc punctiforme]
  misc_feature (1)..(273): NCBI GI NO: 15599386 NR Description: probable iron/ascorbate oxidoreductase
MAGDEGLLDVVRMLDDACREAGFFYVKGHGISESLMTEVRDVTRKFFQLPREEKLKIKMTPQSGYRGYQRVGENVTKGKPDMHEAIDCYTPIEPGRYGDLAKPMEGSNLWPDYPSNFDALLENYISLLRDLSRKIMRGIALALGAPLDSFEGGVAGDAFWVLRLIGYPVSDDIPQEERTDIGCGAHTDYGLLTLVNQDDDICALEVRNQSGEWIYAKPVPGTFVCNIGDMLKVWSNGIYQPTLHRVVNNSPRYRVSVAFFYESNFDAAVEPVEFCREKTGGVAKYEKVVYGEHLVQKVLTNFVM

SEQ ID NO: 15094 - DNA, 506 bp, Triticum aestivum
  misc_feature (1)..(506): Ceres Seq. ID no. 13597861
cagagagttccgtttcttttctccccctcttcctcgcagaaggagcggcaagtaatccggtcgaattgataggggagacgaggagcagcgatggccgccgctcgagcccgatggcggttcctcgcgctgcccctcgcgctgctcctcgcgatcggctcgtcgcgcggcctcgacgcggcgcccaagccccccgtccccaaggccatctccgacctgagggaggcgatcgtcaaggggctggggctccagtcggaggagctcaaggtgtccgggttcgacgtgagggacgcgctggtggggcatgcggtggcgtacgagttcgacatggaggtcgggaggaaggccgtgccggtgcgactgctcgaggacgtcaaccggtgggacttcgtcgacctgcccatcttccggtcccaggccgacgccgacgacacggcgctcgccgagatcgggcgggggagcttcgaccccacgctgtgttaaacacaataaagttggaactggagggg

SEQ ID NO: 15095 - protein, 168 aa, Triticum aestivum
  peptide (1)..(168): Ceres Seq. ID no. 13597862
ESSVSFLPLFLAEGAASNPVELIGETRSSDGRRSSPMAVPRAAPRAAPRDRLVARPRRGAQAPRPQGHLRPEGGDRQGAGAPVGGAQGVRVRREGRAGGACGGVRVRHGGREEGRAGATARGRQPVGLRRPAHLPVPGRRRRHGARRDRAGELRPHAVLNTIKLELEG

SEQ ID NO: 15096 - protein, 132 aa, Triticum aestivum
  peptide (1)..(132): Ceres Seq. ID no. 13597863
MAVPRAAPRAAPRDRLVARPRRGAQAPRPQGHLRPEGGDRQGAGAPVGGAQGVRVRREGRAGGACGGVRVRHGGREEGRAGATARGRQPVGLRRPAHLPVPGRRRRHGARRDRAGELRPHAVLNTIKLELEG

SEQ ID NO: 15097 - protein, 129 aa, Triticum aestivum
  peptide (1)..(129): Ceres Seq. ID no. 13597864
  misc_feature (3)..(128): NCBI GI NO: 34909866 NR Description: OSJNBb0053G03.14
  misc_feature (12)..(113): NCBI GI NO: 28393303 NR Description: unknown protein [Arabidopsis thaliana]
MAAARARWRFLALPLALLLAIGSSRGLDAAPKPPVPKAISDLREAIVKGLGLQSEELKVSGFDVRDALVGHAVAYEFDMEVGRKAVPVRLLEDVNRWDFVDLPIFRSQADADDTALAEIGRGSFDPTLC

SEQ ID NO: 15098 - DNA, 1491 bp, Triticum aestivum
  misc_feature (1)..(1491): Ceres Seq. ID no. 15169655
actaccaccgccgccgccgccctccccagcccccagatctccacccctcccatctgcaatggcggccgcttcgtcgctccacgtcgccgccccggccgccaccccgcgggtgggatctgccggccccaaatccgcgtcagcggcgaggagcgtgcgcgtggccagatcgggcgcggcggtgcgccctggaggcaggctggtggcttgcgccgccgttgcaaccaaggctgatgcgccggcgagcgaggcggcgtccaagtctgaaggtcatgaggtattgctgtttgaggctcttcgtgagggtttgatggaagagatgcaagcggatccaacggtgtgtgtctttggtgaagatgtcggtcactatgggggttcttacaaggtgaccaagggtttggctgatatgtttggagaccttcgtgttcttgacacaccaattgctgagaactcgttcaccggcatgggagttggagcaggaatgaaggggctgaggcctgttgttgaaggcatgaacatgggcttccttctccttgcttacaaccaaatctcaaacaactgcggtatgcttcattacacctctggcggccagttcaagataccacttgtgatccgaggtcctggtggtgttggtcgtcagcttggtgcagagcattcgcagcgcctggagtcatacttccagtcaatccctggtctccagatggttgcttgctccactccttacaatgccaagggtttaatgaaggctgccataaggagcgagaaccctgtcgtgctatttgagcacgtccttctgtacaacctgaaggagaaaattccggatgaggagtacactctatgcctggaggaggctgagatggtacggcctggtgagcatgtgaccatcctcacatactcgcgtatgaggtaccatgtgatgcaggctgcaaagacgctggtgaacaaagggtacgatcctgaggtgattgacattaggtcgttgaagccattcgatctgcacacaataggcaactccatcaagaagacccaccgcgtgctgattgtggaggagtgcatgcgcactggcgggattggcgccagtctgagatcggccatcatcgacaacttctgggactaccttgacgcccccatcatgtgcctgtcatctcaggacgtgccgacaccctacgccgcaactttggaggatgcgaccgtcgtgcagcctgcccagattgttgcggccgttgagcaaatatgccaatagggcgtcgtctgtttcagcatcgttaatttgtatctgccctggcttggaagaacctttaatttgtcatttttgccttgtagcgaggtgttcattgtggtataggcttgtatccattttttattcctgcttgagttaacacttgagctacataactgtactgtattatgctgaatgctactagggtctgaactcgggtttattggaagaaatctttgaatatcctgggcaaggtataactatgtgttttggct

SEQ ID NO: 15099 - protein, 412 aa, Triticum aestivum
  peptide (1)..(412): Ceres Seq. ID no. 15169656
  misc_feature (92)..(268): Pfam Name: Pfam Description:  Transketolase, pyridine binding domain
  misc_feature (40)..(412): NCBI GI NO: 15226781 NR Description: pyruvate dehydrogenase E1 beta subunit -related
  misc_feature (40)..(412): NCBI GI NO: 21593379 NR Description: putative pyruvate dehydrogenase E1 beta subunit
  misc_feature (56)..(412): NCBI GI NO: 15220670 NR Description: pyruvate dehydrogenase E1 beta subunit -related
  misc_feature (56)..(412): NCBI GI NO: 2454184 NR Description: pyruvate dehydrogenase E1 beta subunit
  misc_feature (126)..(412): NCBI GI NO: 2982328 NR Description: pyruvate dehydrogenase E1 beta subunit
  misc_feature (91)..(412): NCBI GI NO: 22711921 NR Description: pyruvate dehydrogenase E1 component beta subunit
  misc_feature (91)..(412): NCBI GI NO: 22297748 NR Description: pyruvate dehydrogenase E1 component beta subunit
  misc_feature (91)..(410): NCBI GI NO: 17227618 NR Description: pyruvate dehydrogenase E1 beta subunit
  misc_feature (91)..(410): NCBI GI NO: 23041427 NR Description: hypothetical protein
  misc_feature (91)..(410): NCBI GI NO: 16330037 NR Description: pyruvate dehydrogenase E1 beta subunit
LPPPPPPSPAPRSPPLPSAMAAASSLHVAAPAATPRVGSAGPKSASAARSVRVARSGAAVRPGGRLVACAAVATKADAPASEAASKSEGHEVLLFEALREGLMEEMQADPTVCVFGEDVGHYGGSYKVTKGLADMFGDLRVLDTPIAENSFTGMGVGAGMKGLRPVVEGMNMGFLLLAYNQISNNCGMLHYTSGGQFKIPLVIRGPGGVGRQLGAEHSQRLESYFQSIPGLQMVACSTPYNAKGLMKAAIRSENPVVLFEHVLLYNLKEKIPDEEYTLCLEEAEMVRPGEHVTILTYSRMRYHVMQAAKTLVNKGYDPEVIDIRSLKPFDLHTIGNSIKKTHRVLIVEECMRTGGIGASLRSAIIDNFWDYLDAPIMCLSSQDVPTPYAATLEDATVVQPAQIVAAVEQICQ

SEQ ID NO: 15100 - protein, 393 aa, Triticum aestivum
  peptide (1)..(393): Ceres Seq. ID no. 15169657
  misc_feature (73)..(249): Pfam Name: Pfam Description:  Transketolase, pyridine binding domain
  misc_feature (21)..(393): NCBI GI NO: 15226781 NR Description: pyruvate dehydrogenase E1 beta subunit -related
  misc_feature (21)..(393): NCBI GI NO: 21593379 NR Description: putative pyruvate dehydrogenase E1 beta subunit
  misc_feature (37)..(393): NCBI GI NO: 15220670 NR Description: pyruvate dehydrogenase E1 beta subunit -related
  misc_feature (37)..(393): NCBI GI NO: 2454184 NR Description: pyruvate dehydrogenase E1 beta subunit
  misc_feature (107)..(393): NCBI GI NO: 2982328 NR Description: pyruvate dehydrogenase E1 beta subunit
  misc_feature (72)..(393): NCBI GI NO: 22711921 NR Description: pyruvate dehydrogenase E1 component beta subunit
  misc_feature (72)..(393): NCBI GI NO: 22297748 NR Description: pyruvate dehydrogenase E1 component beta subunit
  misc_feature (72)..(391): NCBI GI NO: 17227618 NR Description: pyruvate dehydrogenase E1 beta subunit
  misc_feature (72)..(391): NCBI GI NO: 23041427 NR Description: hypothetical protein
  misc_feature (72)..(391): NCBI GI NO: 16330037 NR Description: pyruvate dehydrogenase E1 beta subunit
MAAASSLHVAAPAATPRVGSAGPKSASAARSVRVARSGAAVRPGGRLVACAAVATKADAPASEAASKSEGHEVLLFEALREGLMEEMQADPTVCVFGEDVGHYGGSYKVTKGLADMFGDLRVLDTPIAENSFTGMGVGAGMKGLRPVVEGMNMGFLLLAYNQISNNCGMLHYTSGGQFKIPLVIRGPGGVGRQLGAEHSQRLESYFQSIPGLQMVACSTPYNAKGLMKAAIRSENPVVLFEHVLLYNLKEKIPDEEYTLCLEEAEMVRPGEHVTILTYSRMRYHVMQAAKTLVNKGYDPEVIDIRSLKPFDLHTIGNSIKKTHRVLIVEECMRTGGIGASLRSAIIDNFWDYLDAPIMCLSSQDVPTPYAATLEDATVVQPAQIVAAVEQICQ

SEQ ID NO: 15101 - protein, 310 aa, Triticum aestivum
  peptide (1)..(310): Ceres Seq. ID no. 15169658
  misc_feature (1)..(166): Pfam Name: Pfam Description:  Transketolase, pyridine binding domain
  misc_feature (1)..(310): NCBI GI NO: 15226781 NR Description: pyruvate dehydrogenase E1 beta subunit -related
  misc_feature (1)..(310): NCBI GI NO: 21593379 NR Description: putative pyruvate dehydrogenase E1 beta subunit
  misc_feature (1)..(310): NCBI GI NO: 15220670 NR Description: pyruvate dehydrogenase E1 beta subunit -related
  misc_feature (1)..(310): NCBI GI NO: 2454184 NR Description: pyruvate dehydrogenase E1 beta subunit
  misc_feature (24)..(310): NCBI GI NO: 2982328 NR Description: pyruvate dehydrogenase E1 beta subunit
  misc_feature (1)..(310): NCBI GI NO: 22711921 NR Description: pyruvate dehydrogenase E1 component beta subunit
  misc_feature (1)..(310): NCBI GI NO: 22297748 NR Description: pyruvate dehydrogenase E1 component beta subunit
  misc_feature (1)..(308): NCBI GI NO: 17227618 NR Description: pyruvate dehydrogenase E1 beta subunit
  misc_feature (1)..(308): NCBI GI NO: 23041427 NR Description: hypothetical protein
  misc_feature (1)..(308): NCBI GI NO: 16330037 NR Description: pyruvate dehydrogenase E1 beta subunit
MEEMQADPTVCVFGEDVGHYGGSYKVTKGLADMFGDLRVLDTPIAENSFTGMGVGAGMKGLRPVVEGMNMGFLLLAYNQISNNCGMLHYTSGGQFKIPLVIRGPGGVGRQLGAEHSQRLESYFQSIPGLQMVACSTPYNAKGLMKAAIRSENPVVLFEHVLLYNLKEKIPDEEYTLCLEEAEMVRPGEHVTILTYSRMRYHVMQAAKTLVNKGYDPEVIDIRSLKPFDLHTIGNSIKKTHRVLIVEECMRTGGIGASLRSAIIDNFWDYLDAPIMCLSSQDVPTPYAATLEDATVVQPAQIVAAVEQICQ

SEQ ID NO: 15102 - DNA, 1702 bp, Triticum aestivum
  misc_feature (1)..(1702): Ceres Seq. ID no. 14302832
attttcacatcaaaatttctcctctttctatccatggccacggacgcacagcaccagcgacacagccgcaacggcggcgtgcacaccggccaccacttcctcatcgtggcctacggcatccagagccacctcaacccgtgccgcgtcctcgcgcaccgcctcgcgcgcctccacggcgtcgacggctccggggccgtcctcgccacggtctccctcccggtgtccgctcaccgccgcatgttcccttcgtccggagacgtcgacaatgatgataaagccaccgacggcgtcgtctcttacgctccatactccgacggcctcgacgacggctccatggccagggacggcgaggcgagggcgcgcagccgccaggccacctttgagagcctgtcagccgtcgtcgccaccctcgccgcacgtggccggccggtgacgtgtgtcgtttgcagcatggttctccccgcggcgctggacgtcgcgcgtgagcacggcatcccgctggccgtgtactggatccaaccggccaccgtgctcgccgcgtactaccactacttccacggccacggcgacctcctcgcgtcccacgccgccgaccccgcgtacgaggtgtccctgcccgggctacaccgccctctccggatccgcgacttcccgtccttcctcgtcgacacgacgggcagcgagctggccaaggtcttcaacgaagcggcccgagaactgttcgagcacttgggcgatcacggctgcaccaaggttctcgtgaacactttcgacgagctggagccggcagcgctggcagccatgaaggagcacctagacgtgttcgccgtcgggccggtgatcgggtcctcctcggccgagccgcgcatccacctgttcaaccacgccggcgccgacgagaagaggtacatggagtggctgggtgcgcaggcggcgaggtcggtgctgtacgtttcatttgggagcatatggacgtacagcaagaagcaaatggaggagattgcgaacgggctgcggcggtgcgggcggccgtacctgctcgtcgtgcgcaatgacgggcggcaggaggacgtgagccggagcctagacgacctcgtgctagaggggcagggcatggtggtggagtggtgcgaccaacccaaggtcctgtcgcacgcgtccgtgggatgcttcgtcacgcactgcggctggaactcgacgctggaggccatggccctcggcgtgccggtcgtcgccgcgccaagcttgttcgaccagccgacgaacgccttcttgatagaggaggagtgggctgccggcgtcagaggggagcgcaacagcgagggcggcttcaccggggaggagctcgcaaggtgcgtcgagctgctcatgggtcatggcccgagggccattgagatcagggaaagagtggacgctctgaaagggatgacgcgagaggcggcggcttcgggcgggccggcggagcggagcctccgaagctttgtcatggcggccggttcaatcgtcggatgaagtttgcaggaatacaccaccaaatctgtccaaatcgattaagtggatgcatgctggagtggatcagctagctctctcgatcggtcggagttaaacaacatttaataaccgggattgctaaatctcagtcgacttcttggtcgatgatatattcgcaggatcttacgtgaagatcggtgcgaattttttt

SEQ ID NO: 15103 - protein, 503 aa, Triticum aestivum
  peptide (1)..(503): Ceres Seq. ID no. 14302833
  misc_feature (32)..(499): Pfam Name: Pfam Description:  UDP-glucoronosyl and UDP-glucosyl transferase
  misc_feature (31)..(495): NCBI GI NO: 34906162 NR Description: putative anthocyanin 5-O-glucosyltransferase
  misc_feature (32)..(496): NCBI GI NO: 40714353 NR Description: anthocyanin 5-O-glucosyltransferase
  misc_feature (32)..(499): NCBI GI NO: 20146093 NR Description: glucosyltransferase NTGT2 [Nicotiana tabacum]
  misc_feature (32)..(495): NCBI GI NO: 6683052 NR Description: anthocyanin 5-O-glucosyltransferase
  misc_feature (32)..(499): NCBI GI NO: 14192682 NR Description: cold-induced glucosyl transferase
  misc_feature (22)..(495): NCBI GI NO: 2149127 NR Description: UDP-glucose: indole-3-acetate beta-D-glucosyltransferase
  misc_feature (22)..(495): NCBI GI NO: 18414478 NR Description: UDP-glucose: indole-3-acetate beta-D-glucosyltransferase
  misc_feature (34)..(495): NCBI GI NO: 4115559 NR Description: UDP-glucose:anthocysnin 5-O-glucosyltransferase
  misc_feature (32)..(495): NCBI GI NO: 4115563 NR Description: UDP-glucose:anthocyanin 5-O-glucosyltransferase
  misc_feature (34)..(480): NCBI GI NO: 4115561 NR Description: UDP-glucose:anthocyanin 5-O-glucosyltransferase homologue
IFTSKFLLFLSMATDAQHQRHSRNGGVHTGHHFLIVAYGIQSHLNPCRVLAHRLARLHGVDGSGAVLATVSLPVSAHRRMFPSSGDVDNDDKATDGVVSYAPYSDGLDDGSMARDGEARARSRQATFESLSAVVATLAARGRPVTCVVCSMVLPAALDVAREHGIPLAVYWIQPATVLAAYYHYFHGHGDLLASHAADPAYEVSLPGLHRPLRIRDFPSFLVDTTGSELAKVFNEAARELFEHLGDHGCTKVLVNTFDELEPAALAAMKEHLDVFAVGPVIGSSSAEPRIHLFNHAGADEKRYMEWLGAQAARSVLYVSFGSIWTYSKKQMEEIANGLRRCGRPYLLVVRNDGRQEDVSRSLDDLVLEGQGMVVEWCDQPKVLSHASVGCFVTHCGWNSTLEAMALGVPVVAAPSLFDQPTNAFLIEEEWAAGVRGERNSEGGFTGEELARCVELLMGHGPRAIEIRERVDALKGMTREAAASGGPAERSLRSFVMAAGSIVG

SEQ ID NO: 15104 - protein, 492 aa, Triticum aestivum
  peptide (1)..(492): Ceres Seq. ID no. 14302834
  misc_feature (21)..(488): Pfam Name: Pfam Description:  UDP-glucoronosyl and UDP-glucosyl transferase
  misc_feature (20)..(484): NCBI GI NO: 34906162 NR Description: putative anthocyanin 5-O-glucosyltransferase
  misc_feature (21)..(485): NCBI GI NO: 40714353 NR Description: anthocyanin 5-O-glucosyltransferase
  misc_feature (21)..(488): NCBI GI NO: 20146093 NR Description: glucosyltransferase NTGT2 [Nicotiana tabacum]
  misc_feature (21)..(484): NCBI GI NO: 6683052 NR Description: anthocyanin 5-O-glucosyltransferase
  misc_feature (21)..(488): NCBI GI NO: 14192682 NR Description: cold-induced glucosyl transferase
  misc_feature (11)..(484): NCBI GI NO: 2149127 NR Description: UDP-glucose: indole-3-acetate beta-D-glucosyltransferase
  misc_feature (11)..(484): NCBI GI NO: 18414478 NR Description: UDP-glucose: indole-3-acetate beta-D-glucosyltransferase
  misc_feature (23)..(484): NCBI GI NO: 4115559 NR Description: UDP-glucose:anthocysnin 5-O-glucosyltransferase
  misc_feature (21)..(484): NCBI GI NO: 4115563 NR Description: UDP-glucose:anthocyanin 5-O-glucosyltransferase
  misc_feature (23)..(469): NCBI GI NO: 4115561 NR Description: UDP-glucose:anthocyanin 5-O-glucosyltransferase homologue
MATDAQHQRHSRNGGVHTGHHFLIVAYGIQSHLNPCRVLAHRLARLHGVDGSGAVLATVSLPVSAHRRMFPSSGDVDNDDKATDGVVSYAPYSDGLDDGSMARDGEARARSRQATFESLSAVVATLAARGRPVTCVVCSMVLPAALDVAREHGIPLAVYWIQPATVLAAYYHYFHGHGDLLASHAADPAYEVSLPGLHRPLRIRDFPSFLVDTTGSELAKVFNEAARELFEHLGDHGCTKVLVNTFDELEPAALAAMKEHLDVFAVGPVIGSSSAEPRIHLFNHAGADEKRYMEWLGAQAARSVLYVSFGSIWTYSKKQMEEIANGLRRCGRPYLLVVRNDGRQEDVSRSLDDLVLEGQGMVVEWCDQPKVLSHASVGCFVTHCGWNSTLEAMALGVPVVAAPSLFDQPTNAFLIEEEWAAGVRGERNSEGGFTGEELARCVELLMGHGPRAIEIRERVDALKGMTREAAASGGPAERSLRSFVMAAGSIVG

SEQ ID NO: 15105 - protein, 424 aa, Triticum aestivum
  peptide (1)..(424): Ceres Seq. ID no. 14302835
  misc_feature (1)..(420): Pfam Name: Pfam Description:  UDP-glucoronosyl and UDP-glucosyl transferase
  misc_feature (1)..(416): NCBI GI NO: 34906162 NR Description: putative anthocyanin 5-O-glucosyltransferase
  misc_feature (1)..(417): NCBI GI NO: 40714353 NR Description: anthocyanin 5-O-glucosyltransferase
  misc_feature (1)..(420): NCBI GI NO: 20146093 NR Description: glucosyltransferase NTGT2 [Nicotiana tabacum]
  misc_feature (1)..(416): NCBI GI NO: 6683052 NR Description: anthocyanin 5-O-glucosyltransferase
  misc_feature (1)..(420): NCBI GI NO: 14192682 NR Description: cold-induced glucosyl transferase
  misc_feature (1)..(416): NCBI GI NO: 2149127 NR Description: UDP-glucose: indole-3-acetate beta-D-glucosyltransferase
  misc_feature (1)..(416): NCBI GI NO: 18414478 NR Description: UDP-glucose: indole-3-acetate beta-D-glucosyltransferase
  misc_feature (1)..(416): NCBI GI NO: 4115559 NR Description: UDP-glucose:anthocysnin 5-O-glucosyltransferase
  misc_feature (1)..(416): NCBI GI NO: 4115563 NR Description: UDP-glucose:anthocyanin 5-O-glucosyltransferase
  misc_feature (1)..(401): NCBI GI NO: 4115561 NR Description: UDP-glucose:anthocyanin 5-O-glucosyltransferase homologue
MFPSSGDVDNDDKATDGVVSYAPYSDGLDDGSMARDGEARARSRQATFESLSAVVATLAARGRPVTCVVCSMVLPAALDVAREHGIPLAVYWIQPATVLAAYYHYFHGHGDLLASHAADPAYEVSLPGLHRPLRIRDFPSFLVDTTGSELAKVFNEAARELFEHLGDHGCTKVLVNTFDELEPAALAAMKEHLDVFAVGPVIGSSSAEPRIHLFNHAGADEKRYMEWLGAQAARSVLYVSFGSIWTYSKKQMEEIANGLRRCGRPYLLVVRNDGRQEDVSRSLDDLVLEGQGMVVEWCDQPKVLSHASVGCFVTHCGWNSTLEAMALGVPVVAAPSLFDQPTNAFLIEEEWAAGVRGERNSEGGFTGEELARCVELLMGHGPRAIEIRERVDALKGMTREAAASGGPAERSLRSFVMAAGSIVG

SEQ ID NO: 15106 - DNA, 1958 bp, Triticum aestivum
  misc_feature (1)..(1958): Ceres Seq. ID no. 15169647
atcccgcatcgcatcgcactaggtctcggacattcctctttctctcccttgcttggggaagaagaagaagaagaagagagggctcccgacgccgtcgcccctcgccgccgatctgatctcaggagccagcgaagatgcattccaccaatctgctcctcgaggagcccatccggatggtctccatcctcgagccatccaagccgaacttcttcccggcgatgacgaagatcgtggggacgctgggtcccaagtcccggtccgttgaggccatctccgcctgtctaaaggccggcatgtctgtggcccgtttcgatttctcgtggggggatgccgcgtaccaccaggagacactcgagaacctcaagctcgccatcaaggccaccaagaagctatgtgctgttatgctcgacactgttggccctgagttgcaagtggtgaacaagagtgaagtcacaatctcgcttgaagagaacgagtctgttgttctcacccctcacaagggccaggaggcctcttccaagttgctccctatcaacttcgctggactcgccaaggctgtgaagcccggagccacaatattcgttgggcaatatttgttcacgggcagtgagactacatcagtttggctggaggtttctgaagttcaaggggatgacgtggtttgcgtgatcaagaactcagctaccctggctgggtcactcttcacattgcactgctcccagatccatatcgacatgcccacgctgtctgatgaggataaagatgttatgaaaaaatggggtgctccaaacaagattgacttcctctctctttcttatacaaggcacgcagaagatgtgcggcaagcacgggagttcctctctaagttaggtgatcttagccaaactctgatttttgccaaaattgagaatgtggagggcttgaaccattttgatgagatcctggaggaagcggatggtatcattctgtcaagagggaaccttggaattgatcttccacctgaaaaggtgttcttatttcagaagtctgctctgcacaagtgcaacatggctggaaagcctgctgttgttactcgtgttgtggacagtatgacggacaacctaaggcctactcgtgcggaggcaactgatgtggcaaatgcggtgctggatggtagtgatgccattctccttggtgccgagactctccgtgggttgtatccagttgagactatttcaacagtgggcagaatttgtgctgaggctgagaaggttttcaaccaagatttgtacttcaagcgaactgtgaaatatgtgggagaacccatgacccacttggagtctattgcttcctctgcagtgcgggctgctattaaagttaaggcttcggtcatcatttgcttcacctcatctggacgggctgcaaggctaattgccaagtacaggcccaccatgcctgtcctctctgttgtcattcctcgtctgaaaacaaatcaattgaagtggagcttcacaggtgcatttgaggcaagacaatcactcatagttagaggcctctttcccatgcttgccgatccacgtcatccggctgaatctactagcactacaaatgaatcagtgttgaaggttgctcttgaccacggcaaagcatccggtgtgatcaagtcgcatgaccgcgttgtcgtgtgccagaaagtgggagattcctctgtcgtgaagatcattgagctggacgactaggcaaaattagtctttgctcagggcttgccagatttttgactaggccaaaacgttgcttggtggctatgtataattctatctatagttttgcaaaacgagcagtttttcctatggtgtcatcataggatccgcggttaccattcgaaaacctacgctagttattatggatatgtcctcagattttactgcagtgtagcgagtaaatgatctgatggaataatgatatcaaaactttgtgac

SEQ ID NO: 15107 - protein, 527 aa, Triticum aestivum
  peptide (1)..(527): Ceres Seq. ID no. 15169648
  misc_feature (37)..(380): Pfam Name: Pfam Description:  Pyruvate kinase, barrel domain
  misc_feature (37)..(527): NCBI GI NO: 20562907 NR Description: pyruvate kinase-like [Deschampsia antarctica]
  misc_feature (1)..(527): NCBI GI NO: 18409740 NR Description: pyruvate kinase, putative [Arabidopsis thaliana]
  misc_feature (1)..(527): NCBI GI NO: 18404169 NR Description: pyruvate kinase, putative [Arabidopsis thaliana]
  misc_feature (1)..(527): NCBI GI NO: 21537122 NR Description: putative pyruvate kinase [Arabidopsis thaliana]
  misc_feature (1)..(527): NCBI GI NO: 23308151 NR Description: At2g36580/F1O11.21 [Arabidopsis thaliana]
  misc_feature (14)..(527): NCBI GI NO: 11260409 NR Description: pyruvate kinase-like protein
  misc_feature (54)..(527): NCBI GI NO: 25287747 NR Description: probable pyruvate kinase
  misc_feature (30)..(523): NCBI GI NO: 2497543 NR Description: Pyruvate kinase, cytosolic isozyme
  misc_feature (30)..(523): NCBI GI NO: 34903274 NR Description: unnamed protein product
  misc_feature (12)..(449): NCBI GI NO: 4033429 NR Description: Pyruvate kinase (PK)
MHSTNLLLEEPIRMVSILEPSKPNFFPAMTKIVGTLGPKSRSVEAISACLKAGMSVARFDFSWGDAAYHQETLENLKLAIKATKKLCAVMLDTVGPELQVVNKSEVTISLEENESVVLTPHKGQEASSKLLPINFAGLAKAVKPGATIFVGQYLFTGSETTSVWLEVSEVQGDDVVCVIKNSATLAGSLFTLHCSQIHIDMPTLSDEDKDVMKKWGAPNKIDFLSLSYTRHAEDVRQAREFLSKLGDLSQTLIFAKIENVEGLNHFDEILEEADGIILSRGNLGIDLPPEKVFLFQKSALHKCNMAGKPAVVTRVVDSMTDNLRPTRAEATDVANAVLDGSDAILLGAETLRGLYPVETISTVGRICAEAEKVFNQDLYFKRTVKYVGEPMTHLESIASSAVRAAIKVKASVIICFTSSGRAARLIAKYRPTMPVLSVVIPRLKTNQLKWSFTGAFEARQSLIVRGLFPMLADPRHPAESTSTTNESVLKVALDHGKASGVIKSHDRVVVCQKVGDSSVVKIIELDD

SEQ ID NO: 15108 - protein, 514 aa, Triticum aestivum
  peptide (1)..(514): Ceres Seq. ID no. 15169649
  misc_feature (24)..(367): Pfam Name: Pfam Description:  Pyruvate kinase, barrel domain
  misc_feature (24)..(514): NCBI GI NO: 20562907 NR Description: pyruvate kinase-like [Deschampsia antarctica]
  misc_feature (1)..(514): NCBI GI NO: 18409740 NR Description: pyruvate kinase, putative [Arabidopsis thaliana]
  misc_feature (1)..(514): NCBI GI NO: 18404169 NR Description: pyruvate kinase, putative [Arabidopsis thaliana]
  misc_feature (1)..(514): NCBI GI NO: 21537122 NR Description: putative pyruvate kinase [Arabidopsis thaliana]
  misc_feature (1)..(514): NCBI GI NO: 23308151 NR Description: At2g36580/F1O11.21 [Arabidopsis thaliana]
  misc_feature (1)..(514): NCBI GI NO: 11260409 NR Description: pyruvate kinase-like protein
  misc_feature (41)..(514): NCBI GI NO: 25287747 NR Description: probable pyruvate kinase
  misc_feature (17)..(510): NCBI GI NO: 2497543 NR Description: Pyruvate kinase, cytosolic isozyme
  misc_feature (17)..(510): NCBI GI NO: 34903274 NR Description: unnamed protein product
  misc_feature (1)..(436): NCBI GI NO: 4033429 NR Description: Pyruvate kinase (PK)
MVSILEPSKPNFFPAMTKIVGTLGPKSRSVEAISACLKAGMSVARFDFSWGDAAYHQETLENLKLAIKATKKLCAVMLDTVGPELQVVNKSEVTISLEENESVVLTPHKGQEASSKLLPINFAGLAKAVKPGATIFVGQYLFTGSETTSVWLEVSEVQGDDVVCVIKNSATLAGSLFTLHCSQIHIDMPTLSDEDKDVMKKWGAPNKIDFLSLSYTRHAEDVRQAREFLSKLGDLSQTLIFAKIENVEGLNHFDEILEEADGIILSRGNLGIDLPPEKVFLFQKSALHKCNMAGKPAVVTRVVDSMTDNLRPTRAEATDVANAVLDGSDAILLGAETLRGLYPVETISTVGRICAEAEKVFNQDLYFKRTVKYVGEPMTHLESIASSAVRAAIKVKASVIICFTSSGRAARLIAKYRPTMPVLSVVIPRLKTNQLKWSFTGAFEARQSLIVRGLFPMLADPRHPAESTSTTNESVLKVALDHGKASGVIKSHDRVVVCQKVGDSSVVKIIELDD

SEQ ID NO: 15109 - protein, 499 aa, Triticum aestivum
  peptide (1)..(499): Ceres Seq. ID no. 15169650
  misc_feature (9)..(352): Pfam Name: Pfam Description:  Pyruvate kinase, barrel domain
  misc_feature (9)..(499): NCBI GI NO: 20562907 NR Description: pyruvate kinase-like [Deschampsia antarctica]
  misc_feature (1)..(499): NCBI GI NO: 18409740 NR Description: pyruvate kinase, putative [Arabidopsis thaliana]
  misc_feature (1)..(499): NCBI GI NO: 18404169 NR Description: pyruvate kinase, putative [Arabidopsis thaliana]
  misc_feature (1)..(499): NCBI GI NO: 21537122 NR Description: putative pyruvate kinase [Arabidopsis thaliana]
  misc_feature (1)..(499): NCBI GI NO: 23308151 NR Description: At2g36580/F1O11.21 [Arabidopsis thaliana]
  misc_feature (1)..(499): NCBI GI NO: 11260409 NR Description: pyruvate kinase-like protein
  misc_feature (26)..(499): NCBI GI NO: 25287747 NR Description: probable pyruvate kinase
  misc_feature (2)..(495): NCBI GI NO: 2497543 NR Description: Pyruvate kinase, cytosolic isozyme
  misc_feature (2)..(495): NCBI GI NO: 34903274 NR Description: unnamed protein product
  misc_feature (1)..(421): NCBI GI NO: 4033429 NR Description: Pyruvate kinase (PK)
MTKIVGTLGPKSRSVEAISACLKAGMSVARFDFSWGDAAYHQETLENLKLAIKATKKLCAVMLDTVGPELQVVNKSEVTISLEENESVVLTPHKGQEASSKLLPINFAGLAKAVKPGATIFVGQYLFTGSETTSVWLEVSEVQGDDVVCVIKNSATLAGSLFTLHCSQIHIDMPTLSDEDKDVMKKWGAPNKIDFLSLSYTRHAEDVRQAREFLSKLGDLSQTLIFAKIENVEGLNHFDEILEEADGIILSRGNLGIDLPPEKVFLFQKSALHKCNMAGKPAVVTRVVDSMTDNLRPTRAEATDVANAVLDGSDAILLGAETLRGLYPVETISTVGRICAEAEKVFNQDLYFKRTVKYVGEPMTHLESIASSAVRAAIKVKASVIICFTSSGRAARLIAKYRPTMPVLSVVIPRLKTNQLKWSFTGAFEARQSLIVRGLFPMLADPRHPAESTSTTNESVLKVALDHGKASGVIKSHDRVVVCQKVGDSSVVKIIELDD

SEQ ID NO: 15110 - DNA, 1017 bp, Triticum aestivum
  misc_feature (1)..(1017): Ceres Seq. ID no. 15226273
cacagactcagagcgaagggacgacgagacgcacctgccaggtctacacgcgccgccgcctccaggaccctctgcccctcgccgccgcctccaggaccccctgcccctcgccgccgcaggcaccgcgccgcctccgtcctccactgcagcaggcagcagattgaagttatggccctggttaataagcttggtaatctgctcaagaaggccaccagctcgaacccgactctctatcaggcgataagatgcatgtcatcctcgaagctcttcgtaggagggctttcctttaacacagacgagggcagtctgagagatgctttttcccattatggggaaattattgatgctaagattatcgtagaccgcgacactggcaggtctagaggttttggctttataacttatgcagcagaagaacaggcttcatctgccatcatggccttggatggaaaggatctacatggacgcaacctacgggttagtgctgccactgagaggaccgctggcttccgtaatggtgctggttatggaggtggtggtggcggctttggaggaggaggatatggcggtggtggctatggaggaggtggttatggtagcaacagtggtggtggcggcgacaactttgctgccggcaactttggtggtgccagtggcttcggtggaaacccagctggaaaccatggtgctcctgcaggttccaccggtggtgatgagttctccctcggcacccctggttccacctttgaaagcaccaagaatgacgatgtcatggacgacctcttcaaggatgatgaacctgacaagtacgccagcaagaatgtctagggctccagtctgcatctccttctgcaagtccctagttatgtaccttggataagtgtgaggtgaatgatcctccagaccagagactactttcttgatgactgtctagagaccaaaataacttatgcgttgaggtgacaatgagaatgcacgttcagtttacctgatttagctttttttttctctcttcac

SEQ ID NO: 15111 - protein, 275 aa, Triticum aestivum
  peptide (1)..(275): Ceres Seq. ID no. 15226274
  misc_feature (89)..(160): Pfam Name: a.k.a. RRM, RBD, or RNP domain Pfam Description: RNA recognition motif.
  misc_feature (57)..(254): NCBI GI NO: 15239505 NR Description: RNA-binding protein, putative
  misc_feature (73)..(275): NCBI GI NO: 15239505 NR Description: RNA-binding protein, putative
  misc_feature (57)..(254): NCBI GI NO: 15822703 NR Description: RNA-binding protein precursor [Nicotiana tabacum]
  misc_feature (57)..(249): NCBI GI NO: 15221187 NR Description: glycine-rich RNA-binding protein
  misc_feature (57)..(237): NCBI GI NO: 15822705 NR Description: RNA-binding protein precursor [Solanum tuberosum]
  misc_feature (57)..(247): NCBI GI NO: 1084415 NR Description: RNA-binding protein - wood tobacco
  misc_feature (60)..(243): NCBI GI NO: 15822705 NR Description: RNA-binding protein precursor [Solanum tuberosum]
  misc_feature (57)..(206): NCBI GI NO: 15236359 NR Description: glycine-rich RNA-binding protein (AtGRP2)
  misc_feature (57)..(198): NCBI GI NO: 30682622 NR Description: glycine-rich RNA-binding protein (AtGRP2)
  misc_feature (88)..(238): NCBI GI NO: 7439981 NR Description: glycine-rich RNA-binding protein GRP1 - wheat
HRLRAKGRRDAPARSTRAAASRTLCPSPPPPGPPAPRRRRHRAASVLHCSRQQIEVMALVNKLGNLLKKATSSNPTLYQAIRCMSSSKLFVGGLSFNTDEGSLRDAFSHYGEIIDAKIIVDRDTGRSRGFGFITYAAEEQASSAIMALDGKDLHGRNLRVSAATERTAGFRNGAGYGGGGGGFGGGGYGGGGYGGGGYGSNSGGGGDNFAAGNFGGASGFGGNPAGNHGAPAGSTGGDEFSLGTPGSTFESTKNDDVMDDLFKDDEPDKYASKNV

SEQ ID NO: 15112 - protein, 219 aa, Triticum aestivum
  peptide (1)..(219): Ceres Seq. ID no. 15226275
  misc_feature (33)..(104): Pfam Name: a.k.a. RRM, RBD, or RNP domain Pfam Description: RNA recognition motif.
  misc_feature (1)..(198): NCBI GI NO: 15239505 NR Description: RNA-binding protein, putative
  misc_feature (17)..(219): NCBI GI NO: 15239505 NR Description: RNA-binding protein, putative
  misc_feature (1)..(198): NCBI GI NO: 15822703 NR Description: RNA-binding protein precursor [Nicotiana tabacum]
  misc_feature (1)..(193): NCBI GI NO: 15221187 NR Description: glycine-rich RNA-binding protein
  misc_feature (1)..(181): NCBI GI NO: 15822705 NR Description: RNA-binding protein precursor [Solanum tuberosum]
  misc_feature (1)..(191): NCBI GI NO: 1084415 NR Description: RNA-binding protein - wood tobacco
  misc_feature (4)..(187): NCBI GI NO: 15822705 NR Description: RNA-binding protein precursor [Solanum tuberosum]
  misc_feature (1)..(150): NCBI GI NO: 15236359 NR Description: glycine-rich RNA-binding protein (AtGRP2)
  misc_feature (1)..(142): NCBI GI NO: 30682622 NR Description: glycine-rich RNA-binding protein (AtGRP2)
  misc_feature (32)..(182): NCBI GI NO: 7439981 NR Description: glycine-rich RNA-binding protein GRP1 - wheat
MALVNKLGNLLKKATSSNPTLYQAIRCMSSSKLFVGGLSFNTDEGSLRDAFSHYGEIIDAKIIVDRDTGRSRGFGFITYAAEEQASSAIMALDGKDLHGRNLRVSAATERTAGFRNGAGYGGGGGGFGGGGYGGGGYGGGGYGSNSGGGGDNFAAGNFGGASGFGGNPAGNHGAPAGSTGGDEFSLGTPGSTFESTKNDDVMDDLFKDDEPDKYASKNV

SEQ ID NO: 15113 - protein, 192 aa, Triticum aestivum
  peptide (1)..(192): Ceres Seq. ID no. 15226276
  misc_feature (6)..(77): Pfam Name: a.k.a. RRM, RBD, or RNP domain Pfam Description: RNA recognition motif.
  misc_feature (1)..(171): NCBI GI NO: 15239505 NR Description: RNA-binding protein, putative
  misc_feature (1)..(192): NCBI GI NO: 15239505 NR Description: RNA-binding protein, putative
  misc_feature (1)..(171): NCBI GI NO: 15822703 NR Description: RNA-binding protein precursor [Nicotiana tabacum]
  misc_feature (1)..(166): NCBI GI NO: 15221187 NR Description: glycine-rich RNA-binding protein
  misc_feature (1)..(154): NCBI GI NO: 15822705 NR Description: RNA-binding protein precursor [Solanum tuberosum]
  misc_feature (1)..(164): NCBI GI NO: 1084415 NR Description: RNA-binding protein - wood tobacco
  misc_feature (1)..(160): NCBI GI NO: 15822705 NR Description: RNA-binding protein precursor [Solanum tuberosum]
  misc_feature (1)..(123): NCBI GI NO: 15236359 NR Description: glycine-rich RNA-binding protein (AtGRP2)
  misc_feature (1)..(115): NCBI GI NO: 30682622 NR Description: glycine-rich RNA-binding protein (AtGRP2)
  misc_feature (5)..(155): NCBI GI NO: 7439981 NR Description: glycine-rich RNA-binding protein GRP1 - wheat
MSSSKLFVGGLSFNTDEGSLRDAFSHYGEIIDAKIIVDRDTGRSRGFGFITYAAEEQASSAIMALDGKDLHGRNLRVSAATERTAGFRNGAGYGGGGGGFGGGGYGGGGYGGGGYGSNSGGGGDNFAAGNFGGASGFGGNPAGNHGAPAGSTGGDEFSLGTPGSTFESTKNDDVMDDLFKDDEPDKYASKNV

SEQ ID NO: 15114 - DNA, 1416 bp, Triticum aestivum
  misc_feature (1)..(1416): Ceres Seq. ID no. 13598528
atttttctccaaaaccctcccggctactccccttctcgtctttttcttgtagtaccacatcgcaaaacaagagaaaaatccggaccttgcggctttcccccttgctcggctgctaaccggattcgcgtctcaggctcgggatccgggcgttccgtgcgatgggcggcggcggcggcggcggcggcggcggcgcggaggaggagctgacggcgcaggagacggcgctctacgaccgccagatccgcgtctggggcgtcgatgcccagaagaggctaagtaaggcgcatgtgcttgtgtgcggcgtcaacggtactactattgagttctgcaagaacattgttctagcaggagttggcagtttatcattgatggacgatcacatggtcacagaggatgatctcaattcaaacttcctaattcctcatgatgagagtgtgtatggtggtaaatcacgggcagaggtttgctgcgagtccttaaaagatttcaatccaatggtccgagttgctgttgcaaaaggtaacccatcactaattgatggaacattcattgacatgttcgacattattgtagtcagctgcgcatctcttaaaacaaagttgtttattaatgacaactgccggaagagaagcaagcatattgccttctactctgtagagtgcaaggattcttgtggtgaaatatttgttgatctgcaggaccatagctatcttcagaagaagcctggaggagaacctgaacagcaggagttgaaatatcctagtctgcaggaagctatttctgtgccctggaaggatctgtccaaaagaacaactaaattgtactacgcaatgagagtcttggaaagttatgaatcatctgaagggcgcgaccctggtgagacatcactttctgatctgcctgcagttttggctcggaggaaggatatgtgtgatagaatgtctgtggacgagtctaaaattcctacgtctcttctggaacggcttctagcagctgggaaaaaggaacatcctcctgtatgtgcaatccttggtggcattcttggtcaggaggtgatcaaatcaatatcttgcaagggcgatccgatcaagaatttcttttacttcgacgatgctgatggtaaaggggccatggaggacatccccccaactcctgaagactaaatcacgtgatacctaactctcatccgacatggcttgctgataattgtacccaatcattagagtcgaacatgtgacaactctagttcagtggctgaggctggaaactcaactcagcactttagtgtttttattattgtacttagcgttcgttttagcgttggcatcatgctatggcacctgggtactgcgatgaacagaactgacattctcgtccaaagaatttcaaagctgaaggcaggcatgctattgaatg

SEQ ID NO: 15115 - protein, 334 aa, Triticum aestivum
  peptide (1)..(334): Ceres Seq. ID no. 13598529
  misc_feature (40)..(178): Pfam Name: Pfam Description:  ThiF family
  misc_feature (14)..(328): NCBI GI NO: 18416454 NR Description: SUMO activating enzyme, putative
  misc_feature (14)..(328): NCBI GI NO: 7488411 NR Description: ubiquitin-activating enzyme homolog F13M23
  misc_feature (14)..(328): NCBI GI NO: 22652852 NR Description: SUMO activating enzyme 1b [Arabidopsis thaliana]
  misc_feature (14)..(328): NCBI GI NO: 18423184 NR Description: SUMO activating enzyme 1b (SAE1b)
  misc_feature (10)..(328): NCBI GI NO: 3647283 NR Description: ubiquitin activating enzyme
  misc_feature (14)..(328): NCBI GI NO: 30695912 NR Description: SUMO activating enzyme 1b (SAE1b)
  misc_feature (14)..(328): NCBI GI NO: 21554965 NR Description: ubiquitin activating enzyme [Arabidopsis thaliana]
  misc_feature (96)..(328): NCBI GI NO: 25494393 NR Description: probable ubiquitin activating enzyme 2
  misc_feature (5)..(188): NCBI GI NO: 9790247 NR Description: ubiquitin-like 1
  misc_feature (195)..(330): NCBI GI NO: 9790247 NR Description: ubiquitin-like 1
MGGGGGGGGGGAEEELTAQETALYDRQIRVWGVDAQKRLSKAHVLVCGVNGTTIEFCKNIVLAGVGSLSLMDDHMVTEDDLNSNFLIPHDESVYGGKSRAEVCCESLKDFNPMVRVAVAKGNPSLIDGTFIDMFDIIVVSCASLKTKLFINDNCRKRSKHIAFYSVECKDSCGEIFVDLQDHSYLQKKPGGEPEQQELKYPSLQEAISVPWKDLSKRTTKLYYAMRVLESYESSEGRDPGETSLSDLPAVLARRKDMCDRMSVDESKIPTSLLERLLAAGKKEHPPVCAILGGILGQEVIKSISCKGDPIKNFFYFDDADGKGAMEDIPPTPED

SEQ ID NO: 15116 - protein, 264 aa, Triticum aestivum
  peptide (1)..(264): Ceres Seq. ID no. 13598530
  misc_feature (1)..(108): Pfam Name: Pfam Description:  ThiF family
  misc_feature (1)..(258): NCBI GI NO: 18416454 NR Description: SUMO activating enzyme, putative
  misc_feature (1)..(258): NCBI GI NO: 7488411 NR Description: ubiquitin-activating enzyme homolog F13M23
  misc_feature (1)..(258): NCBI GI NO: 22652852 NR Description: SUMO activating enzyme 1b [Arabidopsis thaliana]
  misc_feature (1)..(258): NCBI GI NO: 18423184 NR Description: SUMO activating enzyme 1b (SAE1b)
  misc_feature (1)..(258): NCBI GI NO: 3647283 NR Description: ubiquitin activating enzyme
  misc_feature (1)..(258): NCBI GI NO: 30695912 NR Description: SUMO activating enzyme 1b (SAE1b)
  misc_feature (1)..(258): NCBI GI NO: 21554965 NR Description: ubiquitin activating enzyme [Arabidopsis thaliana]
  misc_feature (26)..(258): NCBI GI NO: 25494393 NR Description: probable ubiquitin activating enzyme 2
  misc_feature (1)..(118): NCBI GI NO: 9790247 NR Description: ubiquitin-like 1
  misc_feature (125)..(260): NCBI GI NO: 9790247 NR Description: ubiquitin-like 1
MDDHMVTEDDLNSNFLIPHDESVYGGKSRAEVCCESLKDFNPMVRVAVAKGNPSLIDGTFIDMFDIIVVSCASLKTKLFINDNCRKRSKHIAFYSVECKDSCGEIFVDLQDHSYLQKKPGGEPEQQELKYPSLQEAISVPWKDLSKRTTKLYYAMRVLESYESSEGRDPGETSLSDLPAVLARRKDMCDRMSVDESKIPTSLLERLLAAGKKEHPPVCAILGGILGQEVIKSISCKGDPIKNFFYFDDADGKGAMEDIPPTPED

SEQ ID NO: 15117 - protein, 260 aa, Triticum aestivum
  peptide (1)..(260): Ceres Seq. ID no. 13598531
  misc_feature (1)..(104): Pfam Name: Pfam Description:  ThiF family
  misc_feature (1)..(254): NCBI GI NO: 18416454 NR Description: SUMO activating enzyme, putative
  misc_feature (1)..(254): NCBI GI NO: 7488411 NR Description: ubiquitin-activating enzyme homolog F13M23
  misc_feature (1)..(254): NCBI GI NO: 22652852 NR Description: SUMO activating enzyme 1b [Arabidopsis thaliana]
  misc_feature (1)..(254): NCBI GI NO: 18423184 NR Description: SUMO activating enzyme 1b (SAE1b)
  misc_feature (1)..(254): NCBI GI NO: 3647283 NR Description: ubiquitin activating enzyme
  misc_feature (1)..(254): NCBI GI NO: 30695912 NR Description: SUMO activating enzyme 1b (SAE1b)
  misc_feature (1)..(254): NCBI GI NO: 21554965 NR Description: ubiquitin activating enzyme [Arabidopsis thaliana]
  misc_feature (22)..(254): NCBI GI NO: 25494393 NR Description: probable ubiquitin activating enzyme 2
  misc_feature (1)..(114): NCBI GI NO: 9790247 NR Description: ubiquitin-like 1
  misc_feature (121)..(256): NCBI GI NO: 9790247 NR Description: ubiquitin-like 1
MVTEDDLNSNFLIPHDESVYGGKSRAEVCCESLKDFNPMVRVAVAKGNPSLIDGTFIDMFDIIVVSCASLKTKLFINDNCRKRSKHIAFYSVECKDSCGEIFVDLQDHSYLQKKPGGEPEQQELKYPSLQEAISVPWKDLSKRTTKLYYAMRVLESYESSEGRDPGETSLSDLPAVLARRKDMCDRMSVDESKIPTSLLERLLAAGKKEHPPVCAILGGILGQEVIKSISCKGDPIKNFFYFDDADGKGAMEDIPPTPED

SEQ ID NO: 15118 - DNA, 1292 bp, Triticum aestivum
  misc_feature (1)..(1292): Ceres Seq. ID no. 13597533
aaccaaacccaacggctccgcagtccgcaccaacccctccccctcgccccaaccgccgccctcctcgcctccaccggaagagctgctccccccgcaaccgggcggatcccgctaggcggaggcggagatccggcagccgccatggcggcgagcgacgtgcccatgagccccgagctcgagcaggtcgacggcgagatccaggacatcttccgcgccctacacaatgggttccagaagattgacaagatgaaggactccaacaggcagtccaagcagctggaagaactcactgggaagatgagggagtgcaagcgcttaatcaaggaatttgatcgtgtactcaaagatgaggagaaaagcaatacttctgaggtcaacaaacagctaaatgacaagaagcaatttatgatcaaggagttgaattcttatgtcaccatgaggaagacgtaccaaagtagccttggtaataagaggatcgaactattcgatgctggtaatgaccaggtagctgaagataacgttcaaatggcatcagaaatgtcaaatcaacaactgattgattctggaatgaaacaaatggaccaaacagaccaagctattgagcgttcgaaaatggttgttgcacaaactgttgatgttggagctcaaactgctacaactctaacacagcaaactgaccaaatgaagagaattggcaatgagctagattccgttcacttctcattgaagaaagctagtcaaatggtgaaagagattggtcgtcaggttgcaactgacaaatgcatcatggggtttctgtttttgatagtttgtggtgtgattgcgatcattgttgtcaagatcgtcaacccgcataacaagagcatcccagacatcccgggactggcgcctcctgcacctcctgcgcagaaccggaagctgctatccgtagatcctttcagaatgctctgagcattcgggaatggaagtctcgtgccatgcaggtctctcgctctgaagccaaaacacacgatgtcaactgttccattggtgcttgcttgtacattatacccgtatgtaattttctttgattggttcattctttccacactggttgctgttagcttcggattgttagtagcacttcggttgtgtggtgtttaaattgcctggctttcttggttgtgtacatgcgttagtggtgaccagtgagagttatgcgattaatgtttgctcgtataccttcctaaaaccagccgattctattcattatgagaatgtgaatgttggccatccattatcctggccttgtg

SEQ ID NO: 15119 - protein, 316 aa, Triticum aestivum
  peptide (1)..(316): Ceres Seq. ID no. 13597534
  misc_feature (125)..(259): Pfam Name: Pfam Description:  Vesicle transport v-SNARE protein
  misc_feature (50)..(316): NCBI GI NO: 23237830 NR Description: contains ESTs C19491
  misc_feature (50)..(316): NCBI GI NO: 34896946 NR Description: putative vesicle soluble NSF attachment proteinreceptor
  misc_feature (50)..(308): NCBI GI NO: 18401508 NR Description: expressed protein [Arabidopsis thaliana]
  misc_feature (50)..(308): NCBI GI NO: 21536876 NR Description: unknown [Arabidopsis thaliana]
  misc_feature (50)..(308): NCBI GI NO: 22330102 NR Description: expressed protein [Arabidopsis thaliana]
  misc_feature (55)..(308): NCBI GI NO: 18403771 NR Description: expressed protein [Arabidopsis thaliana]
  misc_feature (55)..(308): NCBI GI NO: 27805643 NR Description: Novel plant SNARE 11 (AtNPSN11)
  misc_feature (55)..(308): NCBI GI NO: 25370780 NR Description: hypothetical protein At2g35190
  misc_feature (60)..(308): NCBI GI NO: 25370781 NR Description: F11A17.20 [imported] - Arabidopsis thaliana
  misc_feature (50)..(260): NCBI GI NO: 25370781 NR Description: F11A17.20 [imported] - Arabidopsis thaliana
NQTQRLRSPHQPLPLAPTAALLASTGRAAPPATGRIPLGGGGDPAAAMAASDVPMSPELEQVDGEIQDIFRALHNGFQKIDKMKDSNRQSKQLEELTGKMRECKRLIKEFDRVLKDEEKSNTSEVNKQLNDKKQFMIKELNSYVTMRKTYQSSLGNKRIELFDAGNDQVAEDNVQMASEMSNQQLIDSGMKQMDQTDQAIERSKMVVAQTVDVGAQTATTLTQQTDQMKRIGNELDSVHFSLKKASQMVKEIGRQVATDKCIMGFLFLIVCGVIAIIVVKIVNPHNKSIPDIPGLAPPAPPAQNRKLLSVDPFRML

SEQ ID NO: 15120 - protein, 269 aa, Triticum aestivum
  peptide (1)..(269): Ceres Seq. ID no. 13597535
  misc_feature (78)..(212): Pfam Name: Pfam Description:  Vesicle transport v-SNARE protein
  misc_feature (3)..(269): NCBI GI NO: 23237830 NR Description: contains ESTs C19491
  misc_feature (3)..(269): NCBI GI NO: 34896946 NR Description: putative vesicle soluble NSF attachment proteinreceptor
  misc_feature (3)..(261): NCBI GI NO: 18401508 NR Description: expressed protein [Arabidopsis thaliana]
  misc_feature (3)..(261): NCBI GI NO: 21536876 NR Description: unknown [Arabidopsis thaliana]
  misc_feature (3)..(261): NCBI GI NO: 22330102 NR Description: expressed protein [Arabidopsis thaliana]
  misc_feature (8)..(261): NCBI GI NO: 18403771 NR Description: expressed protein [Arabidopsis thaliana]
  misc_feature (8)..(261): NCBI GI NO: 27805643 NR Description: Novel plant SNARE 11 (AtNPSN11)
  misc_feature (8)..(261): NCBI GI NO: 25370780 NR Description: hypothetical protein At2g35190
  misc_feature (13)..(261): NCBI GI NO: 25370781 NR Description: F11A17.20 [imported] - Arabidopsis thaliana
  misc_feature (3)..(213): NCBI GI NO: 25370781 NR Description: F11A17.20 [imported] - Arabidopsis thaliana
MAASDVPMSPELEQVDGEIQDIFRALHNGFQKIDKMKDSNRQSKQLEELTGKMRECKRLIKEFDRVLKDEEKSNTSEVNKQLNDKKQFMIKELNSYVTMRKTYQSSLGNKRIELFDAGNDQVAEDNVQMASEMSNQQLIDSGMKQMDQTDQAIERSKMVVAQTVDVGAQTATTLTQQTDQMKRIGNELDSVHFSLKKASQMVKEIGRQVATDKCIMGFLFLIVCGVIAIIVVKIVNPHNKSIPDIPGLAPPAPPAQNRKLLSVDPFRML

SEQ ID NO: 15121 - protein, 262 aa, Triticum aestivum
  peptide (1)..(262): Ceres Seq. ID no. 13597536
  misc_feature (71)..(205): Pfam Name: Pfam Description:  Vesicle transport v-SNARE protein
  misc_feature (1)..(262): NCBI GI NO: 23237830 NR Description: contains ESTs C19491
  misc_feature (1)..(262): NCBI GI NO: 34896946 NR Description: putative vesicle soluble NSF attachment proteinreceptor
  misc_feature (1)..(254): NCBI GI NO: 18401508 NR Description: expressed protein [Arabidopsis thaliana]
  misc_feature (1)..(254): NCBI GI NO: 21536876 NR Description: unknown [Arabidopsis thaliana]
  misc_feature (1)..(254): NCBI GI NO: 22330102 NR Description: expressed protein [Arabidopsis thaliana]
  misc_feature (1)..(254): NCBI GI NO: 18403771 NR Description: expressed protein [Arabidopsis thaliana]
  misc_feature (1)..(254): NCBI GI NO: 27805643 NR Description: Novel plant SNARE 11 (AtNPSN11)
  misc_feature (1)..(254): NCBI GI NO: 25370780 NR Description: hypothetical protein At2g35190
  misc_feature (6)..(254): NCBI GI NO: 25370781 NR Description: F11A17.20 [imported] - Arabidopsis thaliana
  misc_feature (1)..(206): NCBI GI NO: 25370781 NR Description: F11A17.20 [imported] - Arabidopsis thaliana
MSPELEQVDGEIQDIFRALHNGFQKIDKMKDSNRQSKQLEELTGKMRECKRLIKEFDRVLKDEEKSNTSEVNKQLNDKKQFMIKELNSYVTMRKTYQSSLGNKRIELFDAGNDQVAEDNVQMASEMSNQQLIDSGMKQMDQTDQAIERSKMVVAQTVDVGAQTATTLTQQTDQMKRIGNELDSVHFSLKKASQMVKEIGRQVATDKCIMGFLFLIVCGVIAIIVVKIVNPHNKSIPDIPGLAPPAPPAQNRKLLSVDPFRML

SEQ ID NO: 15122 - DNA, 1053 bp, Triticum aestivum
  misc_feature (1)..(1053): Ceres Seq. ID no. 12586495
atatcaaatcagtcatacactatcattgttctcctttccatttcctatataagcacgcacctcacacgcttcttctccacccatccgaaaccacacccactagctcccagctgcagcaagcaagccaaacttgtgcgtgtgagtgagtgagcgagagctcagggaaaccaccctacaaagctccggctgagccacccaaccggccggcgacgatgccgatgctcatccccgacgacgtgcgcgccaaggcggagatctacaccggcgacgcagcggggcaggagaagacgcggctgatgctggctgacacggagcttcccagcggtctcctgccgctcaaggacatcatcgagtgcgggtacgtggaggagaccggcttcgtgtggctcaagcagaagaagcgggtggaccactacttcgtcaaggccggccgccatgtctcctacgccaccgaggtctccgccatcgccgagaagggccgcctgaagaagatctccggcgtcaaggccaaggagatgctcatctgggtcaacctccacgagatctgcgtcgacgacccgcccaccggcaagctccactgcaaggccatcggcggcctctcccgcagcttccccgtggaggcattcgaggccaccgacgacctgcccgtgcccgtcaccggacgtctcaagaagaagacagagaaagagagcaccgacaagaaagacgagaagaaggaggcagcagagaagccgaaggaggaggcagcagagaagcccaagggggcctccgtcgcccccgcccccgccgccgtcgacgagatcggtcagaaaatgaaggagatgaacacggaagcggtggcagccaagaactgatcggtggcggcgatggcgacggcggcacgtcatgatcggttacctagtcataaatttgtttcagaataacgcattgcattagcatgtcatcaaccacccacacatatgtatcacctgatccatcgatgagagttcagttcgacaacgatgtaatttcctcctgccttttttctggttttaatgtgatgaaatttaatgc

SEQ ID NO: 15123 - protein, 213 aa, Triticum aestivum
  peptide (1)..(213): Ceres Seq. ID no. 12586496
  misc_feature (4)..(149): Pfam Name: Pfam Description:  Protein of unknown function, DUF538
  misc_feature (4)..(181): NCBI GI NO: 18391006 NR Description: expressed protein; protein id: At1g09310
  misc_feature (4)..(165): NCBI GI NO: 18405887 NR Description: expressed protein; protein id: At1g56580
  misc_feature (10)..(140): NCBI GI NO: 34911878 NR Description: OSJNBb0032K15.16
  misc_feature (10)..(143): NCBI GI NO: 34903866 NR Description: unnamed protein product
  misc_feature (10)..(138): NCBI GI NO: 34915410 NR Description: hypothetical protein~similar to Arabidopsisthaliana chromosome1
  misc_feature (10)..(138): NCBI GI NO: 33146557 NR Description: unknown protein
  misc_feature (10)..(138): NCBI GI NO: 34915418 NR Description: hypothetical protein~similar to Arabidopsisthaliana chromosome1
  misc_feature (10)..(138): NCBI GI NO: 34915430 NR Description: hypothetical protein~similar to Arabidopsisthaliana chromosome3
MPMLIPDDVRAKAEIYTGDAAGQEKTRLMLADTELPSGLLPLKDIIECGYVEETGFVWLKQKKRVDHYFVKAGRHVSYATEVSAIAEKGRLKKISGVKAKEMLIWVNLHEICVDDPPTGKLHCKAIGGLSRSFPVEAFEATDDLPVPVTGRLKKKTEKESTDKKDEKKEAAEKPKEEAAEKPKGASVAPAPAAVDEIGQKMKEMNTEAVAAKN

SEQ ID NO: 15124 - protein, 211 aa, Triticum aestivum
  peptide (1)..(211): Ceres Seq. ID no. 12586497
  misc_feature (2)..(147): Pfam Name: Pfam Description:  Protein of unknown function, DUF538
  misc_feature (2)..(179): NCBI GI NO: 18391006 NR Description: expressed protein; protein id: At1g09310
  misc_feature (2)..(163): NCBI GI NO: 18405887 NR Description: expressed protein; protein id: At1g56580
  misc_feature (8)..(138): NCBI GI NO: 34911878 NR Description: OSJNBb0032K15.16
  misc_feature (8)..(141): NCBI GI NO: 34903866 NR Description: unnamed protein product
  misc_feature (8)..(136): NCBI GI NO: 34915410 NR Description: hypothetical protein~similar to Arabidopsisthaliana chromosome1
  misc_feature (8)..(136): NCBI GI NO: 33146557 NR Description: unknown protein
  misc_feature (8)..(136): NCBI GI NO: 34915418 NR Description: hypothetical protein~similar to Arabidopsisthaliana chromosome1
  misc_feature (8)..(136): NCBI GI NO: 34915430 NR Description: hypothetical protein~similar to Arabidopsisthaliana chromosome3
MLIPDDVRAKAEIYTGDAAGQEKTRLMLADTELPSGLLPLKDIIECGYVEETGFVWLKQKKRVDHYFVKAGRHVSYATEVSAIAEKGRLKKISGVKAKEMLIWVNLHEICVDDPPTGKLHCKAIGGLSRSFPVEAFEATDDLPVPVTGRLKKKTEKESTDKKDEKKEAAEKPKEEAAEKPKGASVAPAPAAVDEIGQKMKEMNTEAVAAKN

SEQ ID NO: 15125 - protein, 185 aa, Triticum aestivum
  peptide (1)..(185): Ceres Seq. ID no. 12586498
  misc_feature (1)..(121): Pfam Name: Pfam Description:  Protein of unknown function, DUF538
  misc_feature (1)..(153): NCBI GI NO: 18391006 NR Description: expressed protein; protein id: At1g09310
  misc_feature (1)..(137): NCBI GI NO: 18405887 NR Description: expressed protein; protein id: At1g56580
  misc_feature (1)..(112): NCBI GI NO: 34911878 NR Description: OSJNBb0032K15.16
  misc_feature (1)..(115): NCBI GI NO: 34903866 NR Description: unnamed protein product
  misc_feature (1)..(110): NCBI GI NO: 34915410 NR Description: hypothetical protein~similar to Arabidopsisthaliana chromosome1
  misc_feature (1)..(110): NCBI GI NO: 33146557 NR Description: unknown protein
  misc_feature (1)..(110): NCBI GI NO: 34915418 NR Description: hypothetical protein~similar to Arabidopsisthaliana chromosome1
  misc_feature (1)..(110): NCBI GI NO: 34915430 NR Description: hypothetical protein~similar to Arabidopsisthaliana chromosome3
MLADTELPSGLLPLKDIIECGYVEETGFVWLKQKKRVDHYFVKAGRHVSYATEVSAIAEKGRLKKISGVKAKEMLIWVNLHEICVDDPPTGKLHCKAIGGLSRSFPVEAFEATDDLPVPVTGRLKKKTEKESTDKKDEKKEAAEKPKEEAAEKPKGASVAPAPAAVDEIGQKMKEMNTEAVAAKN

SEQ ID NO: 15126 - DNA, 902 bp, Triticum aestivum
  misc_feature (1)..(902): Ceres Seq. ID no. 15227083
aaaaaaaaacacatgcgccgtaatggcccttaggtgcgcggccggcggcggcggcggcggcggcgcctacctgacgccgcggaggagcagatgctgcggcgtcggctctgcgcgaccctcagccacgaccagggggacacgagggctcagcctcctcctgaggatcccgtcctcacaatactccgaagctccatgggcgttgcgctgctcgcctgattcccctcctctggagggtgaccagcattcagatcgaactggggcgctgggggcgctgaaggccatggtgtgcgacatgttcaggcccctggcgcgcaacatctcggatatccgatcccttcgcactgtctttgacctcgaggattatcaagtcggcatgctgtttggtgcttttcttggctgcgtcgggtgctaccagctgtggaaggctgctccttccatctttgttgatgctgcccttgcctatgcattctataaactgagcgttatgtcctcggaggtgcgccggcagggcaaatgcaatgatttgctgactcgcttgaaatttggtattgtggttattatggctactaaggacttcaggaagaactatgaactcttggatattgtcaagatgcctgttttctttctttatctttcgacattcatctttgatgtggcacgcatgaagaaatatgcaaagcattatctgattctcacagttaatttattgagaatgaagggcggagctcaagaattgttcagaataatgttttatccgagctatacatctccatatgatgattgcttccgtaggaaataaaatgtagacccctgagattgtgtggatctgtttatgtgagatttttatataagaatttttagtataatgtgtaataacatttatgtaatgctagtttacttgc

SEQ ID NO: 15127 - protein, 265 aa, Triticum aestivum
  peptide (1)..(265): Ceres Seq. ID no. 15227084
  misc_feature (10)..(241): NCBI GI NO: 38344913 NR Description: OSJNBb0079B02.16
KKNTCAVMALRCAAGGGGGGGAYLTPRRSRCCGVGSARPSATTRGTRGLSLLLRIPSSQYSEAPWALRCSPDSPPLEGDQHSDRTGALGALKAMVCDMFRPLARNISDIRSLRTVFDLEDYQVGMLFGAFLGCVGCYQLWKAAPSIFVDAALAYAFYKLSVMSSEVRRQGKCNDLLTRLKFGIVVIMATKDFRKNYELLDIVKMPVFFLYLSTFIFDVARMKKYAKHYLILTVNLLRMKGGAQELFRIMFYPSYTSPYDDCFRRK

SEQ ID NO: 15128 - protein, 258 aa, Triticum aestivum
  peptide (1)..(258): Ceres Seq. ID no. 15227085
  misc_feature (3)..(234): NCBI GI NO: 38344913 NR Description: OSJNBb0079B02.16
MALRCAAGGGGGGGAYLTPRRSRCCGVGSARPSATTRGTRGLSLLLRIPSSQYSEAPWALRCSPDSPPLEGDQHSDRTGALGALKAMVCDMFRPLARNISDIRSLRTVFDLEDYQVGMLFGAFLGCVGCYQLWKAAPSIFVDAALAYAFYKLSVMSSEVRRQGKCNDLLTRLKFGIVVIMATKDFRKNYELLDIVKMPVFFLYLSTFIFDVARMKKYAKHYLILTVNLLRMKGGAQELFRIMFYPSYTSPYDDCFRRK

SEQ ID NO: 15129 - protein, 172 aa, Triticum aestivum
  peptide (1)..(172): Ceres Seq. ID no. 15227086
  misc_feature (1)..(148): NCBI GI NO: 38344913 NR Description: OSJNBb0079B02.16
MVCDMFRPLARNISDIRSLRTVFDLEDYQVGMLFGAFLGCVGCYQLWKAAPSIFVDAALAYAFYKLSVMSSEVRRQGKCNDLLTRLKFGIVVIMATKDFRKNYELLDIVKMPVFFLYLSTFIFDVARMKKYAKHYLILTVNLLRMKGGAQELFRIMFYPSYTSPYDDCFRRK

SEQ ID NO: 15130 - DNA, 1888 bp, Triticum aestivum
  misc_feature (1)..(1888): Ceres Seq. ID no. 13597865
tttcgttctttgggtgaattgtacccaacagcctcccaccccagtccccaccccgagcccgtgaaaccctagcgcattcgtacgccggcggcgatgtcgggctaccctttttacccgtacggccgcggtggcgtaggcgacgatgcgtcggcgatgtcggactacccttttcacccatacggccgtggtggggtaggcgacaatgcggcggcgaggtactcttcctacgagatcgacctcatcgcggcgcgctacgctggcgacccgtcatcctacccctacccctccgcctccggcggattcgacccgcatgtcggcgcgaggcgacccgcagatgttctctatcatcaatctattatgggaagccatagtactattgggcagagtgatgcattttattctccgaacactatggtcaaacgccctaggcttgaaagcagccttcctatttatccacagcgacctggggaaaaggagtgtgcwttctatatgaggaccagaacatgtaagtacgaagaaacctgcaaatttgaccatccacaatgggttccagagggcgggattccaaattggaaagagggtacaaaggctggggaatcctatcccgaacgtccaggggaaccaaattgtccttttyttgtaaagactggtgagtgtaagtttgggtctaaatgcaagttcamccatccaaagaaaaaggatgmcggaacagtggctggwccaggcgataaagagtctctattttctgctaattctaccttaccggtgaagccttctgakccttgtccggagtctstaatttctggtaattctaccttaccggtgaagccttctaaaccttgtccgcwctatgcaaaaggcaaatgcaaattaggaacaaattgtaagttcattcatgcaaaggatatggagccaccttcmrgtggtggaaatgaatctgaaaatacagcamctgctgaagcagcagggcaccatggygcagtgcatgattcagtttcagcawagaagytagcaccagttgctctggagcataactcaaagggcatgcctataagaccaggtgaagttgattgctcattttatattmmsmcskscagytscadytgtatgtgtwtrrwagaacatgtcggttcaaccatcctgaacgacatattcaagcatctgttgtccctggcgagatgctaaatccagctgtgaaattcctgccgagctttgattttcgcgtgacacatgtgccgattgaacctgagccaatcacctaccctcagaggcctggagaaactgtttgtgatttctataagaagacaggattttgtaaattttctgaaaaatgcaagtttcaccatccagttgatcggtctgcacctgattccattgcaaagtgggagccgtctcagcaacctgtgacgcttactgttgctggctttccaaggagagaggatgctgaggcttgtgcctattacatgaagaccggcgcatgcaagtttggcgtccagtgcaagtttgaccacccgccccttggggaggccattgccaaggtttcgaagcatggagaaggaaaggaaggtggaaagaagaaggtggtaggactgagttatgtcctggaaaattagacccgctcaagttccccgtccccatttccattccgagcatgtttccgtcatcagacctgtggtatagtatagtggcagcagcactgcaggagataaagcagagcacgctctgcctgtgcgcggttggttaacgttgttactcgtcatggctttacttactagctgacctctgaatctggtgtaccgttggttcctcgcttgcgcgggatagtagcaatggatgtctggctggtgcagtcgccatgccgtggtagtaagggtccgtgatggctgcc

SEQ ID NO: 15131 - protein, 363 aa, Triticum aestivum
  peptide (1)..(363): Ceres Seq. ID no. 15222218
  misc_feature (175)..(200): Pfam Name: and similar Pfam Description: Zinc finger C-x8-C-x5-C-x3-H type
  misc_feature (168)..(351): NCBI GI NO: 34912676 NR Description: P0686E09.7
  misc_feature (19)..(162): NCBI GI NO: 34912676 NR Description: P0686E09.7
  misc_feature (37)..(230): NCBI GI NO: 22331028 NR Description: expressed protein [Arabidopsis thaliana]
  misc_feature (226)..(344): NCBI GI NO: 22331028 NR Description: expressed protein [Arabidopsis thaliana]
  misc_feature (77)..(230): NCBI GI NO: 22507458 NR Description: Unknown (protein for MGC:30371) [Mus musculus]
  misc_feature (240)..(354): NCBI GI NO: 22507458 NR Description: Unknown (protein for MGC:30371) [Mus musculus]
  misc_feature (146)..(230): NCBI GI NO: 12321969 NR Description: zinc finger protein, putative, 5' partial
  misc_feature (133)..(230): NCBI GI NO: 11994409 NR Description: zinc finger protein-like [Arabidopsis thaliana]
  misc_feature (119)..(268): NCBI GI NO: 22507458 NR Description: Unknown (protein for MGC:30371) [Mus musculus]
  misc_feature (120)..(286): NCBI GI NO: 11994409 NR Description: zinc finger protein-like [Arabidopsis thaliana]
  misc_feature (130)..(130): Xaa is any aa, unknown or other
  misc_feature (182)..(182): Xaa is any aa, unknown or other
  misc_feature (197)..(197): Xaa is any aa, unknown or other
  misc_feature (204)..(204): Xaa is any aa, unknown or other
  misc_feature (209)..(209): Xaa is any aa, unknown or other
  misc_feature (229)..(229): Xaa is any aa, unknown or other
  misc_feature (235)..(235): Xaa is any aa, unknown or other
  misc_feature (252)..(252): Xaa is any aa, unknown or other
  misc_feature (276)..(276): Xaa is any aa, unknown or other
  misc_feature (277)..(277): Xaa is any aa, unknown or other
  misc_feature (287)..(287): Xaa is any aa, unknown or other
  misc_feature (295)..(295): Xaa is any aa, unknown or other
  misc_feature (304)..(304): Xaa is any aa, unknown or other
  misc_feature (306)..(306): Xaa is any aa, unknown or other
  misc_feature (332)..(332): Xaa is any aa, unknown or other
  misc_feature (333)..(333): Xaa is any aa, unknown or other
  misc_feature (334)..(334): Xaa is any aa, unknown or other
  misc_feature (335)..(335): Xaa is any aa, unknown or other
  misc_feature (336)..(336): Xaa is any aa, unknown or other
  misc_feature (337)..(337): Xaa is any aa, unknown or other
  misc_feature (341)..(341): Xaa is any aa, unknown or other
  misc_feature (342)..(342): Xaa is any aa, unknown or other
MSGYPFYPYGRGGVGDDASAMSDYPFHPYGRGGVGDNAAARYSSYEIDLIAARYAGDPSSYPYPSASGGFDPHVGARRPADVLYHQSIMGSHSTIGQSDAFYSPNTMVKRPRLESSLPIYPQRPGEKECXFYMRTRTCKYEETCKFDHPQWVPEGGIPNWKEGTKAGESYPERPGEPNCPFXVKTGECKFGSKCKFXHPKKKDXGTVAXPGDKESLFSANSTLPVKPSXPCPESXISGNSTLPVKPSKPCPXYAKGKCKLGTNCKFIHAKDMEPPXXGGNESENTAXAEAAGHHXAVHDSVSAXKXAPVALEHNSKGMPIRPGEVDCSFYIXXXXXXCMCXXEHVGSTILNDIFKHLLSLARC

SEQ ID NO: 15132 - protein, 343 aa, Triticum aestivum
  peptide (1)..(343): Ceres Seq. ID no. 15222219
  misc_feature (155)..(180): Pfam Name: and similar Pfam Description: Zinc finger C-x8-C-x5-C-x3-H type
  misc_feature (148)..(331): NCBI GI NO: 34912676 NR Description: P0686E09.7
  misc_feature (1)..(142): NCBI GI NO: 34912676 NR Description: P0686E09.7
  misc_feature (17)..(210): NCBI GI NO: 22331028 NR Description: expressed protein [Arabidopsis thaliana]
  misc_feature (206)..(324): NCBI GI NO: 22331028 NR Description: expressed protein [Arabidopsis thaliana]
  misc_feature (57)..(210): NCBI GI NO: 22507458 NR Description: Unknown (protein for MGC:30371) [Mus musculus]
  misc_feature (220)..(334): NCBI GI NO: 22507458 NR Description: Unknown (protein for MGC:30371) [Mus musculus]
  misc_feature (126)..(210): NCBI GI NO: 12321969 NR Description: zinc finger protein, putative, 5' partial
  misc_feature (113)..(210): NCBI GI NO: 11994409 NR Description: zinc finger protein-like [Arabidopsis thaliana]
  misc_feature (99)..(248): NCBI GI NO: 22507458 NR Description: Unknown (protein for MGC:30371) [Mus musculus]
  misc_feature (100)..(266): NCBI GI NO: 11994409 NR Description: zinc finger protein-like [Arabidopsis thaliana]
  misc_feature (110)..(110): Xaa is any aa, unknown or other
  misc_feature (162)..(162): Xaa is any aa, unknown or other
  misc_feature (177)..(177): Xaa is any aa, unknown or other
  misc_feature (184)..(184): Xaa is any aa, unknown or other
  misc_feature (189)..(189): Xaa is any aa, unknown or other
  misc_feature (209)..(209): Xaa is any aa, unknown or other
  misc_feature (215)..(215): Xaa is any aa, unknown or other
  misc_feature (232)..(232): Xaa is any aa, unknown or other
  misc_feature (256)..(256): Xaa is any aa, unknown or other
  misc_feature (257)..(257): Xaa is any aa, unknown or other
  misc_feature (267)..(267): Xaa is any aa, unknown or other
  misc_feature (275)..(275): Xaa is any aa, unknown or other
  misc_feature (284)..(284): Xaa is any aa, unknown or other
  misc_feature (286)..(286): Xaa is any aa, unknown or other
  misc_feature (312)..(312): Xaa is any aa, unknown or other
  misc_feature (313)..(313): Xaa is any aa, unknown or other
  misc_feature (314)..(314): Xaa is any aa, unknown or other
  misc_feature (315)..(315): Xaa is any aa, unknown or other
  misc_feature (316)..(316): Xaa is any aa, unknown or other
  misc_feature (317)..(317): Xaa is any aa, unknown or other
  misc_feature (321)..(321): Xaa is any aa, unknown or other
  misc_feature (322)..(322): Xaa is any aa, unknown or other
MSDYPFHPYGRGGVGDNAAARYSSYEIDLIAARYAGDPSSYPYPSASGGFDPHVGARRPADVLYHQSIMGSHSTIGQSDAFYSPNTMVKRPRLESSLPIYPQRPGEKECXFYMRTRTCKYEETCKFDHPQWVPEGGIPNWKEGTKAGESYPERPGEPNCPFXVKTGECKFGSKCKFXHPKKKDXGTVAXPGDKESLFSANSTLPVKPSXPCPESXISGNSTLPVKPSKPCPXYAKGKCKLGTNCKFIHAKDMEPPXXGGNESENTAXAEAAGHHXAVHDSVSAXKXAPVALEHNSKGMPIRPGEVDCSFYIXXXXXXCMCXXEHVGSTILNDIFKHLLSLARC

SEQ ID NO: 15133 - protein, 275 aa, Triticum aestivum
  peptide (1)..(275): Ceres Seq. ID no. 15222220
  misc_feature (87)..(112): Pfam Name: and similar Pfam Description: Zinc finger C-x8-C-x5-C-x3-H type
  misc_feature (80)..(263): NCBI GI NO: 34912676 NR Description: P0686E09.7
  misc_feature (1)..(74): NCBI GI NO: 34912676 NR Description: P0686E09.7
  misc_feature (1)..(142): NCBI GI NO: 22331028 NR Description: expressed protein [Arabidopsis thaliana]
  misc_feature (138)..(256): NCBI GI NO: 22331028 NR Description: expressed protein [Arabidopsis thaliana]
  misc_feature (1)..(142): NCBI GI NO: 22507458 NR Description: Unknown (protein for MGC:30371) [Mus musculus]
  misc_feature (152)..(266): NCBI GI NO: 22507458 NR Description: Unknown (protein for MGC:30371) [Mus musculus]
  misc_feature (58)..(142): NCBI GI NO: 12321969 NR Description: zinc finger protein, putative, 5' partial
  misc_feature (45)..(142): NCBI GI NO: 11994409 NR Description: zinc finger protein-like [Arabidopsis thaliana]
  misc_feature (31)..(180): NCBI GI NO: 22507458 NR Description: Unknown (protein for MGC:30371) [Mus musculus]
  misc_feature (32)..(198): NCBI GI NO: 11994409 NR Description: zinc finger protein-like [Arabidopsis thaliana]
  misc_feature (42)..(42): Xaa is any aa, unknown or other
  misc_feature (94)..(94): Xaa is any aa, unknown or other
  misc_feature (109)..(109): Xaa is any aa, unknown or other
  misc_feature (116)..(116): Xaa is any aa, unknown or other
  misc_feature (121)..(121): Xaa is any aa, unknown or other
  misc_feature (141)..(141): Xaa is any aa, unknown or other
  misc_feature (147)..(147): Xaa is any aa, unknown or other
  misc_feature (164)..(164): Xaa is any aa, unknown or other
  misc_feature (188)..(188): Xaa is any aa, unknown or other
  misc_feature (189)..(189): Xaa is any aa, unknown or other
  misc_feature (199)..(199): Xaa is any aa, unknown or other
  misc_feature (207)..(207): Xaa is any aa, unknown or other
  misc_feature (216)..(216): Xaa is any aa, unknown or other
  misc_feature (218)..(218): Xaa is any aa, unknown or other
  misc_feature (244)..(244): Xaa is any aa, unknown or other
  misc_feature (245)..(245): Xaa is any aa, unknown or other
  misc_feature (246)..(246): Xaa is any aa, unknown or other
  misc_feature (247)..(247): Xaa is any aa, unknown or other
  misc_feature (248)..(248): Xaa is any aa, unknown or other
  misc_feature (249)..(249): Xaa is any aa, unknown or other
  misc_feature (253)..(253): Xaa is any aa, unknown or other
  misc_feature (254)..(254): Xaa is any aa, unknown or other
MGSHSTIGQSDAFYSPNTMVKRPRLESSLPIYPQRPGEKECXFYMRTRTCKYEETCKFDHPQWVPEGGIPNWKEGTKAGESYPERPGEPNCPFXVKTGECKFGSKCKFXHPKKKDXGTVAXPGDKESLFSANSTLPVKPSXPCPESXISGNSTLPVKPSKPCPXYAKGKCKLGTNCKFIHAKDMEPPXXGGNESENTAXAEAAGHHXAVHDSVSAXKXAPVALEHNSKGMPIRPGEVDCSFYIXXXXXXCMCXXEHVGSTILNDIFKHLLSLARC

SEQ ID NO: 15134 - DNA, 1242 bp, Triticum aestivum
  misc_feature (1)..(1242): Ceres Seq. ID no. 12586696
cgttcgtcagctcgctcaggcgcagcgcggctaaggctgcagcttcctttcctgctggggccagggggctcgttttcagctttctaaactgcgtctgtcttcaaaggggttttgggtgagagagacacccttcgtgtgcttccggtggtggagaagaagagttggcgcgtgccatgtcgcggtcgcgcacggtgcgtatctactgggacgatcccgacgtgacggactcgtccagcgaggacgacgagggctgcgccgctcggagggtgggaaggatggtgcgggagcttccgccggccccggcgccgctggtgcaggcggcggcggcggctccttcaccggagcagtgcagcgcgggagacgacgacctgccaaggcgtgttggtggatgtacccgtgcgcggaagaggctggccaagggcggcggctccgctgcgcagagcaccaagttccgcggcgtcaggcggcggccgtggggcaagtacgcggcggagatccgcgacccgtggcgcggcgtgcgcgtctggctcggcactttcgacaccgccgaggaggccgcgcgcgtgtacgacaacgcggccattcagctccgcggcgccaccgcgacgaccaacttctccacctcctccacgaattcggagggcgcccaggaggacctgacggcggccgggtacgagtccggcgcggagtcctcgcaggcggtgtcgtccccgacgtccgtgctccgcaaggtgccgtcgatgtcgtccttggcggaggacaggggcgactcggaggcctgtcaaggcgacgccgctgccggcagcagcctcagcgttccggaggagctgggcgagttcgtgccgttcgaggacgcgccggtctactccagcagcagcttctgggacttcgagccgcagtcggggttcctctacgccgagccgtcctcagccgaggaggcctcgtgggacgcgtccgccggcggcgagccgtgggccgcgccggtgcaggagaacgactacttccaggatttgcgcgacctgttcccgctcaaccagcttcccgcgattttctagatgggagcggcggagcttgcttccctatcttttttggtgtatgtcgagactcgagagtattttgtcgtgtacgtgtggtgtgtccccgtgtatttgtaacatgtccgtgtgcgttgctgctgtctgtgttgagtcgacgagaagaggaatgtacgatccgggtagagttttcactgctgtgctgggt

SEQ ID NO: 15135 - protein, 293 aa, Triticum aestivum
  peptide (1)..(293): Ceres Seq. ID no. 12586697
  misc_feature (90)..(155): Pfam Name: Pfam Description:  AP2 domain
  misc_feature (1)..(293): NCBI GI NO: 34911974 NR Description: P0694A04.17
  misc_feature (1)..(293): NCBI GI NO: 33087077 NR Description: TSI-1-like protein
  misc_feature (7)..(194): NCBI GI NO: 34904146 NR Description: unnamed protein product
  misc_feature (1)..(216): NCBI GI NO: 34898320 NR Description: Similar to Nicotiana tabacum mRNA for ERF1
  misc_feature (1)..(184): NCBI GI NO: 15238705 NR Description: putative protein; protein id: At5g53290.1
  misc_feature (4)..(184): NCBI GI NO: 15234337 NR Description: putative protein; protein id: At4g27950.1
  misc_feature (3)..(185): NCBI GI NO: 15236595 NR Description: putative Ap2 domain protein; protein id:At4g23750
  misc_feature (3)..(185): NCBI GI NO: 22655200 NR Description: putative Ap2 domain protein [Arabidopsis thaliana]
  misc_feature (92)..(284): NCBI GI NO: 15237053 NR Description: putative Ap2 domain protein; protein id:At4g11140
  misc_feature (5)..(185): NCBI GI NO: 15225959 NR Description: putative AP2 domain transcription factor
MSRSRTVRIYWDDPDVTDSSSEDDEGCAARRVGRMVRELPPAPAPLVQAAAAAPSPEQCSAGDDDLPRRVGGCTRARKRLAKGGGSAAQSTKFRGVRRRPWGKYAAEIRDPWRGVRVWLGTFDTAEEAARVYDNAAIQLRGATATTNFSTSSTNSEGAQEDLTAAGYESGAESSQAVSSPTSVLRKVPSMSSLAEDRGDSEACQGDAAAGSSLSVPEELGEFVPFEDAPVYSSSSFWDFEPQSGFLYAEPSSAEEASWDASAGGEPWAAPVQENDYFQDLRDLFPLNQLPAIF

SEQ ID NO: 15136 - protein, 284 aa, Triticum aestivum
  peptide (1)..(284): Ceres Seq. ID no. 12586698
MYPCAEEAGQGRRLRCAEHQVPRRQAAAVGQVRGGDPRPVARRARLARHFRHRRGGRARVRQRGHSAPRRHRDDQLLHLLHEFGGRPGGPDGGRVRVRRGVLAGGVVPDVRAPQGAVDVVLGGGQGRLGGLSRRRRCRQQPQRSGGAGRVRAVRGRAGLLQQQLLGLRAAVGVPLRRAVLSRGGLVGRVRRRRAVGRAGAGERLLPGFARPVPAQPASRDFLDGSGGACFPIFFGVCRDSRVFCRVRVVCPRVFVTCPCALLLSVLSRREEECTIRVEFSLLCW

SEQ ID NO: 15137 - protein, 259 aa, Triticum aestivum
  peptide (1)..(259): Ceres Seq. ID no. 12586699
  misc_feature (56)..(121): Pfam Name: Pfam Description:  AP2 domain
  misc_feature (1)..(259): NCBI GI NO: 34911974 NR Description: P0694A04.17
  misc_feature (1)..(259): NCBI GI NO: 33087077 NR Description: TSI-1-like protein
  misc_feature (1)..(160): NCBI GI NO: 34904146 NR Description: unnamed protein product
  misc_feature (1)..(182): NCBI GI NO: 34898320 NR Description: Similar to Nicotiana tabacum mRNA for ERF1
  misc_feature (1)..(150): NCBI GI NO: 15238705 NR Description: putative protein; protein id: At5g53290.1
  misc_feature (1)..(150): NCBI GI NO: 15234337 NR Description: putative protein; protein id: At4g27950.1
  misc_feature (1)..(151): NCBI GI NO: 15236595 NR Description: putative Ap2 domain protein; protein id:At4g23750
  misc_feature (1)..(151): NCBI GI NO: 22655200 NR Description: putative Ap2 domain protein [Arabidopsis thaliana]
  misc_feature (58)..(250): NCBI GI NO: 15237053 NR Description: putative Ap2 domain protein; protein id:At4g11140
  misc_feature (1)..(151): NCBI GI NO: 15225959 NR Description: putative AP2 domain transcription factor
MVRELPPAPAPLVQAAAAAPSPEQCSAGDDDLPRRVGGCTRARKRLAKGGGSAAQSTKFRGVRRRPWGKYAAEIRDPWRGVRVWLGTFDTAEEAARVYDNAAIQLRGATATTNFSTSSTNSEGAQEDLTAAGYESGAESSQAVSSPTSVLRKVPSMSSLAEDRGDSEACQGDAAAGSSLSVPEELGEFVPFEDAPVYSSSSFWDFEPQSGFLYAEPSSAEEASWDASAGGEPWAAPVQENDYFQDLRDLFPLNQLPAIF

SEQ ID NO: 15138 - DNA, 1476 bp, Triticum aestivum
  misc_feature (1)..(1476): Ceres Seq. ID no. 13597537
atgtcgctaccaatcactagcgtctcccgagcccaccaggacccgacccagatcttgccgttggcagctcaactcccgtgtaggtgagccggctactcccctcccacccccaccacccgagagtacacggcgcctcttcttcaaaagccctccctttttgttttctcggcgctcctcgggggttttggtccgccgaggaggggtttggtgcgcccggtaccggagaatcttggcgagaagtgcctagtttccgctaggctggttggtgggaggcgggtgcctggtgccgcggcttcagccatggaggcagtcgcaatgtcgccgtcctccgtctcgtcccacaacctcgacgccgcctccaccagcgacgacatgccgtcctcgcaagagggcctcctcttctcggacagcctcaaggacttgaggaatctgcggtcgcagctatactcagcggcagaatattttgaagtattctacacaaacaactcgcacagatctacggtggtgacgagtttaaaagactacgcagttgaggcactcgttagcacggttgaccatcttggctttgtgtcgtacaaggtggataatctcgtcaatgaaaaggctgacgaggttaatgaaacagaatttcgagtatcgtcggttgaacagagggtaaagatttgccggcaggcaattgaccaggagggaagatctcaacagtctcttcttatcagggcgccgcagtaccacaggcgttacatattaccaggcgtagatatagtggaatccgctatccatccagtttcagagcccacacggtacagcaggcaacatacgggtcgcaaaatgcgcaagtctcagtctaccatgtccactccagttagtaggcagacaacgatgaggagtgtccgttcacggtctccagcagttcgtgaaacacatcatcgatcacgatccatgtcgccgtctcgaaaagcgcgagctaaatcaccatcaccccaagtcgtgaacttgaatccgaaagaaacaagagcaggttcgccaataccaactattcccattcccctggcgcgatctgctacagttgcaagaagaccacctctggatccaaagcattttagacaaacctcgatgcaggtgcagtccgactatgaacaccagaaagagcgggagaaaagatcaagcaaaggcaggggcttcctcaagtcgctgctcacaagacgccggtggaggaatgacgagtcgctctacaattacttggacgagtactgatcgctgaaatgtcttagaccttgttccttgttgaccaatctcgttccttcatacatatgatgttcgagatctcagaccaaatctcattccttcatacatatagcttgtgtgtcatttccatgtgtttatagatacaatgcagacagaaacaccaccagtggtgctcatggcgttgcgcaagcgcatgacggatgaagcaaccaaatacagagcagcttccgt

SEQ ID NO: 15139 - protein, 317 aa, Triticum aestivum
  peptide (1)..(317): Ceres Seq. ID no. 15222125
  misc_feature (1)..(274): NCBI GI NO: 34904432 NR Description: unnamed protein product
  misc_feature (19)..(317): NCBI GI NO: 15229112 NR Description: expressed protein [Arabidopsis thaliana]
  misc_feature (165)..(317): NCBI GI NO: 10177091 NR Description: emb|CAB66408
  misc_feature (19)..(154): NCBI GI NO: 10177091 NR Description: emb|CAB66408
  misc_feature (19)..(317): NCBI GI NO: 30689382 NR Description: expressed protein [Arabidopsis thaliana]
  misc_feature (18)..(236): NCBI GI NO: 34913914 NR Description: OSJNBa0066C06.8
  misc_feature (265)..(317): NCBI GI NO: 34913914 NR Description: OSJNBa0066C06.8
  misc_feature (6)..(258): NCBI GI NO: 21618229 NR Description: unknown [Arabidopsis thaliana]
  misc_feature (6)..(256): NCBI GI NO: 15238265 NR Description: expressed protein [Arabidopsis thaliana]
  misc_feature (19)..(247): NCBI GI NO: 18407012 NR Description: expressed protein [Arabidopsis thaliana]
MEAVAMSPSSVSSHNLDAASTSDDMPSSQEGLLFSDSLKDLRNLRSQLYSAAEYFEVFYTNNSHRSTVVTSLKDYAVEALVSTVDHLGFVSYKVDNLVNEKADEVNETEFRVSSVEQRVKICRQAIDQEGRSQQSLLIRAPQYHRRYILPGVDIVESAIHPVSEPTRYSRQHTGRKMRKSQSTMSTPVSRQTTMRSVRSRSPAVRETHHRSRSMSPSRKARAKSPSPQVVNLNPKETRAGSPIPTIPIPLARSATVARRPPLDPKHFRQTSMQVQSDYEHQKEREKRSSKGRGFLKSLLTRRRWRNDESLYNYLDEY

SEQ ID NO: 15140 - protein, 312 aa, Triticum aestivum
  peptide (1)..(312): Ceres Seq. ID no. 15222126
  misc_feature (1)..(269): NCBI GI NO: 34904432 NR Description: unnamed protein product
  misc_feature (14)..(312): NCBI GI NO: 15229112 NR Description: expressed protein [Arabidopsis thaliana]
  misc_feature (160)..(312): NCBI GI NO: 10177091 NR Description: emb|CAB66408
  misc_feature (14)..(149): NCBI GI NO: 10177091 NR Description: emb|CAB66408
  misc_feature (14)..(312): NCBI GI NO: 30689382 NR Description: expressed protein [Arabidopsis thaliana]
  misc_feature (13)..(231): NCBI GI NO: 34913914 NR Description: OSJNBa0066C06.8
  misc_feature (260)..(312): NCBI GI NO: 34913914 NR Description: OSJNBa0066C06.8
  misc_feature (1)..(253): NCBI GI NO: 21618229 NR Description: unknown [Arabidopsis thaliana]
  misc_feature (1)..(251): NCBI GI NO: 15238265 NR Description: expressed protein [Arabidopsis thaliana]
  misc_feature (14)..(242): NCBI GI NO: 18407012 NR Description: expressed protein [Arabidopsis thaliana]
MSPSSVSSHNLDAASTSDDMPSSQEGLLFSDSLKDLRNLRSQLYSAAEYFEVFYTNNSHRSTVVTSLKDYAVEALVSTVDHLGFVSYKVDNLVNEKADEVNETEFRVSSVEQRVKICRQAIDQEGRSQQSLLIRAPQYHRRYILPGVDIVESAIHPVSEPTRYSRQHTGRKMRKSQSTMSTPVSRQTTMRSVRSRSPAVRETHHRSRSMSPSRKARAKSPSPQVVNLNPKETRAGSPIPTIPIPLARSATVARRPPLDPKHFRQTSMQVQSDYEHQKEREKRSSKGRGFLKSLLTRRRWRNDESLYNYLDEY

SEQ ID NO: 15141 - protein, 293 aa, Triticum aestivum
  peptide (1)..(293): Ceres Seq. ID no. 15222127
  misc_feature (1)..(250): NCBI GI NO: 34904432 NR Description: unnamed protein product
  misc_feature (1)..(293): NCBI GI NO: 15229112 NR Description: expressed protein [Arabidopsis thaliana]
  misc_feature (141)..(293): NCBI GI NO: 10177091 NR Description: emb|CAB66408
  misc_feature (1)..(130): NCBI GI NO: 10177091 NR Description: emb|CAB66408
  misc_feature (1)..(293): NCBI GI NO: 30689382 NR Description: expressed protein [Arabidopsis thaliana]
  misc_feature (1)..(212): NCBI GI NO: 34913914 NR Description: OSJNBa0066C06.8
  misc_feature (241)..(293): NCBI GI NO: 34913914 NR Description: OSJNBa0066C06.8
  misc_feature (1)..(234): NCBI GI NO: 21618229 NR Description: unknown [Arabidopsis thaliana]
  misc_feature (1)..(232): NCBI GI NO: 15238265 NR Description: expressed protein [Arabidopsis thaliana]
  misc_feature (1)..(223): NCBI GI NO: 18407012 NR Description: expressed protein [Arabidopsis thaliana]
MPSSQEGLLFSDSLKDLRNLRSQLYSAAEYFEVFYTNNSHRSTVVTSLKDYAVEALVSTVDHLGFVSYKVDNLVNEKADEVNETEFRVSSVEQRVKICRQAIDQEGRSQQSLLIRAPQYHRRYILPGVDIVESAIHPVSEPTRYSRQHTGRKMRKSQSTMSTPVSRQTTMRSVRSRSPAVRETHHRSRSMSPSRKARAKSPSPQVVNLNPKETRAGSPIPTIPIPLARSATVARRPPLDPKHFRQTSMQVQSDYEHQKEREKRSSKGRGFLKSLLTRRRWRNDESLYNYLDEY

SEQ ID NO: 15142 - DNA, 1383 bp, Triticum aestivum
  misc_feature (1)..(1383): Ceres Seq. ID no. 13597538
gaacatcctaatcgaaaacttctccggttgtgaggccccgtgctgcctcctcctctctgtctgtttctaccgacgccgccccagcccccgcgagagagaaaccctagcctagggttccacgcgccgccgccgccgccgccgacgtcgaccccgcctcgcccttcccccgagctcgccatggacgcgggccgcaagagggccgtgccggagggcgccaacggcggcgccgccgtcaagcgcgccagagaatcggagtcggttcaaacgggtgtaggaagcaaatcgaagccatgcaccaaatttttcagcactgctggttgtccctttggttcaagttgccattttctccataacttccctggaggtcaccaggctgtttcaaagatgaccaacttgggtggtccagctgtttcagctcctcaaggaagaatgcccatgggacctggtgttcctgatgggccacctacacccagcttgaagactcgcttgtgtaacaagtttaacacagcagaaggttgtaaatgggggaacaagtgtcattttgctcatggagagagggagctcggaaagcccatgctgttgaacaactcaatggcacctccaatgggaccaagacccaatggccacttccagcccccaccgatgcctggcccagacatggttcctccctcaacctttggcgcatcggccacagccaagatcagtgttgatgcatcccttgccggcgccattattgggaagggtggagtcaacacaaagcacatatccagaatgactggggccaagctggccatacgggataatgaggcagaccccaaccataaaaacattgagctcgaggggtcgtttgatcaggtcaaccatgccagtgcaatggtgaaagagctgattctccgcattggtggcaacgcccctcctcaagcaaagaacccagggagggggcctgcgggtggtggtgggggaagcaacttcaagaccaagctgtgcgacaacttcaacaaaggctcttgcacatttggagacagatgccacttcgcccatggtgagagtgaactgcgcaagtcggctgcggcttgagagatgcttttttttttatggcttttcatgattaatagtgattagcaaagcctgagctccaaatccgaggccattcacccatggtcatgttgagttgcataagcctgttgttgattgattgggagatactgtcatggcttcggtgtgatcagctcgctgtaactgatagatatccgagaatggatttgcttttgagatttattataggcttagtgtattgccgtcttttttctctctctgctccgcatccaatttttgtactgtttctaaggcattttaatatggcaaatttagcgattctattcc

SEQ ID NO: 15143 - protein, 299 aa, Triticum aestivum
  peptide (1)..(299): Ceres Seq. ID no. 13597539
  misc_feature (174)..(220): Pfam Name: Pfam Description:  KH domain
  misc_feature (4)..(299): NCBI GI NO: 5441893 NR Description: ESTs C99174
  misc_feature (101)..(296): NCBI GI NO: 9294110 NR Description: contains similarity to unknownprotein~dbj|BAA82391
  misc_feature (101)..(296): NCBI GI NO: 18399496 NR Description: KH domain/zinc finger protein
  misc_feature (101)..(299): NCBI GI NO: 15240145 NR Description: KH domain/zinc finger protein
  misc_feature (101)..(299): NCBI GI NO: 21555233 NR Description: unknown [Arabidopsis thaliana]
  misc_feature (1)..(90): NCBI GI NO: 18399496 NR Description: KH domain/zinc finger protein
  misc_feature (1)..(94): NCBI GI NO: 15240145 NR Description: KH domain/zinc finger protein
  misc_feature (1)..(94): NCBI GI NO: 21555233 NR Description: unknown [Arabidopsis thaliana]
  misc_feature (17)..(90): NCBI GI NO: 9294110 NR Description: contains similarity to unknownprotein~dbj|BAA82391
  misc_feature (1)..(125): NCBI GI NO: 15226988 NR Description: hypothetical protein [Arabidopsis thaliana]
MDAGRKRAVPEGANGGAAVKRARESESVQTGVGSKSKPCTKFFSTAGCPFGSSCHFLHNFPGGHQAVSKMTNLGGPAVSAPQGRMPMGPGVPDGPPTPSLKTRLCNKFNTAEGCKWGNKCHFAHGERELGKPMLLNNSMAPPMGPRPNGHFQPPPMPGPDMVPPSTFGASATAKISVDASLAGAIIGKGGVNTKHISRMTGAKLAIRDNEADPNHKNIELEGSFDQVNHASAMVKELILRIGGNAPPQAKNPGRGPAGGGGGSNFKTKLCDNFNKGSCTFGDRCHFAHGESELRKSAAA

SEQ ID NO: 15144 - protein, 230 aa, Triticum aestivum
  peptide (1)..(230): Ceres Seq. ID no. 13597540
  misc_feature (105)..(151): Pfam Name: Pfam Description:  KH domain
  misc_feature (1)..(230): NCBI GI NO: 5441893 NR Description: ESTs C99174
  misc_feature (32)..(227): NCBI GI NO: 9294110 NR Description: contains similarity to unknownprotein~dbj|BAA82391
  misc_feature (32)..(227): NCBI GI NO: 18399496 NR Description: KH domain/zinc finger protein
  misc_feature (32)..(230): NCBI GI NO: 15240145 NR Description: KH domain/zinc finger protein
  misc_feature (32)..(230): NCBI GI NO: 21555233 NR Description: unknown [Arabidopsis thaliana]
  misc_feature (1)..(21): NCBI GI NO: 18399496 NR Description: KH domain/zinc finger protein
  misc_feature (1)..(25): NCBI GI NO: 15240145 NR Description: KH domain/zinc finger protein
  misc_feature (1)..(25): NCBI GI NO: 21555233 NR Description: unknown [Arabidopsis thaliana]
  misc_feature (1)..(21): NCBI GI NO: 9294110 NR Description: contains similarity to unknownprotein~dbj|BAA82391
  misc_feature (1)..(56): NCBI GI NO: 15226988 NR Description: hypothetical protein [Arabidopsis thaliana]
MTNLGGPAVSAPQGRMPMGPGVPDGPPTPSLKTRLCNKFNTAEGCKWGNKCHFAHGERELGKPMLLNNSMAPPMGPRPNGHFQPPPMPGPDMVPPSTFGASATAKISVDASLAGAIIGKGGVNTKHISRMTGAKLAIRDNEADPNHKNIELEGSFDQVNHASAMVKELILRIGGNAPPQAKNPGRGPAGGGGGSNFKTKLCDNFNKGSCTFGDRCHFAHGESELRKSAAA

SEQ ID NO: 15145 - protein, 215 aa, Triticum aestivum
  peptide (1)..(215): Ceres Seq. ID no. 13597541
  misc_feature (90)..(136): Pfam Name: Pfam Description:  KH domain
  misc_feature (1)..(215): NCBI GI NO: 5441893 NR Description: ESTs C99174
  misc_feature (17)..(212): NCBI GI NO: 9294110 NR Description: contains similarity to unknownprotein~dbj|BAA82391
  misc_feature (17)..(212): NCBI GI NO: 18399496 NR Description: KH domain/zinc finger protein
  misc_feature (17)..(215): NCBI GI NO: 15240145 NR Description: KH domain/zinc finger protein
  misc_feature (17)..(215): NCBI GI NO: 21555233 NR Description: unknown [Arabidopsis thaliana]
  misc_feature (1)..(41): NCBI GI NO: 15226988 NR Description: hypothetical protein [Arabidopsis thaliana]
  misc_feature (1)..(47): NCBI GI NO: 34905220 NR Description: P0672D01.12
  misc_feature (1)..(61): NCBI GI NO: 15912259 NR Description: At1g32359/F27G20.10 [Arabidopsis thaliana]
  misc_feature (1)..(61): NCBI GI NO: 18398397 NR Description: MYB family transcription factor -related
  misc_feature (158)..(211): NCBI GI NO: 15912259 NR Description: At1g32359/F27G20.10 [Arabidopsis thaliana]
MPMGPGVPDGPPTPSLKTRLCNKFNTAEGCKWGNKCHFAHGERELGKPMLLNNSMAPPMGPRPNGHFQPPPMPGPDMVPPSTFGASATAKISVDASLAGAIIGKGGVNTKHISRMTGAKLAIRDNEADPNHKNIELEGSFDQVNHASAMVKELILRIGGNAPPQAKNPGRGPAGGGGGSNFKTKLCDNFNKGSCTFGDRCHFAHGESELRKSAAA

SEQ ID NO: 15146 - DNA, 1282 bp, Triticum aestivum
  misc_feature (1)..(1282): Ceres Seq. ID no. 13655896
aggaactcggagtattttggctctacaaagttcatcatcgagcacgcgatttccgtaaaagccacgtgttaagctttccaccaccagttcactcaccatagtccaacggaatctttcttccccctctactactagattgcctagagggtgctgactcgagtgcagtgtactgcgtttccttctcgtcgtcggtcttcttatctcatccccgactccgacgagcccaaccggcgacggatggcggcgacgaagctgagcagcgggcacgagatgccggccgtggggctcggcgtctggcggatggactccgccgccgtccgcggcctcatccactccgccctccgcgccggctaccgccacttcgactgcgccgctgactacaaaaacgaggctgaagttggcgatgcgctggcggaggcattccaaactgggcttgtcaagagggaggatcttttcatcactaccaagttgtggaactcagatcacggtcatgtggttgaagcctgcaaggatagcctgaagaagctgcgattggattatctagatctctaccttattcacttccctgtagctactaagcatactggagttggcacaactggcagtgctcttggtgatgatggtgtgcttgatatcgataccactatctcattggagacaacgtggcatgcaatggaagatcttgtttccatgggacttgttcgtagcataggaattagcaactacgacatattcctcaccagagactgcttggcgtacgccaagataaagcctgcggtcaaccaaatcgagacacacccttacttccagcgtgactctcttgtgaagttctgccagaagcacggaatctgcgtcaccgcacatacccccctgggtggctctaccgccaacaccgagtggttcggctcggtctcatgccttgacgaccctgtcatcaagtctctggctgagaaatacggcaagacgccggcgcagctggtcctccggtggggcctccagaggaacacagtggtcatccccaagacctccaaggtagagaggctggaggagaactttgcggtctccgacttcgacatctctggcgaggacatggagaagatcaaggcccttgaccgcaggtaccgcaccaaccagccggccaagttttggggcatcgacctctacgcttgattccactgcattatttgctacccggacaatagaatcaataatatgagagcttatcattaccttaaacgaacttgagttgtggatgatgtatttgcagcacgaccagtcacaa

SEQ ID NO: 15147 - protein, 310 aa, Triticum aestivum
  peptide (1)..(310): Ceres Seq. ID no. 13655897
  misc_feature (6)..(310): NCBI GI NO: 15226489 NR Description: mannose 6-phosphate reductase
  misc_feature (6)..(310): NCBI GI NO: 21592829 NR Description: putative NADPH dependent mannose 6-phosphatereductase
  misc_feature (6)..(310): NCBI GI NO: 10334991 NR Description: NADPH-dependent mannose 6-phosphate reductase
  misc_feature (6)..(310): NCBI GI NO: 15226502 NR Description: mannose 6-phosphate reductase
  misc_feature (6)..(310): NCBI GI NO: 21554266 NR Description: putative NADPH dependent mannose 6-phosphatereductase
  misc_feature (1)..(310): NCBI GI NO: 1835701 NR Description: NADPH-dependent mannose 6-phosphate reductase
  misc_feature (1)..(310): NCBI GI NO: 134153 NR Description: NADP-dependent D-sorbitol-6-phosphate dehydrogenase
  misc_feature (1)..(221): NCBI GI NO: 32400786 NR Description: NADPH-dependent mannose 6-phosphate reductase
  misc_feature (46)..(310): NCBI GI NO: 19310926 NR Description: NADP dependent sorbitol 6-phosphate dehydrogenase
  misc_feature (46)..(310): NCBI GI NO: 19310934 NR Description: NADP dependent sorbitol 6-phosphate dehydrogenase
MAATKLSSGHEMPAVGLGVWRMDSAAVRGLIHSALRAGYRHFDCAADYKNEAEVGDALAEAFQTGLVKREDLFITTKLWNSDHGHVVEACKDSLKKLRLDYLDLYLIHFPVATKHTGVGTTGSALGDDGVLDIDTTISLETTWHAMEDLVSMGLVRSIGISNYDIFLTRDCLAYAKIKPAVNQIETHPYFQRDSLVKFCQKHGICVTAHTPLGGSTANTEWFGSVSCLDDPVIKSLAEKYGKTPAQLVLRWGLQRNTVVIPKTSKVERLEENFAVSDFDISGEDMEKIKALDRRYRTNQPAKFWGIDLYA

SEQ ID NO: 15148 - protein, 299 aa, Triticum aestivum
  peptide (1)..(299): Ceres Seq. ID no. 13655898
  misc_feature (1)..(299): NCBI GI NO: 15226489 NR Description: mannose 6-phosphate reductase
  misc_feature (1)..(299): NCBI GI NO: 21592829 NR Description: putative NADPH dependent mannose 6-phosphatereductase
  misc_feature (1)..(299): NCBI GI NO: 10334991 NR Description: NADPH-dependent mannose 6-phosphate reductase
  misc_feature (1)..(299): NCBI GI NO: 15226502 NR Description: mannose 6-phosphate reductase
  misc_feature (1)..(299): NCBI GI NO: 21554266 NR Description: putative NADPH dependent mannose 6-phosphatereductase
  misc_feature (1)..(299): NCBI GI NO: 1835701 NR Description: NADPH-dependent mannose 6-phosphate reductase
  misc_feature (1)..(299): NCBI GI NO: 134153 NR Description: NADP-dependent D-sorbitol-6-phosphate dehydrogenase
  misc_feature (1)..(210): NCBI GI NO: 32400786 NR Description: NADPH-dependent mannose 6-phosphate reductase
  misc_feature (35)..(299): NCBI GI NO: 19310926 NR Description: NADP dependent sorbitol 6-phosphate dehydrogenase
  misc_feature (35)..(299): NCBI GI NO: 19310934 NR Description: NADP dependent sorbitol 6-phosphate dehydrogenase
MPAVGLGVWRMDSAAVRGLIHSALRAGYRHFDCAADYKNEAEVGDALAEAFQTGLVKREDLFITTKLWNSDHGHVVEACKDSLKKLRLDYLDLYLIHFPVATKHTGVGTTGSALGDDGVLDIDTTISLETTWHAMEDLVSMGLVRSIGISNYDIFLTRDCLAYAKIKPAVNQIETHPYFQRDSLVKFCQKHGICVTAHTPLGGSTANTEWFGSVSCLDDPVIKSLAEKYGKTPAQLVLRWGLQRNTVVIPKTSKVERLEENFAVSDFDISGEDMEKIKALDRRYRTNQPAKFWGIDLYA

SEQ ID NO: 15149 - protein, 289 aa, Triticum aestivum
  peptide (1)..(289): Ceres Seq. ID no. 13655899
  misc_feature (1)..(289): NCBI GI NO: 15226489 NR Description: mannose 6-phosphate reductase
  misc_feature (1)..(289): NCBI GI NO: 21592829 NR Description: putative NADPH dependent mannose 6-phosphatereductase
  misc_feature (1)..(289): NCBI GI NO: 10334991 NR Description: NADPH-dependent mannose 6-phosphate reductase
  misc_feature (1)..(289): NCBI GI NO: 15226502 NR Description: mannose 6-phosphate reductase
  misc_feature (1)..(289): NCBI GI NO: 21554266 NR Description: putative NADPH dependent mannose 6-phosphatereductase
  misc_feature (1)..(289): NCBI GI NO: 1835701 NR Description: NADPH-dependent mannose 6-phosphate reductase
  misc_feature (1)..(289): NCBI GI NO: 134153 NR Description: NADP-dependent D-sorbitol-6-phosphate dehydrogenase
  misc_feature (1)..(200): NCBI GI NO: 32400786 NR Description: NADPH-dependent mannose 6-phosphate reductase
  misc_feature (25)..(289): NCBI GI NO: 19310926 NR Description: NADP dependent sorbitol 6-phosphate dehydrogenase
  misc_feature (25)..(289): NCBI GI NO: 19310934 NR Description: NADP dependent sorbitol 6-phosphate dehydrogenase
MDSAAVRGLIHSALRAGYRHFDCAADYKNEAEVGDALAEAFQTGLVKREDLFITTKLWNSDHGHVVEACKDSLKKLRLDYLDLYLIHFPVATKHTGVGTTGSALGDDGVLDIDTTISLETTWHAMEDLVSMGLVRSIGISNYDIFLTRDCLAYAKIKPAVNQIETHPYFQRDSLVKFCQKHGICVTAHTPLGGSTANTEWFGSVSCLDDPVIKSLAEKYGKTPAQLVLRWGLQRNTVVIPKTSKVERLEENFAVSDFDISGEDMEKIKALDRRYRTNQPAKFWGIDLYA

SEQ ID NO: 15150 - DNA, 1407 bp, Triticum aestivum
  misc_feature (1)..(1407): Ceres Seq. ID no. 13597866
gcaagcaaccacccatggacacgcccgtgccgaaacggcctcgcctcgtgccagcaccggcaccggcgcctcggacaatcgccgacatggccccggagatcctcctccgcctccctccagacgaccccccgcgccttgtgcgcgcctcccttgtctgctggcgctggcgccgcctcctcaccgacccggcgtacctccgccgctaccgcgcattccatcgaacacctcccatgctcggcttcgtcctcaacctgaaacagcactaccaaggcatggcccagctcgtccccacctcctccttccgccccgctgcctccgaccgccccggcctgaatgtgctggacgcccgccacggccgcgtgctcctccacaccgctcagggccagcgcctcgtcgtctgggaccccgtcacgggtgaagagtgcaagatcccccgcgtgccgtcctacgcgctcggcttcaacgcggccgtgctctgcgccgcggtcggctgcgaccacctcgactgtcatggcggacccttccgtgtcgccttcgtgggatgcggcgaacgcggcatcacgttcgcctgcacctactcgtcggaggccggtgcctggagccagcgaattgagatcgagcagccggcgtttgttgacgggcgaccgagcgtccttgtggggaacacgctctacttcacctgcgacccgtacctcagtttcaaaatgttggggtacaacatcgtcacgcaggaactctcggtgatctggccgccgtcccagcatgagtactactcttgcactgtcctcgtgaaagcggatgatggcaagctggggttcgccggcgtgcagaatggcacgctctacctgtggtcgatgaaggacggcgccgacggatatgtggaatgggtgcagcgcagagttatccagcacaagacgatgctccgtactcgtggcctctcgacgccacctgaggtcgttggcttcgcggatggtcacggattcattttcgtgaggacaggcaacacggtgttctccatggatctcaagtcaggccatgtccgtaaagtatacacctgcaggtcaagaaactacgacgtcatcgttgttccctacatgagcttctgcactccagatcgtgctatgggcagactgccatcgccacgaggacccactgtcatcctgtaacaaggacttgctgctcttggcttgttgcatagatgacgctcaaagtattttgctttcaaggtggactgtttaagtagttaccatggtcaatgttggtatgtttagtttacagtgtggcagttgaaacaaggaaaaaagtaatatgtaatcacggtcagtttagtatgttctctttgcagttgtgaagcttaagcaagactgatggttaattagtagaaaaaaaaaaaaaaaaaagcttatc

SEQ ID NO: 15151 - protein, 387 aa, Triticum aestivum
  peptide (1)..(387): Ceres Seq. ID no. 13597867
  misc_feature (20)..(382): NCBI GI NO: 34915420 NR Description: contains EST C98814
  misc_feature (20)..(380): NCBI GI NO: 33146558 NR Description: unknown protein
  misc_feature (20)..(287): NCBI GI NO: 34915428 NR Description: hypothetical protein~similar to Oryza sativachromosome1
  misc_feature (318)..(382): NCBI GI NO: 34915428 NR Description: hypothetical protein~similar to Oryza sativachromosome1
  misc_feature (20)..(369): NCBI GI NO: 34915424 NR Description: hypothetical protein~similar to Oryza sativachromosome1
  misc_feature (20)..(377): NCBI GI NO: 34394503 NR Description: unknown protein
  misc_feature (23)..(370): NCBI GI NO: 34914028 NR Description: OJ1014_G12.29
  misc_feature (28)..(370): NCBI GI NO: 34394504 NR Description: unknown protein
  misc_feature (28)..(376): NCBI GI NO: 35215058 NR Description: hypothetical protein
  misc_feature (155)..(378): NCBI GI NO: 34394502 NR Description: hypothetical protein
KQPPMDTPVPKRPRLVPAPAPAPRTIADMAPEILLRLPPDDPPRLVRASLVCWRWRRLLTDPAYLRRYRAFHRTPPMLGFVLNLKQHYQGMAQLVPTSSFRPAASDRPGLNVLDARHGRVLLHTAQGQRLVVWDPVTGEECKIPRVPSYALGFNAAVLCAAVGCDHLDCHGGPFRVAFVGCGERGITFACTYSSEAGAWSQRIEIEQPAFVDGRPSVLVGNTLYFTCDPYLSFKMLGYNIVTQELSVIWPPSQHEYYSCTVLVKADDGKLGFAGVQNGTLYLWSMKDGADGYVEWVQRRVIQHKTMLRTRGLSTPPEVVGFADGHGFIFVRTGNTVFSMDLKSGHVRKVYTCRSRNYDVIVVPYMSFCTPDRAMGRLPSPRGPTVIL

SEQ ID NO: 15152 - protein, 383 aa, Triticum aestivum
  peptide (1)..(383): Ceres Seq. ID no. 13597868
  misc_feature (16)..(378): NCBI GI NO: 34915420 NR Description: contains EST C98814
  misc_feature (16)..(376): NCBI GI NO: 33146558 NR Description: unknown protein
  misc_feature (16)..(283): NCBI GI NO: 34915428 NR Description: hypothetical protein~similar to Oryza sativachromosome1
  misc_feature (314)..(378): NCBI GI NO: 34915428 NR Description: hypothetical protein~similar to Oryza sativachromosome1
  misc_feature (16)..(365): NCBI GI NO: 34915424 NR Description: hypothetical protein~similar to Oryza sativachromosome1
  misc_feature (16)..(373): NCBI GI NO: 34394503 NR Description: unknown protein
  misc_feature (19)..(366): NCBI GI NO: 34914028 NR Description: OJ1014_G12.29
  misc_feature (24)..(366): NCBI GI NO: 34394504 NR Description: unknown protein
  misc_feature (24)..(372): NCBI GI NO: 35215058 NR Description: hypothetical protein
  misc_feature (151)..(374): NCBI GI NO: 34394502 NR Description: hypothetical protein
MDTPVPKRPRLVPAPAPAPRTIADMAPEILLRLPPDDPPRLVRASLVCWRWRRLLTDPAYLRRYRAFHRTPPMLGFVLNLKQHYQGMAQLVPTSSFRPAASDRPGLNVLDARHGRVLLHTAQGQRLVVWDPVTGEECKIPRVPSYALGFNAAVLCAAVGCDHLDCHGGPFRVAFVGCGERGITFACTYSSEAGAWSQRIEIEQPAFVDGRPSVLVGNTLYFTCDPYLSFKMLGYNIVTQELSVIWPPSQHEYYSCTVLVKADDGKLGFAGVQNGTLYLWSMKDGADGYVEWVQRRVIQHKTMLRTRGLSTPPEVVGFADGHGFIFVRTGNTVFSMDLKSGHVRKVYTCRSRNYDVIVVPYMSFCTPDRAMGRLPSPRGPTVIL

SEQ ID NO: 15153 - protein, 359 aa, Triticum aestivum
  peptide (1)..(359): Ceres Seq. ID no. 13597869
  misc_feature (1)..(354): NCBI GI NO: 34915420 NR Description: contains EST C98814
  misc_feature (1)..(352): NCBI GI NO: 33146558 NR Description: unknown protein
  misc_feature (1)..(259): NCBI GI NO: 34915428 NR Description: hypothetical protein~similar to Oryza sativachromosome1
  misc_feature (290)..(354): NCBI GI NO: 34915428 NR Description: hypothetical protein~similar to Oryza sativachromosome1
  misc_feature (1)..(341): NCBI GI NO: 34915424 NR Description: hypothetical protein~similar to Oryza sativachromosome1
  misc_feature (1)..(349): NCBI GI NO: 34394503 NR Description: unknown protein
  misc_feature (1)..(342): NCBI GI NO: 34914028 NR Description: OJ1014_G12.29
  misc_feature (1)..(342): NCBI GI NO: 34394504 NR Description: unknown protein
  misc_feature (1)..(348): NCBI GI NO: 35215058 NR Description: hypothetical protein
  misc_feature (127)..(350): NCBI GI NO: 34394502 NR Description: hypothetical protein
MAPEILLRLPPDDPPRLVRASLVCWRWRRLLTDPAYLRRYRAFHRTPPMLGFVLNLKQHYQGMAQLVPTSSFRPAASDRPGLNVLDARHGRVLLHTAQGQRLVVWDPVTGEECKIPRVPSYALGFNAAVLCAAVGCDHLDCHGGPFRVAFVGCGERGITFACTYSSEAGAWSQRIEIEQPAFVDGRPSVLVGNTLYFTCDPYLSFKMLGYNIVTQELSVIWPPSQHEYYSCTVLVKADDGKLGFAGVQNGTLYLWSMKDGADGYVEWVQRRVIQHKTMLRTRGLSTPPEVVGFADGHGFIFVRTGNTVFSMDLKSGHVRKVYTCRSRNYDVIVVPYMSFCTPDRAMGRLPSPRGPTVIL

SEQ ID NO: 15154 - DNA, 1251 bp, Triticum aestivum
  misc_feature (1)..(1251): Ceres Seq. ID no. 13598593
aatcgaaaatccaaactcacggctagccacccactagccacacttactgaacacaggtcagctaagccagcttagctcaggaaggtagcaatggccagggctttccccatgggagtggtggccgccgcggccgtgctggtggtgctgtgtgccgtcatttcttctgccgccgcgcagcctcgtccccctctgccaaagaactcccacatgatcaccccggggcggttcgggaagagggcccaggtgctctcctgcgacgacaccaaggacgggaacagcccctgcagcgccacctgcgacaagcgctgccccaacgagtgcgtcgtcatgtgcccaggctgcaagacatactgcttgtgtgacttttaccccggggtgtcatgtggcgacccgcgtttcacaggagccgacggcaacaacttctacttccacggcaagaaggaccaggacttctgtgtcatctccgatgctgacctccatatcaacgctcacttcatcggcaagcgcaacccagctatgagccgtgacttcacctggatccaagcgctgggcatccgcttcgctgatcaccgcatgtacatgggcgcccagaagaccaccaagtggaagaacgacgtcgaccgccttgagttgaacctcgatggagaatcattcaacatcgctacagacatcggggcaaagtggcagtccactgttgtgcctggcctgaccgtcacgaggaccaccgtgaccaatggcgtgagggtccagcttaagggtgtgtttgacatcatggctaaggtggtgcccatcacgcaggaggactcccgcgtccacaactacggtgtaactgacgatgacagcctcgcgcatctggacatcgggttcaagttctatgacctcaccgacgacgttcatggtgtccttggccagacctaccgccctgactacgtcaacaagctcagcgtgagcgctagcatgcctgtgatgggtggtgtagccagctacatctcctctgacattttctccaccgactgcaaggtcgctaggttcggacttagcaccggcatctccatggtcaccaccaccgcaaactaagcaattcctcaagacaacgtcacactgatgtaaccggcctatactgatgatgaacataggcctagaaataaaataatatgtgagaaatgtaatgtgtaacattgttttgtgccagrraaaaaaaaaaaaaaaaaaaaaatgtttaaacacaataaagttggaacgggagggggg

SEQ ID NO: 15155 - protein, 328 aa, Triticum aestivum
  peptide (1)..(328): Ceres Seq. ID no. 15222378
  misc_feature (1)..(328): NCBI GI NO: 34905930 NR Description: similar to root cap protein
  misc_feature (1)..(328): NCBI GI NO: 34905936 NR Description: similar to root cap protein
  misc_feature (9)..(328): NCBI GI NO: 34905934 NR Description: similar to root cap protein
  misc_feature (18)..(315): NCBI GI NO: 4514635 NR Description: root cap protein 1 [Zea mays]
  misc_feature (1)..(314): NCBI GI NO: 34905940 NR Description: similar to root cap protein
  misc_feature (6)..(328): NCBI GI NO: 21741738 NR Description: OSJNBa0073L04.18
  misc_feature (1)..(319): NCBI GI NO: 4514637 NR Description: root cap protein 2 [Zea mays]
  misc_feature (30)..(314): NCBI GI NO: 11994465 NR Description: contains similarity to late embryogenesis abundantprotein~gene_id:MLD14
  misc_feature (30)..(314): NCBI GI NO: 30685319 NR Description: late embryogenesis abundant protein -related
  misc_feature (69)..(327): NCBI GI NO: 7484468 NR Description: late embryonic abundant protein EMB7
MARAFPMGVVAAAAVLVVLCAVISSAAAQPRPPLPKNSHMITPGRFGKRAQVLSCDDTKDGNSPCSATCDKRCPNECVVMCPGCKTYCLCDFYPGVSCGDPRFTGADGNNFYFHGKKDQDFCVISDADLHINAHFIGKRNPAMSRDFTWIQALGIRFADHRMYMGAQKTTKWKNDVDRLELNLDGESFNIATDIGAKWQSTVVPGLTVTRTTVTNGVRVQLKGVFDIMAKVVPITQEDSRVHNYGVTDDDSLAHLDIGFKFYDLTDDVHGVLGQTYRPDYVNKLSVSASMPVMGGVASYISSDIFSTDCKVARFGLSTGISMVTTTAN

SEQ ID NO: 15156 - protein, 322 aa, Triticum aestivum
  peptide (1)..(322): Ceres Seq. ID no. 15222379
  misc_feature (1)..(322): NCBI GI NO: 34905930 NR Description: similar to root cap protein
  misc_feature (1)..(322): NCBI GI NO: 34905936 NR Description: similar to root cap protein
  misc_feature (3)..(322): NCBI GI NO: 34905934 NR Description: similar to root cap protein
  misc_feature (12)..(309): NCBI GI NO: 4514635 NR Description: root cap protein 1 [Zea mays]
  misc_feature (1)..(308): NCBI GI NO: 34905940 NR Description: similar to root cap protein
  misc_feature (1)..(322): NCBI GI NO: 21741738 NR Description: OSJNBa0073L04.18
  misc_feature (1)..(313): NCBI GI NO: 4514637 NR Description: root cap protein 2 [Zea mays]
  misc_feature (24)..(308): NCBI GI NO: 11994465 NR Description: contains similarity to late embryogenesis abundantprotein~gene_id:MLD14
  misc_feature (24)..(308): NCBI GI NO: 30685319 NR Description: late embryogenesis abundant protein -related
  misc_feature (63)..(321): NCBI GI NO: 7484468 NR Description: late embryonic abundant protein EMB7
MGVVAAAAVLVVLCAVISSAAAQPRPPLPKNSHMITPGRFGKRAQVLSCDDTKDGNSPCSATCDKRCPNECVVMCPGCKTYCLCDFYPGVSCGDPRFTGADGNNFYFHGKKDQDFCVISDADLHINAHFIGKRNPAMSRDFTWIQALGIRFADHRMYMGAQKTTKWKNDVDRLELNLDGESFNIATDIGAKWQSTVVPGLTVTRTTVTNGVRVQLKGVFDIMAKVVPITQEDSRVHNYGVTDDDSLAHLDIGFKFYDLTDDVHGVLGQTYRPDYVNKLSVSASMPVMGGVASYISSDIFSTDCKVARFGLSTGISMVTTTAN

SEQ ID NO: 15157 - protein, 289 aa, Triticum aestivum
  peptide (1)..(289): Ceres Seq. ID no. 15222380
  misc_feature (1)..(289): NCBI GI NO: 34905930 NR Description: similar to root cap protein
  misc_feature (1)..(289): NCBI GI NO: 34905936 NR Description: similar to root cap protein
  misc_feature (1)..(289): NCBI GI NO: 34905934 NR Description: similar to root cap protein
  misc_feature (1)..(276): NCBI GI NO: 4514635 NR Description: root cap protein 1 [Zea mays]
  misc_feature (1)..(275): NCBI GI NO: 34905940 NR Description: similar to root cap protein
  misc_feature (1)..(289): NCBI GI NO: 21741738 NR Description: OSJNBa0073L04.18
  misc_feature (1)..(280): NCBI GI NO: 4514637 NR Description: root cap protein 2 [Zea mays]
  misc_feature (1)..(275): NCBI GI NO: 11994465 NR Description: contains similarity to late embryogenesis abundantprotein~gene_id:MLD14
  misc_feature (1)..(275): NCBI GI NO: 30685319 NR Description: late embryogenesis abundant protein -related
  misc_feature (30)..(288): NCBI GI NO: 7484468 NR Description: late embryonic abundant protein EMB7
MITPGRFGKRAQVLSCDDTKDGNSPCSATCDKRCPNECVVMCPGCKTYCLCDFYPGVSCGDPRFTGADGNNFYFHGKKDQDFCVISDADLHINAHFIGKRNPAMSRDFTWIQALGIRFADHRMYMGAQKTTKWKNDVDRLELNLDGESFNIATDIGAKWQSTVVPGLTVTRTTVTNGVRVQLKGVFDIMAKVVPITQEDSRVHNYGVTDDDSLAHLDIGFKFYDLTDDVHGVLGQTYRPDYVNKLSVSASMPVMGGVASYISSDIFSTDCKVARFGLSTGISMVTTTAN

SEQ ID NO: 15158 - DNA, 1228 bp, Triticum aestivum
  misc_feature (1)..(1228): Ceres Seq. ID no. 13597870
tcatttccaaatccagccacctccacctctctctctctctctctctctctctctctctctctctccatgggcacgcttctccgccgcgtcctcctctccctcgcgctcctcgccgccgccgcgacccccggcgcggcggcggcggcggccaggctgtcgacgtcgtactacagccgcagctgcccccgcgtggagcagatcgtctcggacgtggtcgccgccaagcagcaggccaacccgtccacggcggcgggcacgctgcgcctcttcttccacgactgcttcgtctccggctgcgacgcctccgtcctcgtctccccgctctcctccgaccggaccccggagcgggccgcggagatcaacctctccctcccgggggacgccttcgacgccgtggcccgcgccaaggccgcgctggaggccgcctgcccgggcaccgtctcctgcgccgacatcctcgcgctggcggcgcgcgacctggtggggatcctgggcgggccgcggttccccgtcttcctcggccgccgcgacgcgcgccgctccgacgcgcgcgacgtggagggcaacctcccgcgcaccaacatgtcggcgcgcgccatgacggtcctgttcgcgcgcaagggcatcacgccgcaggagatggtggcgctggcgggcgcccacaccgtgggcttctcccactgctccgagttcgcgcaccgggtgtacaactacaagggcaagggcggcggcgccagcgggcacgacccgtcgctgaacccggagttcgcgcgggcgctgcagagctcctgcgccggctacgagagcaacccggacatctccatcttcaacgacatcgtgacgccgcgggacttcgacgagctctacttcaagaacctaccccgtggcctcgggctgctcgcctccgacgccgcgctgtgggagtacccgcccaccaaggtgttcgtccagcagtacgccgacaaccggaccgccttcttccaggacttcgccagggcgatgcagaagctgggcaccgtcggcgtcaagacggggcggcagggcgtcgtcaggcggcagtgcgacatcctcgactaagtccggcgaccgggcgcgttgctacaactttgcccgacgttgtaccgtcgctagtccggtgaaaattggcgatattaggattggattttggtgtgtctgctctctgatttctgaatgaactcgtgaattgtgatgttaaaaamaaaaaaaa

SEQ ID NO: 15159 - protein, 378 aa, Triticum aestivum
  peptide (1)..(378): Ceres Seq. ID no. 15222221
  misc_feature (28)..(221): Pfam Name: Pfam Description:  HlyD family secretion protein
  misc_feature (21)..(378): NCBI GI NO: 23018788 NR Description: hypothetical protein [Thermobifida fusca]
ISKSSHLHLSLSLSLSLSLSLHGHASPPRPPLPRAPRRRRDPRRGGGGGQAVDVVLQPQLPPRGADRLGRGRRQAAGQPVHGGGHAAPLLPRLLRLRLRRLRPRLPALLRPDPGAGRGDQPLPPGGRLRRRGPRQGRAGGRLPGHRLLRRHPRAGGARPGGDPGRAAVPRLPRPPRRAPLRRARRGGQPPAHQHVGARHDGPVRAQGHHAAGDGGAGGRPHRGLLPLLRVRAPGVQLQGQGRRRQRARPVAEPGVRAGAAELLRRLREQPGHLHLQRHRDAAGLRRALLQEPTPWPRAARLRRRAVGVPAHQGVRPAVRRQPDRLLPGLRQGDAEAGHRRRQDGAAGRRQAAVRHPRLSPATGRVATTLPDVVPSLVR

SEQ ID NO: 15160 - protein, 358 aa, Triticum aestivum
  peptide (1)..(358): Ceres Seq. ID no. 15222222
  misc_feature (68)..(322): Pfam Name: Pfam Description:  Peroxidase
  misc_feature (30)..(355): NCBI GI NO: 9759442 NR Description: peroxidase [Arabidopsis thaliana]
  misc_feature (30)..(355): NCBI GI NO: 18422742 NR Description: peroxidase, putative [Arabidopsis thaliana]
  misc_feature (39)..(355): NCBI GI NO: 21593687 NR Description: peroxidase [Arabidopsis thaliana]
  misc_feature (48)..(358): NCBI GI NO: 15232929 NR Description: peroxidase, putative [Arabidopsis thaliana]
  misc_feature (46)..(355): NCBI GI NO: 15236620 NR Description: peroxidase, putative [Arabidopsis thaliana]
  misc_feature (48)..(358): NCBI GI NO: 14334600 NR Description: putative peroxidase [Arabidopsis thaliana]
  misc_feature (27)..(358): NCBI GI NO: 15242580 NR Description: peroxidase, putative [Arabidopsis thaliana]
  misc_feature (34)..(355): NCBI GI NO: 15221670 NR Description: peroxidase, putative [Arabidopsis thaliana]
  misc_feature (75)..(358): NCBI GI NO: 1890317 NR Description: peroxidase ATP26a [Arabidopsis thaliana]
  misc_feature (13)..(356): NCBI GI NO: 15226205 NR Description: peroxidase, putative [Arabidopsis thaliana]
SFPNPATSTSLSLSLSLSLSLSMGTLLRRVLLSLALLAAAATPGAAAAAARLSTSYYSRSCPRVEQIVSDVVAAKQQANPSTAAGTLRLFFHDCFVSGCDASVLVSPLSSDRTPERAAEINLSLPGDAFDAVARAKAALEAACPGTVSCADILALAARDLVGILGGPRFPVFLGRRDARRSDARDVEGNLPRTNMSARAMTVLFARKGITPQEMVALAGAHTVGFSHCSEFAHRVYNYKGKGGGASGHDPSLNPEFARALQSSCAGYESNPDISIFNDIVTPRDFDELYFKNLPRGLGLLASDAALWEYPPTKVFVQQYADNRTAFFQDFARAMQKLGTVGVKTGRQGVVRRQCDILD

SEQ ID NO: 15161 - protein, 336 aa, Triticum aestivum
  peptide (1)..(336): Ceres Seq. ID no. 15222223
  misc_feature (46)..(300): Pfam Name: Pfam Description:  Peroxidase
  misc_feature (8)..(333): NCBI GI NO: 9759442 NR Description: peroxidase [Arabidopsis thaliana]
  misc_feature (8)..(333): NCBI GI NO: 18422742 NR Description: peroxidase, putative [Arabidopsis thaliana]
  misc_feature (17)..(333): NCBI GI NO: 21593687 NR Description: peroxidase [Arabidopsis thaliana]
  misc_feature (26)..(336): NCBI GI NO: 15232929 NR Description: peroxidase, putative [Arabidopsis thaliana]
  misc_feature (24)..(333): NCBI GI NO: 15236620 NR Description: peroxidase, putative [Arabidopsis thaliana]
  misc_feature (26)..(336): NCBI GI NO: 14334600 NR Description: putative peroxidase [Arabidopsis thaliana]
  misc_feature (5)..(336): NCBI GI NO: 15242580 NR Description: peroxidase, putative [Arabidopsis thaliana]
  misc_feature (12)..(333): NCBI GI NO: 15221670 NR Description: peroxidase, putative [Arabidopsis thaliana]
  misc_feature (53)..(336): NCBI GI NO: 1890317 NR Description: peroxidase ATP26a [Arabidopsis thaliana]
  misc_feature (1)..(334): NCBI GI NO: 15226205 NR Description: peroxidase, putative [Arabidopsis thaliana]
MGTLLRRVLLSLALLAAAATPGAAAAAARLSTSYYSRSCPRVEQIVSDVVAAKQQANPSTAAGTLRLFFHDCFVSGCDASVLVSPLSSDRTPERAAEINLSLPGDAFDAVARAKAALEAACPGTVSCADILALAARDLVGILGGPRFPVFLGRRDARRSDARDVEGNLPRTNMSARAMTVLFARKGITPQEMVALAGAHTVGFSHCSEFAHRVYNYKGKGGGASGHDPSLNPEFARALQSSCAGYESNPDISIFNDIVTPRDFDELYFKNLPRGLGLLASDAALWEYPPTKVFVQQYADNRTAFFQDFARAMQKLGTVGVKTGRQGVVRRQCDILD

SEQ ID NO: 15162 - DNA, 1061 bp, Triticum aestivum
  misc_feature (1)..(1061): Ceres Seq. ID no. 13597542
accagtgcggtatacaccccggttgactagcgctgatttgctccctctccagctccggctcccagatcgagacggcggcggcggcggcgatgggcgcccacccttacgtgccggcgagcctggacctcccgggctacgtgccgctgcgcctcacccagctcgagatcctcggggcctacctcggcacctccctcttcgtcctcgtcgccgtctggctcctctccgggagatgccgcaggttgtccggcaccgaccgcctgctcatgtgctggtgggcgttcaccggcctcacccacatactcatcgagggccccttcgtcttcacccccgatttcttcaccaagaccaaccccaacttcttcgacgaagtctggaaggagtacagcaagggtgactccaggtacgtcgccagggacaccgccaccgtcaccgtcgaaggaatcacggccgtgctgaaaggccctgcctcgctgctcgcagtctatgccattgcatcacgcaagtcctacagccacatcctccagttcgccgtgtgcctcggtcagctctacggatgcatcgtctacttcaccaccgcctacttggacggcttcaacttctgggccagtccgttctacttctgggcatatttcatcggcgcaaacagttcatgggttgtgataccgttgctgatcgccacaaggagctggaagaggatctgcgcagcgattcatcaaagtgagaagatcaagactaagtaattcctgcagcagacaggatttggttgcaaccaggacacactgaacttcttattttacggctagaaatttgttggcttatattgtaccctttgcaaactacattgcctgaaacaagtatgttgtactactggattgtgttgtaacatcaaggagggcggctgtttattgctgcaaatgaaaattatatgccacccttgcatgggcaatcaccattgcacatactatcaggcaactagtagtaagaggccgggtgttgctcattatactttgtatccgattgagactatattttgagttaataaaagcaccttttatttgggt

SEQ ID NO: 15163 - protein, 216 aa, Triticum aestivum
  peptide (1)..(216): Ceres Seq. ID no. 13597543
  misc_feature (18)..(215): Pfam Name: Pfam Description:  Emopamil binding protein
  misc_feature (4)..(216): NCBI GI NO: 34894044 NR Description: putative C-8,7 sterol isomerase
  misc_feature (3)..(216): NCBI GI NO: 4098989 NR Description: phenylalkylamine binding protein homolog
  misc_feature (3)..(216): NCBI GI NO: 15223758 NR Description: C-8,7 sterol isomerase [Arabidopsis thaliana]
  misc_feature (3)..(216): NCBI GI NO: 21554213 NR Description: C-8,7 sterol isomerase [Arabidopsis thaliana]
  misc_feature (4)..(216): NCBI GI NO: 33417065 NR Description: Unknown (protein for MGC:68833) [Xenopus laevis]
  misc_feature (4)..(206): NCBI GI NO: 5729810 NR Description: emopamil binding protein
  misc_feature (4)..(216): NCBI GI NO: 16923992 NR Description: phenylalkylamine Ca2+ antagonist
  misc_feature (4)..(206): NCBI GI NO: 18202586 NR Description: 3-beta-hydroxysteroid-delta
  misc_feature (4)..(216): NCBI GI NO: 6681255 NR Description: phenylalkylamine Ca2+ antagonist
  misc_feature (4)..(203): NCBI GI NO: 12848900 NR Description: unnamed protein product [Mus musculus]
MGAHPYVPASLDLPGYVPLRLTQLEILGAYLGTSLFVLVAVWLLSGRCRRLSGTDRLLMCWWAFTGLTHILIEGPFVFTPDFFTKTNPNFFDEVWKEYSKGDSRYVARDTATVTVEGITAVLKGPASLLAVYAIASRKSYSHILQFAVCLGQLYGCIVYFTTAYLDGFNFWASPFYFWAYFIGANSSWVVIPLLIATRSWKRICAAIHQSEKIKTK

SEQ ID NO: 15164 - protein, 158 aa, Triticum aestivum
  peptide (1)..(158): Ceres Seq. ID no. 13597544
  misc_feature (1)..(157): Pfam Name: Pfam Description:  Emopamil binding protein
  misc_feature (1)..(158): NCBI GI NO: 34894044 NR Description: putative C-8,7 sterol isomerase
  misc_feature (1)..(158): NCBI GI NO: 4098989 NR Description: phenylalkylamine binding protein homolog
  misc_feature (1)..(158): NCBI GI NO: 15223758 NR Description: C-8,7 sterol isomerase [Arabidopsis thaliana]
  misc_feature (1)..(158): NCBI GI NO: 21554213 NR Description: C-8,7 sterol isomerase [Arabidopsis thaliana]
  misc_feature (1)..(158): NCBI GI NO: 33417065 NR Description: Unknown (protein for MGC:68833) [Xenopus laevis]
  misc_feature (1)..(148): NCBI GI NO: 5729810 NR Description: emopamil binding protein
  misc_feature (1)..(158): NCBI GI NO: 16923992 NR Description: phenylalkylamine Ca2+ antagonist
  misc_feature (1)..(148): NCBI GI NO: 18202586 NR Description: 3-beta-hydroxysteroid-delta
  misc_feature (1)..(158): NCBI GI NO: 6681255 NR Description: phenylalkylamine Ca2+ antagonist
  misc_feature (1)..(145): NCBI GI NO: 12848900 NR Description: unnamed protein product [Mus musculus]
MCWWAFTGLTHILIEGPFVFTPDFFTKTNPNFFDEVWKEYSKGDSRYVARDTATVTVEGITAVLKGPASLLAVYAIASRKSYSHILQFAVCLGQLYGCIVYFTTAYLDGFNFWASPFYFWAYFIGANSSWVVIPLLIATRSWKRICAAIHQSEKIKTK

SEQ ID NO: 15165 - protein, 130 aa, Triticum aestivum
  peptide (1)..(130): Ceres Seq. ID no. 13597545
PVRYTPRLTSADLLPLQLRLPDRDGGGGGDGRPPLRAGEPGPPGLRAAAPHPARDPRGLPRHLPLRPRRRLAPLREMPQVVRHRPPAHVLVGVHRPHPHTHRGPLRLHPRFLHQDQPQLLRRSLEGVQQG

SEQ ID NO: 15166 - DNA, 1944 bp, Triticum aestivum
  misc_feature (1)..(1944): Ceres Seq. ID no. 15224727
cttaaacaaatggacacttgagacctcactgtcccaatgacacttctatatatccagaatcctgaccaaaaacatcaccaatccagtcctacatcacctttcttctcacccaccgctagcttctctaaggagtgaggagcagagtaatggatcttgaactgttgtggagtggtccacctgcactctcggtactgccatggatctgcggcggcctcgtggcctcggtgctgctctggcaagccgcccggctgctcgaccagctgtggtggcggccgaggcggctggagcgggcgctccgctcccagggcctccgcggcacgcggtaccgcttcctcctcggcgacgtcaacgactacgcccggcagaccaaggaggcgtcgtcggggccgccgatgccgctgcgctgccacgacgtcggcccccgcgccatgccgttcctctacagcaccatcaaggagcacggcacgccgtgcatctcctggttcgggccggtccccaaggtgagcatcaccgaccctgccctggtccgggaggtgatgtccagcaagctcgcccgcgacgtcgagaagttcaagttcccggcgctcaccaggctgctcgccgacggggtggggaactacgagggcgacaggtgggccaagcaccggaggatcctcaaccccgccttccatgccgagaagctcaagctcatgttcccggcgtttaccgcgtgctgtgaggagctcgttggccgatgggaacagtcccttgggcctgacggctcctgggaggtggatgtctgcccggagctccagagcctcaccggagatgtcatctcgcagacggcgttcggcagcagttacctggaagggagaaggatttttcagctgcagactgagcaaattgcgcgattcatggcagcggtcagcaagatcatgattcctggttacatgtcctttcctaccaaaaataaccgaaggatgcatcaaattaacaacgagattgagtccatcttgcggggcataattgcaaaaaggatgcatgctattcacgaaggagaaagcacaaaagatgacttactcggcttattactggagtcaaacatgtcagacacggatgaaaatggccaatccaccctaggaatgtcagcagatgaagtcatggaggagtgcaagctgttttattttgctggaatggagacaacatcaatattgcttacatggacaatgattgtgcttagcatgcacccagagtggcaggaccgtgcaagggaggaggttcttggcctatttggaaaacacaaactcgagtatgagggtgttaatcgactcaaaattgtgacaatgattctatatgaagttctccggttgtacccgccggctactgtattcacccggaaaacatacaagaagattgagattggaggcatcatgtacccagctggtgtgatgtttgagatgccagtgttgtacatccaccacgacacggacatttggggagaagatgtgcacgaattcaacccggataggtttgccgaggggatctccaaggcatccaaggacccgggtgcatttttcccatttggttgggggccacggatctgtatcggccagaacttcgcgttgcttgaggccaagatggcattgtgcatgatccttcagcgctttgagtttgagctcgcaccatcatacacccatacaccgcatagcgtgatgatgttgcgtcccatgcatggtgctcagattaggcttcacactatctcttcgtagtatcatgttcaaattaggctttacactatctctttctagtatcatactcatggcattcgcctcctatgtgatatgtatgtagtcttatccgcgacaggttttagtcaccatccgttttcttttcctacagataaaagtccaacagttttggactcatgagaactcaatttacttacaactatatatgattacaggc

SEQ ID NO: 15167 - protein, 533 aa, Triticum aestivum
  peptide (1)..(533): Ceres Seq. ID no. 15224728
  misc_feature (10)..(531): NCBI GI NO: 34912898 NR Description: putative cytochrome P450
  misc_feature (22)..(531): NCBI GI NO: 34912888 NR Description: putative cytochrome P450
  misc_feature (7)..(531): NCBI GI NO: 34912894 NR Description: putative cytochrome P450
  misc_feature (7)..(531): NCBI GI NO: 19909879 NR Description: cytochrome P450 [Oryza sativa]
  misc_feature (5)..(531): NCBI GI NO: 34912896 NR Description: putative cytochrome P450
  misc_feature (5)..(531): NCBI GI NO: 34912380 NR Description: putative cytochrome P450
  misc_feature (12)..(531): NCBI GI NO: 21805634 NR Description: cytochrome P450 monooxygenase CYP72A26
  misc_feature (1)..(528): NCBI GI NO: 34912914 NR Description: putative cytochrome P450
  misc_feature (18)..(531): NCBI GI NO: 34912882 NR Description: putative cytochrome P450
  misc_feature (3)..(528): NCBI GI NO: 21842133 NR Description: cytochrome P450 monooxygenase CYP72A16
MDLELLWSGPPALSVLPWICGGLVASVLLWQAARLLDQLWWRPRRLERALRSQGLRGTRYRFLLGDVNDYARQTKEASSGPPMPLRCHDVGPRAMPFLYSTIKEHGTPCISWFGPVPKVSITDPALVREVMSSKLARDVEKFKFPALTRLLADGVGNYEGDRWAKHRRILNPAFHAEKLKLMFPAFTACCEELVGRWEQSLGPDGSWEVDVCPELQSLTGDVISQTAFGSSYLEGRRIFQLQTEQIARFMAAVSKIMIPGYMSFPTKNNRRMHQINNEIESILRGIIAKRMHAIHEGESTKDDLLGLLLESNMSDTDENGQSTLGMSADEVMEECKLFYFAGMETTSILLTWTMIVLSMHPEWQDRAREEVLGLFGKHKLEYEGVNRLKIVTMILYEVLRLYPPATVFTRKTYKKIEIGGIMYPAGVMFEMPVLYIHHDTDIWGEDVHEFNPDRFAEGISKASKDPGAFFPFGWGPRICIGQNFALLEAKMALCMILQRFEFELAPSYTHTPHSVMMLRPMHGAQIRLHTISS

SEQ ID NO: 15168 - protein, 451 aa, Triticum aestivum
  peptide (1)..(451): Ceres Seq. ID no. 15224729
  misc_feature (1)..(449): NCBI GI NO: 34912898 NR Description: putative cytochrome P450
  misc_feature (1)..(449): NCBI GI NO: 34912888 NR Description: putative cytochrome P450
  misc_feature (1)..(449): NCBI GI NO: 34912894 NR Description: putative cytochrome P450
  misc_feature (1)..(449): NCBI GI NO: 19909879 NR Description: cytochrome P450 [Oryza sativa]
  misc_feature (1)..(449): NCBI GI NO: 34912896 NR Description: putative cytochrome P450
  misc_feature (1)..(449): NCBI GI NO: 34912380 NR Description: putative cytochrome P450
  misc_feature (1)..(449): NCBI GI NO: 21805634 NR Description: cytochrome P450 monooxygenase CYP72A26
  misc_feature (1)..(446): NCBI GI NO: 34912914 NR Description: putative cytochrome P450
  misc_feature (1)..(449): NCBI GI NO: 34912882 NR Description: putative cytochrome P450
  misc_feature (1)..(446): NCBI GI NO: 21842133 NR Description: cytochrome P450 monooxygenase CYP72A16
MPLRCHDVGPRAMPFLYSTIKEHGTPCISWFGPVPKVSITDPALVREVMSSKLARDVEKFKFPALTRLLADGVGNYEGDRWAKHRRILNPAFHAEKLKLMFPAFTACCEELVGRWEQSLGPDGSWEVDVCPELQSLTGDVISQTAFGSSYLEGRRIFQLQTEQIARFMAAVSKIMIPGYMSFPTKNNRRMHQINNEIESILRGIIAKRMHAIHEGESTKDDLLGLLLESNMSDTDENGQSTLGMSADEVMEECKLFYFAGMETTSILLTWTMIVLSMHPEWQDRAREEVLGLFGKHKLEYEGVNRLKIVTMILYEVLRLYPPATVFTRKTYKKIEIGGIMYPAGVMFEMPVLYIHHDTDIWGEDVHEFNPDRFAEGISKASKDPGAFFPFGWGPRICIGQNFALLEAKMALCMILQRFEFELAPSYTHTPHSVMMLRPMHGAQIRLHTISS

SEQ ID NO: 15169 - protein, 439 aa, Triticum aestivum
  peptide (1)..(439): Ceres Seq. ID no. 15224730
  misc_feature (1)..(437): NCBI GI NO: 34912898 NR Description: putative cytochrome P450
  misc_feature (1)..(437): NCBI GI NO: 34912888 NR Description: putative cytochrome P450
  misc_feature (1)..(437): NCBI GI NO: 34912894 NR Description: putative cytochrome P450
  misc_feature (1)..(437): NCBI GI NO: 19909879 NR Description: cytochrome P450 [Oryza sativa]
  misc_feature (1)..(437): NCBI GI NO: 34912896 NR Description: putative cytochrome P450
  misc_feature (1)..(437): NCBI GI NO: 34912380 NR Description: putative cytochrome P450
  misc_feature (1)..(437): NCBI GI NO: 21805634 NR Description: cytochrome P450 monooxygenase CYP72A26
  misc_feature (1)..(434): NCBI GI NO: 34912914 NR Description: putative cytochrome P450
  misc_feature (1)..(437): NCBI GI NO: 34912882 NR Description: putative cytochrome P450
  misc_feature (1)..(434): NCBI GI NO: 21842133 NR Description: cytochrome P450 monooxygenase CYP72A16
MPFLYSTIKEHGTPCISWFGPVPKVSITDPALVREVMSSKLARDVEKFKFPALTRLLADGVGNYEGDRWAKHRRILNPAFHAEKLKLMFPAFTACCEELVGRWEQSLGPDGSWEVDVCPELQSLTGDVISQTAFGSSYLEGRRIFQLQTEQIARFMAAVSKIMIPGYMSFPTKNNRRMHQINNEIESILRGIIAKRMHAIHEGESTKDDLLGLLLESNMSDTDENGQSTLGMSADEVMEECKLFYFAGMETTSILLTWTMIVLSMHPEWQDRAREEVLGLFGKHKLEYEGVNRLKIVTMILYEVLRLYPPATVFTRKTYKKIEIGGIMYPAGVMFEMPVLYIHHDTDIWGEDVHEFNPDRFAEGISKASKDPGAFFPFGWGPRICIGQNFALLEAKMALCMILQRFEFELAPSYTHTPHSVMMLRPMHGAQIRLHTISS

SEQ ID NO: 15170 - DNA, 596 bp, Triticum aestivum
  misc_feature (1)..(596): Ceres Seq. ID no. 12618407
atcagaaactaaaacatgagtaacatgacttccttaagctccttagtgctgctccttgcagctctaattctattccctcaagttcttgctgactatgagaagcccccggtgtacaagcctcccattgagaagccaccactttacaagcccccaattgagaaacctcctgtttataaacctccagttgagaaaccccccatttataagcccccagtagagaagccaccagtgtacaagcctcctgtagagaaacccccagtttacaagcccccagttgaaaaaccaccagtgtacaagccaccagttgagaaccctccaatttacaaacccccagttgaaaaaccaccagtatacaagcccccaattgagaaacctccagtttataagccaccagtagagaagccaccggttgcgaagcctccagtctacaagccaccatatggaaagccaccatacccaaagtaccctccaattgatgacacccatttctgaaggatgtcaaggggtgtattaagtatatgctaaataagaggtgctaagaatgtagtttatagtttgcaaattattgcaaggattgctcttagcttcttcatttc

SEQ ID NO: 15171 - protein, 158 aa, Triticum aestivum
  peptide (1)..(158): Ceres Seq. ID no. 12618408
  misc_feature (30)..(156): Pfam Name: Pfam Description:  Formin Homology 2 Domain
  misc_feature (4)..(153): NCBI GI NO: 131001 NR Description: REPETITIVE PROLINE-RICH CELL WALL PROTEIN 2PRECURSOR
  misc_feature (28)..(158): NCBI GI NO: 131001 NR Description: REPETITIVE PROLINE-RICH CELL WALL PROTEIN 2PRECURSOR
  misc_feature (1)..(153): NCBI GI NO: 130997 NR Description: REPETITIVE PROLINE-RICH CELL WALL PROTEIN 1PRECURSOR
  misc_feature (4)..(153): NCBI GI NO: 3914458 NR Description: REPETITIVE PROLINE-RICH CELL WALL PROTEIN 2PRECURSOR
  misc_feature (4)..(153): NCBI GI NO: 8096255 NR Description: TrPRP2 [Trifolium repens]
  misc_feature (28)..(153): NCBI GI NO: 3914458 NR Description: REPETITIVE PROLINE-RICH CELL WALL PROTEIN 2PRECURSOR
  misc_feature (28)..(153): NCBI GI NO: 1279233 NR Description: proline rich protein [Cicer arietinum]
  misc_feature (28)..(153): NCBI GI NO: 131001 NR Description: REPETITIVE PROLINE-RICH CELL WALL PROTEIN 2PRECURSOR
  misc_feature (28)..(153): NCBI GI NO: 3914458 NR Description: REPETITIVE PROLINE-RICH CELL WALL PROTEIN 2PRECURSOR
  misc_feature (28)..(153): NCBI GI NO: 3914458 NR Description: REPETITIVE PROLINE-RICH CELL WALL PROTEIN 2PRECURSOR
MSNMTSLSSLVLLLAALILFPQVLADYEKPPVYKPPIEKPPLYKPPIEKPPVYKPPVEKPPIYKPPVEKPPVYKPPVEKPPVYKPPVEKPPVYKPPVENPPIYKPPVEKPPVYKPPIEKPPVYKPPVEKPPVAKPPVYKPPYGKPPYPKYPPIDDTHF

SEQ ID NO: 15172 - protein, 155 aa, Triticum aestivum
  peptide (1)..(155): Ceres Seq. ID no. 12618409
  misc_feature (27)..(153): Pfam Name: Pfam Description:  Formin Homology 2 Domain
  misc_feature (1)..(150): NCBI GI NO: 131001 NR Description: REPETITIVE PROLINE-RICH CELL WALL PROTEIN 2PRECURSOR
  misc_feature (25)..(155): NCBI GI NO: 131001 NR Description: REPETITIVE PROLINE-RICH CELL WALL PROTEIN 2PRECURSOR
  misc_feature (1)..(150): NCBI GI NO: 130997 NR Description: REPETITIVE PROLINE-RICH CELL WALL PROTEIN 1PRECURSOR
  misc_feature (1)..(150): NCBI GI NO: 3914458 NR Description: REPETITIVE PROLINE-RICH CELL WALL PROTEIN 2PRECURSOR
  misc_feature (1)..(150): NCBI GI NO: 8096255 NR Description: TrPRP2 [Trifolium repens]
  misc_feature (25)..(150): NCBI GI NO: 3914458 NR Description: REPETITIVE PROLINE-RICH CELL WALL PROTEIN 2PRECURSOR
  misc_feature (25)..(150): NCBI GI NO: 1279233 NR Description: proline rich protein [Cicer arietinum]
  misc_feature (25)..(150): NCBI GI NO: 131001 NR Description: REPETITIVE PROLINE-RICH CELL WALL PROTEIN 2PRECURSOR
  misc_feature (25)..(150): NCBI GI NO: 3914458 NR Description: REPETITIVE PROLINE-RICH CELL WALL PROTEIN 2PRECURSOR
  misc_feature (25)..(150): NCBI GI NO: 3914458 NR Description: REPETITIVE PROLINE-RICH CELL WALL PROTEIN 2PRECURSOR
MTSLSSLVLLLAALILFPQVLADYEKPPVYKPPIEKPPLYKPPIEKPPVYKPPVEKPPIYKPPVEKPPVYKPPVEKPPVYKPPVEKPPVYKPPVENPPIYKPPVEKPPVYKPPIEKPPVYKPPVEKPPVAKPPVYKPPYGKPPYPKYPPIDDTHF

SEQ ID NO: 15173 - DNA, 2490 bp, Triticum aestivum
  misc_feature (1)..(2490): Ceres Seq. ID no. 13656177
aacwttacctwgwrywtcctaatcgaaagccggagctctcctcgctctgcacaaccatttttggttcgatcccggagaagctccggggctccttgaagcgatggatcagcgggcgaggcaccctcccggcatcggcaacggccgcggcgggaatcctaactaccacggccgtggcccgccgccgacgcagcagcatcaccagcagccgtcgccgccttcgccgcagcaggcgcaggggcacccgcagcagtacatgcagcggcagtcgcagcactcgcagcactcgcagcaccacagccagcagcttcagcatcagcagtggcttcggcggaatcagaccgctggcgaggccgcctcgggcgccgccagagccagcgagcaccacgcgccggctgccgccgatgacgccgatttgagttcgcaagactggaaggcccaattgaagcttccacctccagatacacgctaccagaccgaggatgtcactgcaactaagggaaacgaatttgaagactattttctgaagcgtgaacttcttatgggcatatatgagaaaggatttgaaagaccgtctcctatccaagaagaaagcattcctattgcattaaccggcagcgacattcttgcaagagcaaaaaatggaaccggcaagactgctgcattttgtatacctgcgctagagaagattgatcaagacaaaaatgctattcaagttgttatattggtccccacgagggaattggctttacaaacatcacaagtctgcaaggaacttgggaaacacttgaagattcaagtcatggtcactactggaggaacaagcctaaaggatgatattgtccgtctttatcaacctgtgcatttacttgtggggacgcctggtcgtgttttggaccttacgaagaaaggcatttgcattctgaatgactgttcaatgcttattatggatgaggcagacaagcttctttctcctgagttccaaccttccgtggagcagttaattcgataccttccatcgagtcgacagattctgatgttctctgcaacattccctgtgactgtcaaggctttcaaggacaaatatctgcctaaaccctatgttattaatcttatggacgaacttacactgaagggaattacccagttctacgcctttgttgaagaaaggcagaaagtccattgtctgaacactcttttttccaagctgcaaattaatcaatctataatattctgtaactccgtaaatcgtgttgaactactggcgaagaagatcacagagcttggttactcttgcttctacatccatgctaaaatgctgcaggatcatcgtaatagagtattccatgatttccgtaatggcgcatgcaggaaccttgtgtgtacagatctttttacaaggggaatagatatccaagctgttaatgttgttatcaattttgatttccccaagaccgctgaaacctatctccacagggttggtagatctgggagatttggccaccttggcctggctgtgaatctgatcacctacgaggatcgttttaacttgtatcggattgagcaggagcttggaactgagataaaacccatacctcctcagatagaccggacgatatactgccaatagttatctggaagattaatcttatatgccccaccctggaagttataagacaacttatgtaaatagcagctcatcaggtttcatttacgtgatctttatggtgtatcttaagttgttttggggtgctatgggacaggtgaaagtgtagctagctcgtctaatttccatcggaccacgtgggcggatgtatcatggctaagctaaaacttgccatcactgacaatagttaatgttgctaaccaggtgcctgttccgagactgttttccctaaaactgaaagatctctttttcttttgacaaatgtattggctggctagctttttgtacagggcatttttacactggtaaaaaaaaaaaaaaaaaaaaaaaaaaaaaaaaaaaaaaaaaaaaaaaaaaaaaaaaaaaaaaaaaaaaaaaaaattaaaaaaaaaaaaaaaaaggtttawtcrawmccgccaaccycraggggggccccgraaccaaattccccaaaaaggaagtcaaataacccgcgttaattggccgttttttaaaaacgtcggaatggaaaaaaccttgggttaaccaaattaaatccctttgaaaaaaatccccttttcccaatttgggaaaaaaaaaaaaaggcccaaacaaatcccctttccaaaaatttgcaaaccctaaatggaaaaggaaaattgaaagcttaaaaattttttaaaaattcccgtaaaatttttgtaaaaaaacttaattttttaaacaaaaaggcaaaaatcggaaaaatccttaaaaaataaaaaaaaaaaaccaaaatgggtttaagggtttttcaattttaaaaaaaaatcccataataaaaaaacgggaactcaaacgtaaaaggg

SEQ ID NO: 15174 - protein, 508 aa, Triticum aestivum
  peptide (1)..(508): Ceres Seq. ID no. 15219810
  misc_feature (147)..(349): Pfam Name: Pfam Description:  DEAD/DEAH box helicase
  misc_feature (1)..(508): NCBI GI NO: 22328183 NR Description: DEAD/DEAH box helicase, putative
  misc_feature (1)..(508): NCBI GI NO: 11267537 NR Description: RNA helicase RH8 [imported] - Arabidopsis thaliana
  misc_feature (10)..(508): NCBI GI NO: 22758337 NR Description: putative RNA helicase
  misc_feature (1)..(508): NCBI GI NO: 7436453 NR Description: probable RNA helicase (EC 3
  misc_feature (2)..(508): NCBI GI NO: 15225898 NR Description: DEAD/DEAH box helicase, putative
  misc_feature (4)..(508): NCBI GI NO: 15233064 NR Description: DEAD/DEAH box helicase, putative
  misc_feature (2)..(508): NCBI GI NO: 14532476 NR Description: At2g45810/F4I18.21 [Arabidopsis thaliana]
  misc_feature (4)..(508): NCBI GI NO: 11267538 NR Description: RNA helicase RH12
  misc_feature (101)..(506): NCBI GI NO: 19113116 NR Description: putative atp-dependent rna helicase ste13p
  misc_feature (101)..(506): NCBI GI NO: 23488233 NR Description: ATP-dependent RNA Helicase
MDQRARHPPGIGNGRGGNPNYHGRGPPPTQQHHQQPSPPSPQQAQGHPQQYMQRQSQHSQHSQHHSQQLQHQQWLRRNQTAGEAASGAARASEHHAPAAADDADLSSQDWKAQLKLPPPDTRYQTEDVTATKGNEFEDYFLKRELLMGIYEKGFERPSPIQEESIPIALTGSDILARAKNGTGKTAAFCIPALEKIDQDKNAIQVVILVPTRELALQTSQVCKELGKHLKIQVMVTTGGTSLKDDIVRLYQPVHLLVGTPGRVLDLTKKGICILNDCSMLIMDEADKLLSPEFQPSVEQLIRYLPSSRQILMFSATFPVTVKAFKDKYLPKPYVINLMDELTLKGITQFYAFVEERQKVHCLNTLFSKLQINQSIIFCNSVNRVELLAKKITELGYSCFYIHAKMLQDHRNRVFHDFRNGACRNLVCTDLFTRGIDIQAVNVVINFDFPKTAETYLHRVGRSGRFGHLGLAVNLITYEDRFNLYRIEQELGTEIKPIPPQIDRTIYCQ

SEQ ID NO: 15175 - protein, 457 aa, Triticum aestivum
  peptide (1)..(457): Ceres Seq. ID no. 15219811
  misc_feature (96)..(298): Pfam Name: Pfam Description:  DEAD/DEAH box helicase
  misc_feature (1)..(457): NCBI GI NO: 22328183 NR Description: DEAD/DEAH box helicase, putative
  misc_feature (1)..(457): NCBI GI NO: 11267537 NR Description: RNA helicase RH8 [imported] - Arabidopsis thaliana
  misc_feature (1)..(457): NCBI GI NO: 22758337 NR Description: putative RNA helicase
  misc_feature (1)..(457): NCBI GI NO: 7436453 NR Description: probable RNA helicase (EC 3
  misc_feature (1)..(457): NCBI GI NO: 15225898 NR Description: DEAD/DEAH box helicase, putative
  misc_feature (1)..(457): NCBI GI NO: 15233064 NR Description: DEAD/DEAH box helicase, putative
  misc_feature (1)..(457): NCBI GI NO: 14532476 NR Description: At2g45810/F4I18.21 [Arabidopsis thaliana]
  misc_feature (1)..(457): NCBI GI NO: 11267538 NR Description: RNA helicase RH12
  misc_feature (50)..(455): NCBI GI NO: 19113116 NR Description: putative atp-dependent rna helicase ste13p
  misc_feature (50)..(455): NCBI GI NO: 23488233 NR Description: ATP-dependent RNA Helicase
MQRQSQHSQHSQHHSQQLQHQQWLRRNQTAGEAASGAARASEHHAPAAADDADLSSQDWKAQLKLPPPDTRYQTEDVTATKGNEFEDYFLKRELLMGIYEKGFERPSPIQEESIPIALTGSDILARAKNGTGKTAAFCIPALEKIDQDKNAIQVVILVPTRELALQTSQVCKELGKHLKIQVMVTTGGTSLKDDIVRLYQPVHLLVGTPGRVLDLTKKGICILNDCSMLIMDEADKLLSPEFQPSVEQLIRYLPSSRQILMFSATFPVTVKAFKDKYLPKPYVINLMDELTLKGITQFYAFVEERQKVHCLNTLFSKLQINQSIIFCNSVNRVELLAKKITELGYSCFYIHAKMLQDHRNRVFHDFRNGACRNLVCTDLFTRGIDIQAVNVVINFDFPKTAETYLHRVGRSGRFGHLGLAVNLITYEDRFNLYRIEQELGTEIKPIPPQIDRTIYCQ

SEQ ID NO: 15176 - protein, 362 aa, Triticum aestivum
  peptide (1)..(362): Ceres Seq. ID no. 15219812
  misc_feature (1)..(203): Pfam Name: Pfam Description:  DEAD/DEAH box helicase
  misc_feature (1)..(362): NCBI GI NO: 22328183 NR Description: DEAD/DEAH box helicase, putative
  misc_feature (1)..(362): NCBI GI NO: 11267537 NR Description: RNA helicase RH8 [imported] - Arabidopsis thaliana
  misc_feature (1)..(362): NCBI GI NO: 22758337 NR Description: putative RNA helicase
  misc_feature (1)..(362): NCBI GI NO: 7436453 NR Description: probable RNA helicase (EC 3
  misc_feature (1)..(362): NCBI GI NO: 15225898 NR Description: DEAD/DEAH box helicase, putative
  misc_feature (1)..(362): NCBI GI NO: 15233064 NR Description: DEAD/DEAH box helicase, putative
  misc_feature (1)..(362): NCBI GI NO: 14532476 NR Description: At2g45810/F4I18.21 [Arabidopsis thaliana]
  misc_feature (1)..(362): NCBI GI NO: 11267538 NR Description: RNA helicase RH12
  misc_feature (1)..(360): NCBI GI NO: 19113116 NR Description: putative atp-dependent rna helicase ste13p
  misc_feature (1)..(360): NCBI GI NO: 23488233 NR Description: ATP-dependent RNA Helicase
MGIYEKGFERPSPIQEESIPIALTGSDILARAKNGTGKTAAFCIPALEKIDQDKNAIQVVILVPTRELALQTSQVCKELGKHLKIQVMVTTGGTSLKDDIVRLYQPVHLLVGTPGRVLDLTKKGICILNDCSMLIMDEADKLLSPEFQPSVEQLIRYLPSSRQILMFSATFPVTVKAFKDKYLPKPYVINLMDELTLKGITQFYAFVEERQKVHCLNTLFSKLQINQSIIFCNSVNRVELLAKKITELGYSCFYIHAKMLQDHRNRVFHDFRNGACRNLVCTDLFTRGIDIQAVNVVINFDFPKTAETYLHRVGRSGRFGHLGLAVNLITYEDRFNLYRIEQELGTEIKPIPPQIDRTIYCQ

SEQ ID NO: 15177 - DNA, 1142 bp, Triticum aestivum
  misc_feature (1)..(1142): Ceres Seq. ID no. 15226202
gagacagtaggaggacaagagagcgagggcgaccaataaattcctaatttttcccacttttccaccccgggattccccgcctcttgttccaatcgattggtgggcgtcctcgttcttggcttcccgattgaatccgtgggaagccagagataattctctctccgctgcgaatttttttttggtggtttgagttcttgatttgtttgcgaggaagccatcatgagcgccggaagcgccagtttcctcgagatccagccctcggagctggcatttccctttgaattgatgaagcagagctcgtgctccatgcaactcgcaaataagaccgaccgttatgtagcattcaaggtcaaaactaccaacccaaagcagtactgtgtgcgccctaatatcggcgttgtacttcctgggtcgacttgtgatgttacagttacaatgcaagcgcagagggaagcacctgctgatctgcagtgtaaggacaagttcctagttcaaagtgttgcagctgagaatggcgcagcaactcaagatattagtgcagcaatgttcaacaaagagccagggaaggttgttgatgaatgcaagctgcgtgtaatttatgtgccaacatcttcacctagcccgttctctgaagattcagaacaagggagttctgctcgttcattggaaaacgggacccctaattctacattgccacaatctgtatttagatcatctggtgaagcatcaaaggataagtcctcggaggcgacgtccatgatttccaagctaactgaggagaaaatgtctgctgttcagcaaaaccagaagttgagacaagagctggatgtcctacgcaaagagagcagcaaaagcaacggcggtttctcaatcaccttcttgattgtggtgggtattctgggcatcatcgctggtttcatcctcaagaagacataggagaagagtagtccccaacaaagttacattcccaggaaaggacggataccagcaacatcccttgtgtttttactcctaaaaggagcgcctgttctattctaacttgtaacggcttagaagctttggtttgtgtacattacatggtggttttcatgattttaatcacatcgagtagacttgttttaattataaaaaaaaaaaaaaaa

SEQ ID NO: 15178 - protein, 238 aa, Triticum aestivum; identical to SEQ ID NO: 6942
  peptide (1)..(238): Ceres Seq. ID no. 15226203
  misc_feature (5)..(238): NCBI GI NO: 37805977 NR Description: putative 27k vesicle-associated membrane protein-associated protein
  misc_feature (1)..(238): NCBI GI NO: 11288307 NR Description: 27k vesicle-associated membrane protein-associatedprotein
  misc_feature (5)..(237): NCBI GI NO: 18411240 NR Description: VAMP
  misc_feature (5)..(237): NCBI GI NO: 21592874 NR Description: putative proline-rich protein
  misc_feature (3)..(236): NCBI GI NO: 37805852 NR Description: putative vesicle-associated membrane protein-associated protein
  misc_feature (5)..(238): NCBI GI NO: 15225415 NR Description: VAMP
  misc_feature (1)..(238): NCBI GI NO: 18411661 NR Description: VAMP
  misc_feature (5)..(238): NCBI GI NO: 21554053 NR Description: putative VAMP-associated protein
  misc_feature (1)..(238): NCBI GI NO: 11288305 NR Description: hypothetical protein T4C21
  misc_feature (5)..(202): NCBI GI NO: 7486542 NR Description: hypothetical protein F6N15

SEQ ID NO: 15179 - protein, 216 aa, Triticum aestivum; identical to SEQ ID NO: 6943
  peptide (1)..(216): Ceres Seq. ID no. 15226204
  misc_feature (1)..(216): NCBI GI NO: 37805977 NR Description: putative 27k vesicle-associated membrane protein-associated protein
  misc_feature (1)..(216): NCBI GI NO: 11288307 NR Description: 27k vesicle-associated membrane protein-associatedprotein
  misc_feature (1)..(215): NCBI GI NO: 18411240 NR Description: VAMP
  misc_feature (1)..(215): NCBI GI NO: 21592874 NR Description: putative proline-rich protein
  misc_feature (1)..(214): NCBI GI NO: 37805852 NR Description: putative vesicle-associated membrane protein-associated protein
  misc_feature (1)..(216): NCBI GI NO: 15225415 NR Description: VAMP
  misc_feature (1)..(216): NCBI GI NO: 18411661 NR Description: VAMP
  misc_feature (1)..(216): NCBI GI NO: 21554053 NR Description: putative VAMP-associated protein
  misc_feature (1)..(216): NCBI GI NO: 11288305 NR Description: hypothetical protein T4C21
  misc_feature (1)..(180): NCBI GI NO: 7486542 NR Description: hypothetical protein F6N15

SEQ ID NO: 15180 - protein, 209 aa, Triticum aestivum; identical to SEQ ID NO: 6944
  peptide (1)..(209): Ceres Seq. ID no. 15226205
  misc_feature (1)..(209): NCBI GI NO: 37805977 NR Description: putative 27k vesicle-associated membrane protein-associated protein
  misc_feature (1)..(209): NCBI GI NO: 11288307 NR Description: 27k vesicle-associated membrane protein-associatedprotein
  misc_feature (1)..(208): NCBI GI NO: 18411240 NR Description: VAMP
  misc_feature (1)..(208): NCBI GI NO: 21592874 NR Description: putative proline-rich protein
  misc_feature (1)..(207): NCBI GI NO: 37805852 NR Description: putative vesicle-associated membrane protein-associated protein
  misc_feature (1)..(209): NCBI GI NO: 15225415 NR Description: VAMP
  misc_feature (1)..(209): NCBI GI NO: 18411661 NR Description: VAMP
  misc_feature (1)..(209): NCBI GI NO: 21554053 NR Description: putative VAMP-associated protein
  misc_feature (1)..(209): NCBI GI NO: 11288305 NR Description: hypothetical protein T4C21
  misc_feature (1)..(173): NCBI GI NO: 7486542 NR Description: hypothetical protein F6N15

SEQ ID NO: 15181 - DNA, 1392 bp, Triticum aestivum
  misc_feature (1)..(1392): Ceres Seq. ID no. 13503606
cctaataacccccggtcgcctttccacggcgaaaggcatcccggcggcgatggcggcggctgcggcaaggtccggatcccggcgcttgttctccatatccgccctggtgccaccgaagccgccgacccctcccccgaaggcagaccccttcgccagcctcttcgcccccgggttaagcaagcgaacaacaactgatggacttagggaagcttttgcaaagtctggtgaagttgtgcatgcatcatctgtaaaaaattcaaggtggtatatgatcaatgcaaaccgttcaagtcctttgacagtgcgtaaagaataccgcaaagtgcttccttctttcataaggccatctgcatcttactccacagaagcctcagaaaaaagaccaaaacaggagagaacagacttgacgactgttgaagatccctttaatgcccctacctacaatatacctgagaagccagtgacatttgtcgagggcgcctcttacagtgttgtaatacttgctgggcttggagttgctgcattggctggatatgctgttttcaaagagcttatatttgaaccaaaagagtacaagatttttgggaaagctctagtaagagttcagagtgatagtcaggttacagccaaaattggttaccctataactggttatggtacggaatccagaaaccgcgcagctcggcagcgcatccaaaacagggtttggacagatgaggatggtgttgaacatgtggaggtaggctttcacatccgagggccgcatggagctggaaaggtctttgcggagatgttcaaagatagctccgacaggacatggaagttcacgtttcttctcgtcgagattacgtcaccgcgacctgcacaaatcatgttagaatcttacctaccagcatagggatgcaagagaccagatcagccagcagtggcacatccatgcgacacttcattttacatcccatctccaatggcctgcatctgatgttaaatacccgtcctcggattaaagaagttgtgaattttgaacttccccgaaagcataagtaggaggaagatgaaccatcagagctgctgaccagagtatcttagacatggtgtaccgtgcaaggaccttgatgttgttgctttgtttagctgaaaggcgtgcaggcacatgtgtacaacccttctttcccggtgctcctcaaacatgggagggagcaagtgatccttcatctatcgagttttggtcccatttcaggcagttttaatgatgcacatggatttcgtgcaagcctccaatgatgtccaaatagcaataatatctggttacattacgactttcaagcctgggtttccaggcatgtatgaagtgatcttcaatacaagggtgcatgtttctttagcattgcc

SEQ ID NO: 15182 - protein, 298 aa, Triticum aestivum
  peptide (1)..(298): Ceres Seq. ID no. 13503607
  misc_feature (18)..(83): NCBI GI NO: 38636774 NR Description: putative RNA recognition motif
  misc_feature (17)..(80): NCBI GI NO: 34898598 NR Description: P0534A03.25
  misc_feature (152)..(286): NCBI GI NO: 12839773 NR Description: unnamed protein product [Mus musculus]
  misc_feature (161)..(286): NCBI GI NO: 12850553 NR Description: unnamed protein product [Mus musculus]
  misc_feature (161)..(286): NCBI GI NO: 21313128 NR Description: RIKEN cDNA 2700002I20 [Mus musculus]
  misc_feature (161)..(293): NCBI GI NO: 7661810 NR Description: HSPC154 protein [Homo sapiens]
  misc_feature (161)..(293): NCBI GI NO: 12654149 NR Description: HSPC154 protein [Homo sapiens]
  misc_feature (106)..(294): NCBI GI NO: 17540726 NR Description: Putative protein of fungal and metazoan origin
  misc_feature (151)..(294): NCBI GI NO: 39580147 NR Description: Hypothetical protein CBG23912
  misc_feature (161)..(286): NCBI GI NO: 34932590 NR Description: similar to RIKEN cDNA 2700002I20
LITPGRLSTAKGIPAAMAAAAARSGSRRLFSISALVPPKPPTPPPKADPFASLFAPGLSKRTTTDGLREAFAKSGEVVHASSVKNSRWYMINANRSSPLTVRKEYRKVLPSFIRPSASYSTEASEKRPKQERTDLTTVEDPFNAPTYNIPEKPVTFVEGASYSVVILAGLGVAALAGYAVFKELIFEPKEYKIFGKALVRVQSDSQVTAKIGYPITGYGTESRNRAARQRIQNRVWTDEDGVEHVEVGFHIRGPHGAGKVFAEMFKDSSDRTWKFTFLLVEITSPRPAQIMLESYLPA

SEQ ID NO: 15183 - protein, 282 aa, Triticum aestivum
  peptide (1)..(282): Ceres Seq. ID no. 13503608
  misc_feature (2)..(67): NCBI GI NO: 38636774 NR Description: putative RNA recognition motif
  misc_feature (1)..(64): NCBI GI NO: 34898598 NR Description: P0534A03.25
  misc_feature (136)..(270): NCBI GI NO: 12839773 NR Description: unnamed protein product [Mus musculus]
  misc_feature (145)..(270): NCBI GI NO: 12850553 NR Description: unnamed protein product [Mus musculus]
  misc_feature (145)..(270): NCBI GI NO: 21313128 NR Description: RIKEN cDNA 2700002I20 [Mus musculus]
  misc_feature (145)..(277): NCBI GI NO: 7661810 NR Description: HSPC154 protein [Homo sapiens]
  misc_feature (145)..(277): NCBI GI NO: 12654149 NR Description: HSPC154 protein [Homo sapiens]
  misc_feature (90)..(278): NCBI GI NO: 17540726 NR Description: Putative protein of fungal and metazoan origin
  misc_feature (135)..(278): NCBI GI NO: 39580147 NR Description: Hypothetical protein CBG23912
  misc_feature (145)..(270): NCBI GI NO: 34932590 NR Description: similar to RIKEN cDNA 2700002I20
MAAAAARSGSRRLFSISALVPPKPPTPPPKADPFASLFAPGLSKRTTTDGLREAFAKSGEVVHASSVKNSRWYMINANRSSPLTVRKEYRKVLPSFIRPSASYSTEASEKRPKQERTDLTTVEDPFNAPTYNIPEKPVTFVEGASYSVVILAGLGVAALAGYAVFKELIFEPKEYKIFGKALVRVQSDSQVTAKIGYPITGYGTESRNRAARQRIQNRVWTDEDGVEHVEVGFHIRGPHGAGKVFAEMFKDSSDRTWKFTFLLVEITSPRPAQIMLESYLPA

SEQ ID NO: 15184 - protein, 209 aa, Triticum aestivum
  peptide (1)..(209): Ceres Seq. ID no. 13503609
  misc_feature (63)..(197): NCBI GI NO: 12839773 NR Description: unnamed protein product [Mus musculus]
  misc_feature (72)..(197): NCBI GI NO: 12850553 NR Description: unnamed protein product [Mus musculus]
  misc_feature (72)..(197): NCBI GI NO: 21313128 NR Description: RIKEN cDNA 2700002I20 [Mus musculus]
  misc_feature (72)..(204): NCBI GI NO: 7661810 NR Description: HSPC154 protein [Homo sapiens]
  misc_feature (72)..(204): NCBI GI NO: 12654149 NR Description: HSPC154 protein [Homo sapiens]
  misc_feature (17)..(205): NCBI GI NO: 17540726 NR Description: Putative protein of fungal and metazoan origin
  misc_feature (62)..(205): NCBI GI NO: 39580147 NR Description: Hypothetical protein CBG23912
  misc_feature (72)..(197): NCBI GI NO: 34932590 NR Description: similar to RIKEN cDNA 2700002I20
MINANRSSPLTVRKEYRKVLPSFIRPSASYSTEASEKRPKQERTDLTTVEDPFNAPTYNIPEKPVTFVEGASYSVVILAGLGVAALAGYAVFKELIFEPKEYKIFGKALVRVQSDSQVTAKIGYPITGYGTESRNRAARQRIQNRVWTDEDGVEHVEVGFHIRGPHGAGKVFAEMFKDSSDRTWKFTFLLVEITSPRPAQIMLESYLPA

SEQ ID NO: 15185 - DNA, 1395 bp, Triticum aestivum
  misc_feature (1)..(1395): Ceres Seq. ID no. 13584933
atctgaatgctagaaggaggtggttggacgatgaggcatcccaacacggtagaaggagttccgcctatcgaagttgagagggccaatttgaaaaaaagaaaaagttgagagggacagagagggaaacatctgggcattctcgttgcagaaagtagagcgctgtacaaacgggccttcacgaaccaagagacatccatcaaatttcatggcgtcctctccacaatcctcctcctctgcacccaaagccgacgacaaggcagcgtcccacaaagaaatctacgaccagctactagaggtcgtgtccacctacccgacggcgcctagcggcatcggccgcccgtacacccaccacccagacggctggtacgcgttcacgccggccgtcgtgaacgccatggtcatcaagcggcacctcaaggcgtgcgacaccgacgtcttcctctccacctttcccaagtccggcaccacctggctcaaggcgctcctgtttgcgaccctccgccgcaccgcggacgggccagcgatcgcggcgctcgcagcccacagcccccaccagctcatccctttcctcgaggtccaggttttcagcaacggccggatcccagacctgagctccctccctgcgccgcggctcctgatgacgcacatcccgtcccggtcgctgccggagtccgtggccgcctccggctgcaaggtggtgtacctgtgccgggaccccaaggactgcttcgtgtcgctctggcacttctggaaccggttcgcgccgtcgccgtgggacctcggtgaggcgctccagcagttctgcgacggcgtctccctgttcgggcctttctgggagcacgtgctgggctactggcgctggcatgtggagaggccggagcaggttctattcctgacctacgaggagctcgccgccgacaccctcggccagctgaagcggctcgctgcgtttctcgggcgcccgttcacgtcagaggagcgggaagccagggtagacagggagatcgtggaggcatgcgccatggagagcctggcgggactggaggtgaaccgctccgggaagacggacatgaccgagtcttcagtggcgaacaacatattcttccggcgcggcgtcgttggcgactggaagaaccacctgacgccggagatggctagaaggatcgatgagatcaccgatagcaagttcagaggatcggggttggcgttgacgccggcaaccgcagatcagaactagtgggttcatgatggcagatgctatataaataaggacgacttgcgcaacatttttataaaatattgtactattaatgtcaggcatgataacttgatcagcaaacatgcgaagggaaataacagaagtgttaccatacagtaatatacatgaatatcgtt

SEQ ID NO: 15186 - protein, 343 aa, Triticum aestivum
  peptide (1)..(343): Ceres Seq. ID no. 13584934
  misc_feature (74)..(332): Pfam Name: Pfam Description:  Sulfotransferase domain
  misc_feature (1)..(335): NCBI GI NO: 34894524 NR Description: putative steroid sulfotransferase
  misc_feature (1)..(333): NCBI GI NO: 38344441 NR Description: OSJNBa0038O10.13
  misc_feature (22)..(333): NCBI GI NO: 15230602 NR Description: sulfotransferase family [Arabidopsis thaliana]
  misc_feature (17)..(333): NCBI GI NO: 9759557 NR Description: steroid sulfotransferase-like protein
  misc_feature (17)..(333): NCBI GI NO: 18415376 NR Description: sulfotransferase family [Arabidopsis thaliana]
  misc_feature (17)..(333): NCBI GI NO: 15809903 NR Description: AT5g07010/MOJ9_18 [Arabidopsis thaliana]
  misc_feature (31)..(333): NCBI GI NO: 18395604 NR Description: sulfotransferase family [Arabidopsis thaliana]
  misc_feature (31)..(333): NCBI GI NO: 25288806 NR Description: probable steroid sulfotransferase
  misc_feature (30)..(335): NCBI GI NO: 34905060 NR Description: putative flavonol 4'-sulfotransferase
  misc_feature (53)..(333): NCBI GI NO: 15239947 NR Description: sulfotransferase family [Arabidopsis thaliana]
MASSPQSSSSAPKADDKAASHKEIYDQLLEVVSTYPTAPSGIGRPYTHHPDGWYAFTPAVVNAMVIKRHLKACDTDVFLSTFPKSGTTWLKALLFATLRRTADGPAIAALAAHSPHQLIPFLEVQVFSNGRIPDLSSLPAPRLLMTHIPSRSLPESVAASGCKVVYLCRDPKDCFVSLWHFWNRFAPSPWDLGEALQQFCDGVSLFGPFWEHVLGYWRWHVERPEQVLFLTYEELAADTLGQLKRLAAFLGRPFTSEEREARVDREIVEACAMESLAGLEVNRSGKTDMTESSVANNIFFRRGVVGDWKNHLTPEMARRIDEITDSKFRGSGLALTPATADQN

SEQ ID NO: 15187 - protein, 280 aa, Triticum aestivum
  peptide (1)..(280): Ceres Seq. ID no. 13584935
  misc_feature (11)..(269): Pfam Name: Pfam Description:  Sulfotransferase domain
  misc_feature (1)..(272): NCBI GI NO: 34894524 NR Description: putative steroid sulfotransferase
  misc_feature (1)..(270): NCBI GI NO: 38344441 NR Description: OSJNBa0038O10.13
  misc_feature (1)..(270): NCBI GI NO: 15230602 NR Description: sulfotransferase family [Arabidopsis thaliana]
  misc_feature (1)..(270): NCBI GI NO: 9759557 NR Description: steroid sulfotransferase-like protein
  misc_feature (1)..(270): NCBI GI NO: 18415376 NR Description: sulfotransferase family [Arabidopsis thaliana]
  misc_feature (1)..(270): NCBI GI NO: 15809903 NR Description: AT5g07010/MOJ9_18 [Arabidopsis thaliana]
  misc_feature (1)..(270): NCBI GI NO: 18395604 NR Description: sulfotransferase family [Arabidopsis thaliana]
  misc_feature (1)..(270): NCBI GI NO: 25288806 NR Description: probable steroid sulfotransferase
  misc_feature (1)..(272): NCBI GI NO: 34905060 NR Description: putative flavonol 4'-sulfotransferase
  misc_feature (1)..(270): NCBI GI NO: 15239947 NR Description: sulfotransferase family [Arabidopsis thaliana]
MVIKRHLKACDTDVFLSTFPKSGTTWLKALLFATLRRTADGPAIAALAAHSPHQLIPFLEVQVFSNGRIPDLSSLPAPRLLMTHIPSRSLPESVAASGCKVVYLCRDPKDCFVSLWHFWNRFAPSPWDLGEALQQFCDGVSLFGPFWEHVLGYWRWHVERPEQVLFLTYEELAADTLGQLKRLAAFLGRPFTSEEREARVDREIVEACAMESLAGLEVNRSGKTDMTESSVANNIFFRRGVVGDWKNHLTPEMARRIDEITDSKFRGSGLALTPATADQN

SEQ ID NO: 15188 - protein, 199 aa, Triticum aestivum
  peptide (1)..(199): Ceres Seq. ID no. 13584936
  misc_feature (1)..(188): Pfam Name: Pfam Description:  Sulfotransferase domain
  misc_feature (1)..(191): NCBI GI NO: 34894524 NR Description: putative steroid sulfotransferase
  misc_feature (1)..(189): NCBI GI NO: 38344441 NR Description: OSJNBa0038O10.13
  misc_feature (1)..(189): NCBI GI NO: 15230602 NR Description: sulfotransferase family [Arabidopsis thaliana]
  misc_feature (1)..(189): NCBI GI NO: 9759557 NR Description: steroid sulfotransferase-like protein
  misc_feature (1)..(189): NCBI GI NO: 18415376 NR Description: sulfotransferase family [Arabidopsis thaliana]
  misc_feature (1)..(189): NCBI GI NO: 15809903 NR Description: AT5g07010/MOJ9_18 [Arabidopsis thaliana]
  misc_feature (1)..(189): NCBI GI NO: 18395604 NR Description: sulfotransferase family [Arabidopsis thaliana]
  misc_feature (1)..(189): NCBI GI NO: 25288806 NR Description: probable steroid sulfotransferase
  misc_feature (1)..(191): NCBI GI NO: 34905060 NR Description: putative flavonol 4'-sulfotransferase
  misc_feature (1)..(189): NCBI GI NO: 15239947 NR Description: sulfotransferase family [Arabidopsis thaliana]
MTHIPSRSLPESVAASGCKVVYLCRDPKDCFVSLWHFWNRFAPSPWDLGEALQQFCDGVSLFGPFWEHVLGYWRWHVERPEQVLFLTYEELAADTLGQLKRLAAFLGRPFTSEEREARVDREIVEACAMESLAGLEVNRSGKTDMTESSVANNIFFRRGVVGDWKNHLTPEMARRIDEITDSKFRGSGLALTPATADQN

SEQ ID NO: 15189 - DNA, 1426 bp, Triticum aestivum
  misc_feature (1)..(1426): Ceres Seq. ID no. 14302836
ccattccattccatcccccttcatcttcttgtagccaccgagccagccagcgaccgagcggcggcgatttccatttcatctcagaattcagacggtgttcttgtctagagcaagaggggtttcttggcgttgatgtcgatggcgcaggtgtgctgtgactcggcctcgtcggcggtggtggtcggtgcggaggcggaggccagggccagggcgcgcgccgggaggcgccgcagagcgggcgacgcggcagccaggtggaaggtcaccgcggaggcgccgcagggcgccgaggaggccgcggccacgaggaagcgccgcgcggctgggggcgagggggtgcccgcgaaacgccacgggttcacgtcggttgccggacggaggagggagatggaggatgccgtctccatacgggaggccttcaccgtcccggccgaggaggggaagcccaggcgcgacttctacggcgttttcgacggacacggctgctcgcacgtggcggacgcgtgcagagaccggatgcacgagctcgttgccgaggagctcgccggcgcggcccagcccgagtcctggaccggcgcaatggagcgcagtttcgcgaggatggacgccgaggtgaccgccagcgggggcggcgacagcgccagctgccgctgcgaggccaacaagtgcgaccacgtggggtccacggccgtggtggccgtcgtgggggagcagcgcgtcctggtggccaactgcggcgactcccgcgccgtcctctgccgcgacggcgcgcccgtcgtcctctcctccgaccacaagcccgacaggccggacgagctggagaggatcgaggcggccggcggccgcgtcatattctgggagggcgcgagggtgctgggcgttctggccatgtcgcgcgccatcggcgacggctacctgaagccgttcgtgacggcggtcccggaggtgacggtgaccgacagggcggccggcgacgagtgcctgatccttgccagcgacggcctgtgggacgtggtcaacaacgagacagcgtgcgaggtggcgcgggcctgcctccggaggggcagagacaggtggtgcgccgaggcggcggccatgctcaccaagctggctctgaccaagaacagctcggacaacatctccgttgtcgtcgtcgatctccggccaaggaatcatttgtaggagggcgaccagctgccgtgatcttccattgcaacaatagcagtatagtagtagtaacagtaggatcaaatccaaaactagctctatagtgattctactgattatttctcttcttcaaaattcatttttttttttttttttttttttttttgcaatatttctccctggatcaagttcagtggagcacatagattatggtggggttgtggaaagaaataacaactggtgtaaccaagttcgatcc

SEQ ID NO: 15190 - protein, 349 aa, Triticum aestivum
  peptide (1)..(349): Ceres Seq. ID no. 14302837
  misc_feature (73)..(307): Pfam Name: Pfam Description:  Protein phosphatase 2C
  misc_feature (3)..(312): NCBI GI NO: 34902050 NR Description: putative Serine/threonine phosphatases
  misc_feature (313)..(346): NCBI GI NO: 34902050 NR Description: putative Serine/threonine phosphatases
  misc_feature (28)..(307): NCBI GI NO: 34908256 NR Description: putative protein phosphatase 2C
  misc_feature (297)..(344): NCBI GI NO: 34908256 NR Description: putative protein phosphatase 2C
  misc_feature (3)..(344): NCBI GI NO: 15227078 NR Description: protein phosphatase 2C (PP2C), putative
  misc_feature (73)..(314): NCBI GI NO: 15222398 NR Description: protein phosphatase 2C (PP2C), putative
  misc_feature (309)..(346): NCBI GI NO: 15222398 NR Description: protein phosphatase 2C (PP2C), putative
  misc_feature (67)..(344): NCBI GI NO: 33309516 NR Description: protein phosphatase 2C [Prunus avium]
  misc_feature (73)..(314): NCBI GI NO: 21537020 NR Description: protein phosphatase 2C, putative
  misc_feature (309)..(346): NCBI GI NO: 21537020 NR Description: protein phosphatase 2C, putative
MSMAQVCCDSASSAVVVGAEAEARARARAGRRRRAGDAAARWKVTAEAPQGAEEAAATRKRRAAGGEGVPAKRHGFTSVAGRRREMEDAVSIREAFTVPAEEGKPRRDFYGVFDGHGCSHVADACRDRMHELVAEELAGAAQPESWTGAMERSFARMDAEVTASGGGDSASCRCEANKCDHVGSTAVVAVVGEQRVLVANCGDSRAVLCRDGAPVVLSSDHKPDRPDELERIEAAGGRVIFWEGARVLGVLAMSRAIGDGYLKPFVTAVPEVTVTDRAAGDECLILASDGLWDVVNNETACEVARACLRRGRDRWCAEAAAMLTKLALTKNSSDNISVVVVDLRPRNHL

SEQ ID NO: 15191 - protein, 347 aa, Triticum aestivum
  peptide (1)..(347): Ceres Seq. ID no. 14302838
  misc_feature (71)..(305): Pfam Name: Pfam Description:  Protein phosphatase 2C
  misc_feature (1)..(310): NCBI GI NO: 34902050 NR Description: putative Serine/threonine phosphatases
  misc_feature (311)..(344): NCBI GI NO: 34902050 NR Description: putative Serine/threonine phosphatases
  misc_feature (26)..(305): NCBI GI NO: 34908256 NR Description: putative protein phosphatase 2C
  misc_feature (295)..(342): NCBI GI NO: 34908256 NR Description: putative protein phosphatase 2C
  misc_feature (1)..(342): NCBI GI NO: 15227078 NR Description: protein phosphatase 2C (PP2C), putative
  misc_feature (71)..(312): NCBI GI NO: 15222398 NR Description: protein phosphatase 2C (PP2C), putative
  misc_feature (307)..(344): NCBI GI NO: 15222398 NR Description: protein phosphatase 2C (PP2C), putative
  misc_feature (65)..(342): NCBI GI NO: 33309516 NR Description: protein phosphatase 2C [Prunus avium]
  misc_feature (71)..(312): NCBI GI NO: 21537020 NR Description: protein phosphatase 2C, putative
  misc_feature (307)..(344): NCBI GI NO: 21537020 NR Description: protein phosphatase 2C, putative
MAQVCCDSASSAVVVGAEAEARARARAGRRRRAGDAAARWKVTAEAPQGAEEAAATRKRRAAGGEGVPAKRHGFTSVAGRRREMEDAVSIREAFTVPAEEGKPRRDFYGVFDGHGCSHVADACRDRMHELVAEELAGAAQPESWTGAMERSFARMDAEVTASGGGDSASCRCEANKCDHVGSTAVVAVVGEQRVLVANCGDSRAVLCRDGAPVVLSSDHKPDRPDELERIEAAGGRVIFWEGARVLGVLAMSRAIGDGYLKPFVTAVPEVTVTDRAAGDECLILASDGLWDVVNNETACEVARACLRRGRDRWCAEAAAMLTKLALTKNSSDNISVVVVDLRPRNHL

SEQ ID NO: 15192 - protein, 264 aa, Triticum aestivum
  peptide (1)..(264): Ceres Seq. ID no. 14302839
  misc_feature (1)..(222): Pfam Name: Pfam Description:  Protein phosphatase 2C
  misc_feature (1)..(227): NCBI GI NO: 34902050 NR Description: putative Serine/threonine phosphatases
  misc_feature (228)..(261): NCBI GI NO: 34902050 NR Description: putative Serine/threonine phosphatases
  misc_feature (1)..(222): NCBI GI NO: 34908256 NR Description: putative protein phosphatase 2C
  misc_feature (212)..(259): NCBI GI NO: 34908256 NR Description: putative protein phosphatase 2C
  misc_feature (1)..(259): NCBI GI NO: 15227078 NR Description: protein phosphatase 2C (PP2C), putative
  misc_feature (1)..(229): NCBI GI NO: 15222398 NR Description: protein phosphatase 2C (PP2C), putative
  misc_feature (224)..(261): NCBI GI NO: 15222398 NR Description: protein phosphatase 2C (PP2C), putative
  misc_feature (1)..(259): NCBI GI NO: 33309516 NR Description: protein phosphatase 2C [Prunus avium]
  misc_feature (1)..(229): NCBI GI NO: 21537020 NR Description: protein phosphatase 2C, putative
  misc_feature (224)..(261): NCBI GI NO: 21537020 NR Description: protein phosphatase 2C, putative
MEDAVSIREAFTVPAEEGKPRRDFYGVFDGHGCSHVADACRDRMHELVAEELAGAAQPESWTGAMERSFARMDAEVTASGGGDSASCRCEANKCDHVGSTAVVAVVGEQRVLVANCGDSRAVLCRDGAPVVLSSDHKPDRPDELERIEAAGGRVIFWEGARVLGVLAMSRAIGDGYLKPFVTAVPEVTVTDRAAGDECLILASDGLWDVVNNETACEVARACLRRGRDRWCAEAAAMLTKLALTKNSSDNISVVVVDLRPRNHL

SEQ ID NO: 15193 - DNA, 1891 bp, Triticum aestivum
  misc_feature (1)..(1891): Ceres Seq. ID no. 13597546
aaaacaaacccacacacaacccctctgtctcctcctccttggctttgctagcttcctgctcccttcgcttcccacatgcagccatatcttgagctagcttctctccgcatcaccgccaccatcccgctgtccccaagaatatatagcaccatcttcctcgaggccatggctgccatggcctatatagccctccggggcgcggcattggccgccatcgtcgccctcatccattgggtgtacaggtggcgccaccccaaatgcgccggcacgctcccgccgggatccatgggcatccccatcatcggcgagacgctgcagttcttcgcccccaacccgacctgcggcctctcccccttcgtccgggacagggtgaagaggtacgggagcatgttcaagacgagcatcgtggggcggccggtggtggtgtcggcggacccggacgtgaaccactacgtgttccagaacgaggggaagctgttcgagagctggtacccggacaccttcaccgagatcttcggccgcgacaacgtcggctccctgcacggcttcatctacaagtacctcaagaccctcgtgctccgcctctacggccaggagaacctcaaggcggtgctcctcgccgagaccgacgccgcctgccgcggcagcctcgccgcgtgggcggcgcagccctgtgtcgacatcaaagacgggctctccactatgatatttgatcttactgccaagaagctgatcggctacgagccgaccaagtcctcggagagcctgcgggagaatttcacggcgttcattcgcggcctgatctcgttccccctcaacattcccggcacggcctatcacgaatgcatggaggggaggaagaaagcgatgaaggtgctcaagggcatgatgcaggagaggatggcggatccggagaggaagtgcgaggacttcttcgaccacgtgatccaggaactgaggagggagaagccgcttctgacggagaccatcgcgctggacctcatgttcgtgctcctcttcgccagcttcgagaccacggcgctcgccctcaccctcggcgtcaagctgctcaccgagaaccccagagtcgtcgacgcgctaacggaggaacacgaagcgatcgtgaggaacagggaggacccagatgccgcgatcacgtgggccgagtacaagtcgatgaccttcacagctcatgtcatcatggagatcgtcagactcgccaacatcgtgccggggattttccggaaggccttgcaagacgttgagatcaaaggctacacggttccagcgggatggggtatcatggtgtgtccgccggcggtgcacctaaaccctgacatatacgaagatccgctggcgttcaacccatggaggtggcaggacaaacctgaaatcaccggcggaacgaagcatttcatggcgttcggaggcgggcttcggttctgcgtcggaaccgatctcaccaaggtcttgatggcaacattcattcacaatcttgttacgaaatacagatggaagacagtaaaaggagggaacatagtccggacgccgggcctcggcttcccggatggctttgacatccagctcttccctaagaactgacccttttttgatgatatctcgacagtttagtggttgcagttaaacacaagattgttcctgcaaaagatcacattttaggatggaaaaccatatacttagtctagtggtaggatacacattcctagttataactacagtcatattgccgggtaccacctctcatggatccagaatgggttttttgtacttttggctgttcgttttccatgtggttagtcatctatccatgtgttgtgtgtaaatcaatcccatacatctcaaatgagaaagagagcatattaactgtgtg

SEQ ID NO: 15194 - protein, 508 aa, Triticum aestivum
  peptide (1)..(508): Ceres Seq. ID no. 13597547
  misc_feature (245)..(505): Pfam Name: Pfam Description:  Cytochrome P450
  misc_feature (1)..(508): NCBI GI NO: 20520627 NR Description: putative cytochrome P450
  misc_feature (32)..(508): NCBI GI NO: 38567920 NR Description: OSJNBa0088I22.16
  misc_feature (47)..(507): NCBI GI NO: 30682922 NR Description: cytochrome P450, putative [Arabidopsis thaliana]
  misc_feature (47)..(507): NCBI GI NO: 9502380 NR Description: T12C24.27 [Arabidopsis thaliana]
  misc_feature (35)..(508): NCBI GI NO: 38567916 NR Description: OSJNBa0088I22.12
  misc_feature (33)..(507): NCBI GI NO: 18483228 NR Description: putative cytochrome P450-like protein
  misc_feature (110)..(507): NCBI GI NO: 27764671 NR Description: putative hydroxylase
  misc_feature (31)..(445): NCBI GI NO: 38567917 NR Description: OSJNBa0088I22.13
  misc_feature (174)..(480): NCBI GI NO: 28564842 NR Description: putative cytochrome P450
  misc_feature (59)..(131): NCBI GI NO: 28564842 NR Description: putative cytochrome P450
MQPYLELASLRITATIPLSPRIYSTIFLEAMAAMAYIALRGAALAAIVALIHWVYRWRHPKCAGTLPPGSMGIPIIGETLQFFAPNPTCGLSPFVRDRVKRYGSMFKTSIVGRPVVVSADPDVNHYVFQNEGKLFESWYPDTFTEIFGRDNVGSLHGFIYKYLKTLVLRLYGQENLKAVLLAETDAACRGSLAAWAAQPCVDIKDGLSTMIFDLTAKKLIGYEPTKSSESLRENFTAFIRGLISFPLNIPGTAYHECMEGRKKAMKVLKGMMQERMADPERKCEDFFDHVIQELRREKPLLTETIALDLMFVLLFASFETTALALTLGVKLLTENPRVVDALTEEHEAIVRNREDPDAAITWAEYKSMTFTAHVIMEIVRLANIVPGIFRKALQDVEIKGYTVPAGWGIMVCPPAVHLNPDIYEDPLAFNPWRWQDKPEITGGTKHFMAFGGGLRFCVGTDLTKVLMATFIHNLVTKYRWKTVKGGNIVRTPGLGFPDGFDIQLFPKN

SEQ ID NO: 15195 - protein, 478 aa, Triticum aestivum
  peptide (1)..(478): Ceres Seq. ID no. 13597548
  misc_feature (215)..(475): Pfam Name: Pfam Description:  Cytochrome P450
  misc_feature (1)..(478): NCBI GI NO: 20520627 NR Description: putative cytochrome P450
  misc_feature (2)..(478): NCBI GI NO: 38567920 NR Description: OSJNBa0088I22.16
  misc_feature (17)..(477): NCBI GI NO: 30682922 NR Description: cytochrome P450, putative [Arabidopsis thaliana]
  misc_feature (17)..(477): NCBI GI NO: 9502380 NR Description: T12C24.27 [Arabidopsis thaliana]
  misc_feature (5)..(478): NCBI GI NO: 38567916 NR Description: OSJNBa0088I22.12
  misc_feature (3)..(477): NCBI GI NO: 18483228 NR Description: putative cytochrome P450-like protein
  misc_feature (80)..(477): NCBI GI NO: 27764671 NR Description: putative hydroxylase
  misc_feature (1)..(415): NCBI GI NO: 38567917 NR Description: OSJNBa0088I22.13
  misc_feature (144)..(450): NCBI GI NO: 28564842 NR Description: putative cytochrome P450
  misc_feature (29)..(101): NCBI GI NO: 28564842 NR Description: putative cytochrome P450
MAAMAYIALRGAALAAIVALIHWVYRWRHPKCAGTLPPGSMGIPIIGETLQFFAPNPTCGLSPFVRDRVKRYGSMFKTSIVGRPVVVSADPDVNHYVFQNEGKLFESWYPDTFTEIFGRDNVGSLHGFIYKYLKTLVLRLYGQENLKAVLLAETDAACRGSLAAWAAQPCVDIKDGLSTMIFDLTAKKLIGYEPTKSSESLRENFTAFIRGLISFPLNIPGTAYHECMEGRKKAMKVLKGMMQERMADPERKCEDFFDHVIQELRREKPLLTETIALDLMFVLLFASFETTALALTLGVKLLTENPRVVDALTEEHEAIVRNREDPDAAITWAEYKSMTFTAHVIMEIVRLANIVPGIFRKALQDVEIKGYTVPAGWGIMVCPPAVHLNPDIYEDPLAFNPWRWQDKPEITGGTKHFMAFGGGLRFCVGTDLTKVLMATFIHNLVTKYRWKTVKGGNIVRTPGLGFPDGFDIQLFPKN

SEQ ID NO: 15196 - protein, 475 aa, Triticum aestivum
  peptide (1)..(475): Ceres Seq. ID no. 13597549
  misc_feature (212)..(472): Pfam Name: Pfam Description:  Cytochrome P450
  misc_feature (1)..(475): NCBI GI NO: 20520627 NR Description: putative cytochrome P450
  misc_feature (1)..(475): NCBI GI NO: 38567920 NR Description: OSJNBa0088I22.16
  misc_feature (14)..(474): NCBI GI NO: 30682922 NR Description: cytochrome P450, putative [Arabidopsis thaliana]
  misc_feature (14)..(474): NCBI GI NO: 9502380 NR Description: T12C24.27 [Arabidopsis thaliana]
  misc_feature (2)..(475): NCBI GI NO: 38567916 NR Description: OSJNBa0088I22.12
  misc_feature (1)..(474): NCBI GI NO: 18483228 NR Description: putative cytochrome P450-like protein
  misc_feature (77)..(474): NCBI GI NO: 27764671 NR Description: putative hydroxylase
  misc_feature (1)..(412): NCBI GI NO: 38567917 NR Description: OSJNBa0088I22.13
  misc_feature (141)..(447): NCBI GI NO: 28564842 NR Description: putative cytochrome P450
  misc_feature (26)..(98): NCBI GI NO: 28564842 NR Description: putative cytochrome P450
MAYIALRGAALAAIVALIHWVYRWRHPKCAGTLPPGSMGIPIIGETLQFFAPNPTCGLSPFVRDRVKRYGSMFKTSIVGRPVVVSADPDVNHYVFQNEGKLFESWYPDTFTEIFGRDNVGSLHGFIYKYLKTLVLRLYGQENLKAVLLAETDAACRGSLAAWAAQPCVDIKDGLSTMIFDLTAKKLIGYEPTKSSESLRENFTAFIRGLISFPLNIPGTAYHECMEGRKKAMKVLKGMMQERMADPERKCEDFFDHVIQELRREKPLLTETIALDLMFVLLFASFETTALALTLGVKLLTENPRVVDALTEEHEAIVRNREDPDAAITWAEYKSMTFTAHVIMEIVRLANIVPGIFRKALQDVEIKGYTVPAGWGIMVCPPAVHLNPDIYEDPLAFNPWRWQDKPEITGGTKHFMAFGGGLRFCVGTDLTKVLMATFIHNLVTKYRWKTVKGGNIVRTPGLGFPDGFDIQLFPKN

SEQ ID NO: 15197 - DNA, 1645 bp, Triticum aestivum
  misc_feature (1)..(1645): Ceres Seq. ID no. 14302255
atagctctcattcatctcgtgagaaacacagtgtgatatggcgacgtcatggctcctcaggcatccttgtccactggctaggccatggaccagaacaaggaatgatataggtctccatgtgaccagcatcgcctactgctactggagatgcactaggaccagtggaggaggaagaatcatggcggatatgagtatgaacaccaccaactgcacggcagaacccgcccttctaccccaagctgatgctgccgaactagcagggggagccgaccatcctcctagacttagtaagagaagcgcgcgcactggccggggcgccgccgttgcggctaggcacgaggaggagggcactgacgacgaatggctcatgtacctggagccggcgaagctacaggtgttcgaccatctggagccttgggcggaggcgaatgtggtgccgctccttaagcccgccgaggtagcgtggcagccgacggacttgctgccggatctggcgtcgctgggcaccgacggcttccacgcggcgtgctccgacatcacagcgcgcgcggccggcctgcccgacgcgcacctcgtatgcctcgtggggaacatggtcacggaggaggcgctgccaacttaccagagcatacccaaccgcttcgaggccgtgcgcgacctcaccggctccagcggcactgcctgggcgcgctggatccgcggctggtctgccgaggagaaccggcacggcgacgtgcttaacaggtacctcttcctctccggccgcgtcgacatgcggcaggtcgagaggaccatccacaacctcatccagtccggcatggtcatgaacgctgcgcggagcccctaccacggcttcatctacgtcgccttccaggagcgtgccacctccatctctcacggcaacacagcccgtcgcgccaaggagtatggcgacgtggcgctcgcgcgcatatgcggtgccatcgcggctgacgagaagcggcacgagctggcctacacgcggatcgtggggaagctgttcgagatcgacccggacggcgccgtgcgcgcgctggcgtacatgatgcgccgccggatcgtcatgccggcgtccctcatgacagacggccgcgacggtgacctcttcgcgcactacgcggccgtggcgcagcaggccggcatttacaccgcctcggactaccgtagcattttggagcacctgataaagcagtggggggtgaaagagctggcagcggccgaactctccgacgacgggaggcgtgcgcgggactacgtgtgcgcgttgccccaaaagatccgcaggttggaggaaaaggctcacgagcgcagcggccagaaaacccagcctgcaacatcggccccgtttagctggatctttgataagcctgtcaacaacaccatggggtaatcaaattattgttgttatataccctaaatatcctttaaatcattatttctcgatcctatctttgagatgaagtattcttcatctctactttgctagtgtcggcgccagtaaaagtactttttttttctgatcgggttgaagctatgaggatggtattgtactactgtatttttgtaagttgttttatcacattctaaaaataaatacagggagagtgaaagttgtattcaaaaaaat

SEQ ID NO: 15198 - protein, 456 aa, Triticum aestivum
  peptide (1)..(456): Ceres Seq. ID no. 14302256
  misc_feature (80)..(452): NCBI GI NO: 38636957 NR Description: putative AE9 stearoyl-ACP desaturase
  misc_feature (95)..(452): NCBI GI NO: 38637315 NR Description: putative Acyl-
  misc_feature (113)..(451): NCBI GI NO: 6983690 NR Description: AE9 stearoyl-ACP desaturase [Gossypium hirsutum]
  misc_feature (113)..(451): NCBI GI NO: 3915031 NR Description: Acyl-
  misc_feature (117)..(451): NCBI GI NO: 30089750 NR Description: putative stearoyl-acyl-carrier protein desaturase
  misc_feature (113)..(451): NCBI GI NO: 7433271 NR Description: acyl-
  misc_feature (113)..(451): NCBI GI NO: 134945 NR Description: Acyl-
  misc_feature (113)..(451): NCBI GI NO: 31615832 NR Description: Chain A
  misc_feature (113)..(451): NCBI GI NO: 951427 NR Description: stearoyl-acyl-carrier protein desaturase
  misc_feature (113)..(451): NCBI GI NO: 2194093 NR Description: Chain A
MATSWLLRHPCPLARPWTRTRNDIGLHVTSIAYCYWRCTRTSGGGRIMADMSMNTTNCTAEPALLPQADAAELAGGADHPPRLSKRSARTGRGAAVAARHEEEGTDDEWLMYLEPAKLQVFDHLEPWAEANVVPLLKPAEVAWQPTDLLPDLASLGTDGFHAACSDITARAAGLPDAHLVCLVGNMVTEEALPTYQSIPNRFEAVRDLTGSSGTAWARWIRGWSAEENRHGDVLNRYLFLSGRVDMRQVERTIHNLIQSGMVMNAARSPYHGFIYVAFQERATSISHGNTARRAKEYGDVALARICGAIAADEKRHELAYTRIVGKLFEIDPDGAVRALAYMMRRRIVMPASLMTDGRDGDLFAHYAAVAQQAGIYTASDYRSILEHLIKQWGVKELAAAELSDDGRRARDYVCALPQKIRRLEEKAHERSGQKTQPATSAPFSWIFDKPVNNTMG

SEQ ID NO: 15199 - protein, 409 aa, Triticum aestivum
  peptide (1)..(409): Ceres Seq. ID no. 14302257
  misc_feature (33)..(405): NCBI GI NO: 38636957 NR Description: putative AE9 stearoyl-ACP desaturase
  misc_feature (48)..(405): NCBI GI NO: 38637315 NR Description: putative Acyl-
  misc_feature (66)..(404): NCBI GI NO: 6983690 NR Description: AE9 stearoyl-ACP desaturase [Gossypium hirsutum]
  misc_feature (66)..(404): NCBI GI NO: 3915031 NR Description: Acyl-
  misc_feature (70)..(404): NCBI GI NO: 30089750 NR Description: putative stearoyl-acyl-carrier protein desaturase
  misc_feature (66)..(404): NCBI GI NO: 7433271 NR Description: acyl-
  misc_feature (66)..(404): NCBI GI NO: 134945 NR Description: Acyl-
  misc_feature (66)..(404): NCBI GI NO: 31615832 NR Description: Chain A
  misc_feature (66)..(404): NCBI GI NO: 951427 NR Description: stearoyl-acyl-carrier protein desaturase
  misc_feature (66)..(404): NCBI GI NO: 2194093 NR Description: Chain A
MADMSMNTTNCTAEPALLPQADAAELAGGADHPPRLSKRSARTGRGAAVAARHEEEGTDDEWLMYLEPAKLQVFDHLEPWAEANVVPLLKPAEVAWQPTDLLPDLASLGTDGFHAACSDITARAAGLPDAHLVCLVGNMVTEEALPTYQSIPNRFEAVRDLTGSSGTAWARWIRGWSAEENRHGDVLNRYLFLSGRVDMRQVERTIHNLIQSGMVMNAARSPYHGFIYVAFQERATSISHGNTARRAKEYGDVALARICGAIAADEKRHELAYTRIVGKLFEIDPDGAVRALAYMMRRRIVMPASLMTDGRDGDLFAHYAAVAQQAGIYTASDYRSILEHLIKQWGVKELAAAELSDDGRRARDYVCALPQKIRRLEEKAHERSGQKTQPATSAPFSWIFDKPVNNTMG

SEQ ID NO: 15200 - protein, 406 aa, Triticum aestivum
  peptide (1)..(406): Ceres Seq. ID no. 14302258
  misc_feature (30)..(402): NCBI GI NO: 38636957 NR Description: putative AE9 stearoyl-ACP desaturase
  misc_feature (45)..(402): NCBI GI NO: 38637315 NR Description: putative Acyl-
  misc_feature (63)..(401): NCBI GI NO: 6983690 NR Description: AE9 stearoyl-ACP desaturase [Gossypium hirsutum]
  misc_feature (63)..(401): NCBI GI NO: 3915031 NR Description: Acyl-
  misc_feature (67)..(401): NCBI GI NO: 30089750 NR Description: putative stearoyl-acyl-carrier protein desaturase
  misc_feature (63)..(401): NCBI GI NO: 7433271 NR Description: acyl-
  misc_feature (63)..(401): NCBI GI NO: 134945 NR Description: Acyl-
  misc_feature (63)..(401): NCBI GI NO: 951427 NR Description: stearoyl-acyl-carrier protein desaturase
  misc_feature (63)..(401): NCBI GI NO: 31615832 NR Description: Chain A
  misc_feature (63)..(401): NCBI GI NO: 2194093 NR Description: Chain A
MSMNTTNCTAEPALLPQADAAELAGGADHPPRLSKRSARTGRGAAVAARHEEEGTDDEWLMYLEPAKLQVFDHLEPWAEANVVPLLKPAEVAWQPTDLLPDLASLGTDGFHAACSDITARAAGLPDAHLVCLVGNMVTEEALPTYQSIPNRFEAVRDLTGSSGTAWARWIRGWSAEENRHGDVLNRYLFLSGRVDMRQVERTIHNLIQSGMVMNAARSPYHGFIYVAFQERATSISHGNTARRAKEYGDVALARICGAIAADEKRHELAYTRIVGKLFEIDPDGAVRALAYMMRRRIVMPASLMTDGRDGDLFAHYAAVAQQAGIYTASDYRSILEHLIKQWGVKELAAAELSDDGRRARDYVCALPQKIRRLEEKAHERSGQKTQPATSAPFSWIFDKPVNNTMG

SEQ ID NO: 15201 - DNA, 1397 bp, Triticum aestivum
  misc_feature (1)..(1397): Ceres Seq. ID no. 12618563
ccaaacggccgaacccccaacggagcagctaaaaactctgctgccggcgctaggaacactccagcaactcctctctggacgagacgaatcgaagccgatccgagtttccaaatgccgcaggcgcaggctatgtcggtcctgccggtggtgctcctcggctgcggcggcgtcggccgccacctcctccgccacatcgtctcctgcaggcctctccacgccaaccagggcgtctccatccgggtggtgggcgttgccgacagctcctcgctgctcgtcgcagacgacgtccgcgccagcggcctcgatgacgcgctcctcaacgacctctgctccgccaagtccgccggctcgcctctgtcctcgctgctcgctcgcgggcactgtcaggtgttcaacaagccggaggcaatggggaaagtcatcgatgcagctaccatgcttggaagaacaaccggtctggtgatagttgattgttctgcaacttatgacactgttggtgtgctgaaggatgccgtgaatcatggatgctgcgttgttttggcaaacaaaaaacctcttacatgtgcttatgaggattttaaaaagttgacatcccacttccgtcagataagatttgaatctaccgttggagcaggtttgcctgtaatagcttctgtaacccgcattattgcatctggagatccagtttcccgaatcgttggcagtctgagtggtacacttggctatgtgatgagtgagctggaggatggaaaaaaaattagtgaagttgtgaaaactgccaaggctcttggttatacagaaccagatccacgtgatgatctaagtgggatggatgtggctagaaaggcgttgatcctagctaggcttctcgggcagcagatcagcatggagaatatcaatgttgagagtttatatccgagtgagttaggacctgaggttatgtccacaacggatttccttgagagtgggttggcaaaacttgatgagacgattgaagaaagggtcaaggcagcatctttgaggggaaatgttctgcgctatgtttgtgtcattggaagcacagggtgtcaagtgggccttcaagaggtcccaaaagattctgcactggggagattgaggggaagtgacaatgtggtggagatatacagcagatgctacgagagctccccgctggtgatccagggtgcaggagccgggaacgacaccactgccgcaggagttctcgctgatataatcgatctccaagatcttttccagacaagagcgtgattgtcttgtttagcaccaaggagtttgatgcgttgtatgatcgaccataatgtccattgaactgaaattggttctggcgtttgaggttgtatgaacattttcggttgtgtttggctgctgttgatttg

SEQ ID NO: 15202 - protein, 422 aa, Triticum aestivum
  peptide (1)..(422): Ceres Seq. ID no. 12618564
  misc_feature (214)..(412): Pfam Name: Pfam Description:  Homoserine dehydrogenase
  misc_feature (44)..(418): NCBI GI NO: 15242147 NR Description: homoserine dehydrogenase-like protein
  misc_feature (44)..(418): NCBI GI NO: 21537197 NR Description: homoserine dehydrogenase-like protein
  misc_feature (151)..(412): NCBI GI NO: 22971485 NR Description: hypothetical protein [Chloroflexus aurantiacus]
  misc_feature (154)..(412): NCBI GI NO: 15601978 NR Description: ThrA [Pasteurella multocida]
  misc_feature (154)..(412): NCBI GI NO: 16120788 NR Description: bifunctional aspartokinase/ homoserine dehydrogenaseI
  misc_feature (18)..(95): NCBI GI NO: 15601978 NR Description: ThrA [Pasteurella multocida]
  misc_feature (46)..(103): NCBI GI NO: 16120788 NR Description: bifunctional aspartokinase/ homoserine dehydrogenaseI
  misc_feature (154)..(412): NCBI GI NO: 22127591 NR Description: aspartokinase I, homoserine dehydrogenase I
  misc_feature (46)..(103): NCBI GI NO: 22127591 NR Description: aspartokinase I, homoserine dehydrogenase I
  misc_feature (154)..(412): NCBI GI NO: 15799682 NR Description: aspartokinase I, homoserine dehydrogenase I
PNGRTPNGAAKNSAAGARNTPATPLWTRRIEADPSFQMPQAQAMSVLPVVLLGCGGVGRHLLRHIVSCRPLHANQGVSIRVVGVADSSSLLVADDVRASGLDDALLNDLCSAKSAGSPLSSLLARGHCQVFNKPEAMGKVIDAATMLGRTTGLVIVDCSATYDTVGVLKDAVNHGCCVVLANKKPLTCAYEDFKKLTSHFRQIRFESTVGAGLPVIASVTRIIASGDPVSRIVGSLSGTLGYVMSELEDGKKISEVVKTAKALGYTEPDPRDDLSGMDVARKALILARLLGQQISMENINVESLYPSELGPEVMSTTDFLESGLAKLDETIEERVKAASLRGNVLRYVCVIGSTGCQVGLQEVPKDSALGRLRGSDNVVEIYSRCYESSPLVIQGAGAGNDTTAAGVLADIIDLQDLFQTRA

SEQ ID NO: 15203 - protein, 385 aa, Triticum aestivum
  peptide (1)..(385): Ceres Seq. ID no. 12618565
  misc_feature (177)..(375): Pfam Name: Pfam Description:  Homoserine dehydrogenase
  misc_feature (7)..(381): NCBI GI NO: 15242147 NR Description: homoserine dehydrogenase-like protein
  misc_feature (7)..(381): NCBI GI NO: 21537197 NR Description: homoserine dehydrogenase-like protein
  misc_feature (114)..(375): NCBI GI NO: 22971485 NR Description: hypothetical protein [Chloroflexus aurantiacus]
  misc_feature (117)..(375): NCBI GI NO: 15601978 NR Description: ThrA [Pasteurella multocida]
  misc_feature (117)..(375): NCBI GI NO: 16120788 NR Description: bifunctional aspartokinase/ homoserine dehydrogenaseI
  misc_feature (1)..(58): NCBI GI NO: 15601978 NR Description: ThrA [Pasteurella multocida]
  misc_feature (9)..(66): NCBI GI NO: 16120788 NR Description: bifunctional aspartokinase/ homoserine dehydrogenaseI
  misc_feature (117)..(375): NCBI GI NO: 22127591 NR Description: aspartokinase I, homoserine dehydrogenase I
  misc_feature (9)..(66): NCBI GI NO: 22127591 NR Description: aspartokinase I, homoserine dehydrogenase I
  misc_feature (117)..(375): NCBI GI NO: 15799682 NR Description: aspartokinase I, homoserine dehydrogenase I
MPQAQAMSVLPVVLLGCGGVGRHLLRHIVSCRPLHANQGVSIRVVGVADSSSLLVADDVRASGLDDALLNDLCSAKSAGSPLSSLLARGHCQVFNKPEAMGKVIDAATMLGRTTGLVIVDCSATYDTVGVLKDAVNHGCCVVLANKKPLTCAYEDFKKLTSHFRQIRFESTVGAGLPVIASVTRIIASGDPVSRIVGSLSGTLGYVMSELEDGKKISEVVKTAKALGYTEPDPRDDLSGMDVARKALILARLLGQQISMENINVESLYPSELGPEVMSTTDFLESGLAKLDETIEERVKAASLRGNVLRYVCVIGSTGCQVGLQEVPKDSALGRLRGSDNVVEIYSRCYESSPLVIQGAGAGNDTTAAGVLADIIDLQDLFQTRA

SEQ ID NO: 15204 - protein, 379 aa, Triticum aestivum
  peptide (1)..(379): Ceres Seq. ID no. 12618566
  misc_feature (171)..(369): Pfam Name: Pfam Description:  Homoserine dehydrogenase
  misc_feature (1)..(375): NCBI GI NO: 15242147 NR Description: homoserine dehydrogenase-like protein
  misc_feature (1)..(375): NCBI GI NO: 21537197 NR Description: homoserine dehydrogenase-like protein
  misc_feature (108)..(369): NCBI GI NO: 22971485 NR Description: hypothetical protein [Chloroflexus aurantiacus]
  misc_feature (111)..(369): NCBI GI NO: 15601978 NR Description: ThrA [Pasteurella multocida]
  misc_feature (111)..(369): NCBI GI NO: 16120788 NR Description: bifunctional aspartokinase/ homoserine dehydrogenaseI
  misc_feature (1)..(52): NCBI GI NO: 15601978 NR Description: ThrA [Pasteurella multocida]
  misc_feature (3)..(60): NCBI GI NO: 16120788 NR Description: bifunctional aspartokinase/ homoserine dehydrogenaseI
  misc_feature (111)..(369): NCBI GI NO: 22127591 NR Description: aspartokinase I, homoserine dehydrogenase I
  misc_feature (3)..(60): NCBI GI NO: 22127591 NR Description: aspartokinase I, homoserine dehydrogenase I
  misc_feature (111)..(369): NCBI GI NO: 15799682 NR Description: aspartokinase I, homoserine dehydrogenase I
MSVLPVVLLGCGGVGRHLLRHIVSCRPLHANQGVSIRVVGVADSSSLLVADDVRASGLDDALLNDLCSAKSAGSPLSSLLARGHCQVFNKPEAMGKVIDAATMLGRTTGLVIVDCSATYDTVGVLKDAVNHGCCVVLANKKPLTCAYEDFKKLTSHFRQIRFESTVGAGLPVIASVTRIIASGDPVSRIVGSLSGTLGYVMSELEDGKKISEVVKTAKALGYTEPDPRDDLSGMDVARKALILARLLGQQISMENINVESLYPSELGPEVMSTTDFLESGLAKLDETIEERVKAASLRGNVLRYVCVIGSTGCQVGLQEVPKDSALGRLRGSDNVVEIYSRCYESSPLVIQGAGAGNDTTAAGVLADIIDLQDLFQTRA

SEQ ID NO: 15205 - DNA, 1856 bp, Triticum aestivum
  misc_feature (1)..(1856): Ceres Seq. ID no. 14313514
ctagaacatcctaatcgagaaaattaaaacgacatgaaccccctcaagaactcgcgctccgccctctcccgtctcctccgccacaaccccgccgccggccggccgcagcccccggcccctcccccgccggtgccgcgggaaacggccgctcggcactaccacgccgccccgcgccgcccagggttcattcagtccttcagccgagggcccctccgccacgagcccgccgccctcttccggcagccgccggcgcgggcgcaggcgccgcctccccggcactacttcacctcctcgcgccgcccggaggtcatccacttcgcgcgccgccgcggcggggcgcggtggtaccacgacaggcggaaggtcgccgcggtggtcctcctcgccggcggcgggacaatcgtcgtctacttcggcaacctcgagaccgtgccctacaccaaccgcacccacttcgtcctcgtctcgccccagctcgagcgccagctcggcgagtcccagttcgctgatctcaagaaggagctcgcccccaagatcctgcccccgctccaccccgacagtgtgggggtgcgcctcatcgcctccgagatcgtccgcgcgctccaccgcggcctcgccgaccgccgcagcgacgacttcgatgacgcctcctacggcgacatctccaccgacatcgccgtcaaggcccgggacatggatgccgacgacgtgatgcatcgggtctcgcctggcaagaccgcgggcacggccgctagggctcagcgagacgacgagcttctcgatgacaggtgggtcgccgagagccggagacgggggaaggcacgcggagcgcagccacagacgaagcacctcaatgagctcaattgggaggtcatcgtcgtcagagataagctcatcaatgcaatgtgcttgcctggtggtaaaattgtagtcttcactggattgctcgaccatttcaagacagatgctgagattgcgacagtgctttcgcatgagattgggcacgctatcgcgaggcacttgccagagatgatcaccaagggcatgtggtttactatcctgcagcttatcgtcctacagtttatttacatgccagacctaattaatgcaatgtcgacattactcctcagattgcccttctcacgaaggatggaggtagaggcggatcacatcgggctcatgcttcaagcttctgctggtttcgacccacgcacagctcccaaggtctacgagaagctaggacaaatcgcgggcaatcagtcagtgctgaaaagctacctctccacccatccttcgagtaagaagcgatcggagctcttgtctcgagccaaggtaatggaggaggcgatgcaactatacagggaagcttgcgccggccacgggaccgaaggcttcctgtaggttgcagctttgaactctcctgcctgtggctgcgtggtaagtcgctcggtggcggtgcctggcacggaaacatgtcctttgttacctgcacggtgacgtccagtaagaagagtgcattctgtgtctgaagatgttcgttctgtgcgttgttactgtctgttcttgtcaggctgaatcagccgcactttggtagcaggatgtgatcgagctgcatcatttgtgattaggagagaacagggaataggagaagagtttctgttaataattgtcttccaagagcagcttttatagtcccatcttccttgggtttaccggcgttgatgatcgtcacgttggttagtttttgtcatctacgccagctagtagtcagctggtgacggaatattcatataatatcgatgtttgaagtagtcagtcacaactcacaaggtatataatatactccatcggtttcc

SEQ ID NO: 15206 - protein, 455 aa, Triticum aestivum
  peptide (1)..(455): Ceres Seq. ID no. 14313515
  misc_feature (266)..(425): Pfam Name: Pfam Description:  Peptidase family M48
  misc_feature (79)..(455): NCBI GI NO: 10177873 NR Description: contains similarity to peptidase~gene_id:MIO24.13
  misc_feature (79)..(455): NCBI GI NO: 30696099 NR Description: expressed protein [Arabidopsis thaliana]
  misc_feature (273)..(444): NCBI GI NO: 19114452 NR Description: hypothetical peptidase 48 family protein
  misc_feature (116)..(196): NCBI GI NO: 19114452 NR Description: hypothetical peptidase 48 family protein
  misc_feature (273)..(450): NCBI GI NO: 6322940 NR Description: Hypothetical ORF; Ykr087cp
  misc_feature (109)..(192): NCBI GI NO: 6322940 NR Description: Hypothetical ORF; Ykr087cp
  misc_feature (277)..(451): NCBI GI NO: 40745859 NR Description: hypothetical protein AN1850.2
  misc_feature (24)..(187): NCBI GI NO: 40745859 NR Description: hypothetical protein AN1850.2
  misc_feature (274)..(443): NCBI GI NO: 34541762 NR Description: conserved hypothetical protein
  misc_feature (278)..(445): NCBI GI NO: 33592558 NR Description: putative lipoprotein [Bordetella pertussis]
MNPLKNSRSALSRLLRHNPAAGRPQPPAPPPPVPRETAARHYHAAPRRPGFIQSFSRGPLRHEPAALFRQPPARAQAPPPRHYFTSSRRPEVIHFARRRGGARWYHDRRKVAAVVLLAGGGTIVVYFGNLETVPYTNRTHFVLVSPQLERQLGESQFADLKKELAPKILPPLHPDSVGVRLIASEIVRALHRGLADRRSDDFDDASYGDISTDIAVKARDMDADDVMHRVSPGKTAGTAARAQRDDELLDDRWVAESRRRGKARGAQPQTKHLNELNWEVIVVRDKLINAMCLPGGKIVVFTGLLDHFKTDAEIATVLSHEIGHAIARHLPEMITKGMWFTILQLIVLQFIYMPDLINAMSTLLLRLPFSRRMEVEADHIGLMLQASAGFDPRTAPKVYEKLGQIAGNQSVLKSYLSTHPSSKKRSELLSRAKVMEEAMQLYREACAGHGTEGFL

SEQ ID NO: 15207 - protein, 235 aa, Triticum aestivum
  peptide (1)..(235): Ceres Seq. ID no. 14313516
  misc_feature (46)..(205): Pfam Name: Pfam Description:  Peptidase family M48
  misc_feature (1)..(235): NCBI GI NO: 10177873 NR Description: contains similarity to peptidase~gene_id:MIO24.13
  misc_feature (1)..(235): NCBI GI NO: 30696099 NR Description: expressed protein [Arabidopsis thaliana]
  misc_feature (53)..(224): NCBI GI NO: 19114452 NR Description: hypothetical peptidase 48 family protein
  misc_feature (53)..(230): NCBI GI NO: 6322940 NR Description: Hypothetical ORF; Ykr087cp
  misc_feature (57)..(231): NCBI GI NO: 40745859 NR Description: hypothetical protein AN1850.2
  misc_feature (54)..(223): NCBI GI NO: 34541762 NR Description: conserved hypothetical protein
  misc_feature (58)..(225): NCBI GI NO: 33592558 NR Description: putative lipoprotein [Bordetella pertussis]
  misc_feature (53)..(234): NCBI GI NO: 32412107 NR Description: hypothetical protein ( hypothetical protein 1A9.20
  misc_feature (57)..(225): NCBI GI NO: 15603055 NR Description: unknown [Pasteurella multocida]
  misc_feature (58)..(225): NCBI GI NO: 33596542 NR Description: putative lipoprotein [Bordetella parapertussis]
MDADDVMHRVSPGKTAGTAARAQRDDELLDDRWVAESRRRGKARGAQPQTKHLNELNWEVIVVRDKLINAMCLPGGKIVVFTGLLDHFKTDAEIATVLSHEIGHAIARHLPEMITKGMWFTILQLIVLQFIYMPDLINAMSTLLLRLPFSRRMEVEADHIGLMLQASAGFDPRTAPKVYEKLGQIAGNQSVLKSYLSTHPSSKKRSELLSRAKVMEEAMQLYREACAGHGTEGFL

SEQ ID NO: 15208 - protein, 229 aa, Triticum aestivum
  peptide (1)..(229): Ceres Seq. ID no. 14313517
  misc_feature (40)..(199): Pfam Name: Pfam Description:  Peptidase family M48
  misc_feature (1)..(229): NCBI GI NO: 10177873 NR Description: contains similarity to peptidase~gene_id:MIO24.13
  misc_feature (1)..(229): NCBI GI NO: 30696099 NR Description: expressed protein [Arabidopsis thaliana]
  misc_feature (47)..(218): NCBI GI NO: 19114452 NR Description: hypothetical peptidase 48 family protein
  misc_feature (47)..(224): NCBI GI NO: 6322940 NR Description: Hypothetical ORF; Ykr087cp
  misc_feature (51)..(225): NCBI GI NO: 40745859 NR Description: hypothetical protein AN1850.2
  misc_feature (48)..(217): NCBI GI NO: 34541762 NR Description: conserved hypothetical protein
  misc_feature (52)..(219): NCBI GI NO: 33592558 NR Description: putative lipoprotein [Bordetella pertussis]
  misc_feature (47)..(228): NCBI GI NO: 32412107 NR Description: hypothetical protein ( hypothetical protein 1A9.20
  misc_feature (51)..(219): NCBI GI NO: 15603055 NR Description: unknown [Pasteurella multocida]
  misc_feature (52)..(219): NCBI GI NO: 33596542 NR Description: putative lipoprotein [Bordetella parapertussis]
MHRVSPGKTAGTAARAQRDDELLDDRWVAESRRRGKARGAQPQTKHLNELNWEVIVVRDKLINAMCLPGGKIVVFTGLLDHFKTDAEIATVLSHEIGHAIARHLPEMITKGMWFTILQLIVLQFIYMPDLINAMSTLLLRLPFSRRMEVEADHIGLMLQASAGFDPRTAPKVYEKLGQIAGNQSVLKSYLSTHPSSKKRSELLSRAKVMEEAMQLYREACAGHGTEGFL

SEQ ID NO: 15209 - DNA, 1770 bp, Triticum aestivum
  misc_feature (1)..(1770): Ceres Seq. ID no. 13662762
attctaaaattgcctcgactaacaccagcgcagcagctagcttacctccatcgtgtgtgtccgtctgtccatggcgccgtcggagacgatgctggagtcggcggcgtacaggcggatgaaggcggagaacccgtccgagttcgtgccgcgcagcgtcttcttcgcgcgcgacggcggcagcggcatcgaccgccgcaacagcctctgggtcaaggcggcgctcgtctacgagtccgtcaccggcagccacgtcgacgacggcgtcaagcccctcgccaccagcctcttcctccaggtcgcccgcgaatgccgctcccgcatccccgacgacccaccgcagaccaaggccacggtggtgacggacgccctcaaaaaagtaccggctgccgtggctacgcctattgccggcgcgggcggcggcgaagatgactcagaggagaaaccgaacaagacggcggagctgcacgacgaagaaaaggagtcggacgacaagcaggtgatcgacgccgtcttcctcgtcgtcggcttcctcacgaggctggtcaagaccgccgcgggcgtcaggcgcgacgccgtcgacgaggggttcaagtccacgcacatgcaggacatcgtcacggacatgatcaagctggagaaccagctccccctcaagctcatcctcgacgtcgtcgagcacgtccaggacgcggcacgcgccgtcgccgccgaagccaggttcgaggggctccggaaatgcctcgaggggtacaagctcggcttcaaccccgccaccttcttcgacgacgtcgtcaggcccttctgctggtactactcgcccttcttcaacaagcagctgccggccgtggaccgcggcatgttcgacggcaaccacgagatcacgctcctggacttcctgcgcgccagcgtggtgccggcgccgccgggcgcggagaagggggcggccgccggcggcaggacgtcccgcatgccgacggccagggagctgagccgctctggcgtgcggatcgcgccgggggaggacggacgcgcgacggtggagttcgacgaggcgtccgccaggctgcagctgccggcgctggtgtacgacttcaagctggccacggtggcccggaacctgctggcgcgggagtacgaggagcagaacaagccggtgacgcgctacttccagatgatgaacgagctcgtcgacgaggcggccgacgccaagatcctccgccgcgccggcgccgtgcgcggtggcggggcgtccggcgccgaggtgcacgagctggtcaagcgcatcgacggctacgcgacgtacccgtcggtgtacatggccatggacgtgcagatcgcgaaggtgaggcggttccacgacatgaggatgcagaacttcctcgtccgctaccgccccggcgtcatctgggcgtcgtcggtggccgccgtctccttggtcgccattgtcgccgccaggagacgggggtgaggaagccaacggcggctaaccaaggcccgcgcatgaagattgtacaacttgaagtgtaatgttgtgtcttgtggttgtgtaccggtgtacaatgtgtaagtccaagcaaagatgattggatgcggggatttgtgggggctcgccatcctattgctaataatgattaattgcatgatagtccatgcaatttggtgcagattatgccaatccatgtaactgtaatcatagcttcactcatcaccaagatagggggtgagatttggagatgcaaaatggagtacaaatgaggacgtgagatactt

SEQ ID NO: 15210 - protein, 465 aa, Triticum aestivum
  peptide (1)..(465): Ceres Seq. ID no. 13662763
  misc_feature (68)..(460): Pfam Name: Pfam Description:  Plant protein of unknown function
  misc_feature (7)..(464): NCBI GI NO: 34898324 NR Description: EST C74734
MAPSETMLESAAYRRMKAENPSEFVPRSVFFARDGGSGIDRRNSLWVKAALVYESVTGSHVDDGVKPLATSLFLQVARECRSRIPDDPPQTKATVVTDALKKVPAAVATPIAGAGGGEDDSEEKPNKTAELHDEEKESDDKQVIDAVFLVVGFLTRLVKTAAGVRRDAVDEGFKSTHMQDIVTDMIKLENQLPLKLILDVVEHVQDAARAVAAEARFEGLRKCLEGYKLGFNPATFFDDVVRPFCWYYSPFFNKQLPAVDRGMFDGNHEITLLDFLRASVVPAPPGAEKGAAAGGRTSRMPTARELSRSGVRIAPGEDGRATVEFDEASARLQLPALVYDFKLATVARNLLAREYEEQNKPVTRYFQMMNELVDEAADAKILRRAGAVRGGGASGAEVHELVKRIDGYATYPSVYMAMDVQIAKVRRFHDMRMQNFLVRYRPGVIWASSVAAVSLVAIVAARRRG

SEQ ID NO: 15211 - protein, 459 aa, Triticum aestivum
  peptide (1)..(459): Ceres Seq. ID no. 13662764
  misc_feature (62)..(454): Pfam Name: Pfam Description:  Plant protein of unknown function
  misc_feature (1)..(458): NCBI GI NO: 34898324 NR Description: EST C74734
MLESAAYRRMKAENPSEFVPRSVFFARDGGSGIDRRNSLWVKAALVYESVTGSHVDDGVKPLATSLFLQVARECRSRIPDDPPQTKATVVTDALKKVPAAVATPIAGAGGGEDDSEEKPNKTAELHDEEKESDDKQVIDAVFLVVGFLTRLVKTAAGVRRDAVDEGFKSTHMQDIVTDMIKLENQLPLKLILDVVEHVQDAARAVAAEARFEGLRKCLEGYKLGFNPATFFDDVVRPFCWYYSPFFNKQLPAVDRGMFDGNHEITLLDFLRASVVPAPPGAEKGAAAGGRTSRMPTARELSRSGVRIAPGEDGRATVEFDEASARLQLPALVYDFKLATVARNLLAREYEEQNKPVTRYFQMMNELVDEAADAKILRRAGAVRGGGASGAEVHELVKRIDGYATYPSVYMAMDVQIAKVRRFHDMRMQNFLVRYRPGVIWASSVAAVSLVAIVAARRRG

SEQ ID NO: 15212 - protein, 450 aa, Triticum aestivum
  peptide (1)..(450): Ceres Seq. ID no. 13662765
  misc_feature (53)..(445): Pfam Name: Pfam Description:  Plant protein of unknown function
  misc_feature (1)..(449): NCBI GI NO: 34898324 NR Description: EST C74734
MKAENPSEFVPRSVFFARDGGSGIDRRNSLWVKAALVYESVTGSHVDDGVKPLATSLFLQVARECRSRIPDDPPQTKATVVTDALKKVPAAVATPIAGAGGGEDDSEEKPNKTAELHDEEKESDDKQVIDAVFLVVGFLTRLVKTAAGVRRDAVDEGFKSTHMQDIVTDMIKLENQLPLKLILDVVEHVQDAARAVAAEARFEGLRKCLEGYKLGFNPATFFDDVVRPFCWYYSPFFNKQLPAVDRGMFDGNHEITLLDFLRASVVPAPPGAEKGAAAGGRTSRMPTARELSRSGVRIAPGEDGRATVEFDEASARLQLPALVYDFKLATVARNLLAREYEEQNKPVTRYFQMMNELVDEAADAKILRRAGAVRGGGASGAEVHELVKRIDGYATYPSVYMAMDVQIAKVRRFHDMRMQNFLVRYRPGVIWASSVAAVSLVAIVAARRRG

SEQ ID NO: 15213 - DNA, 1228 bp, Triticum aestivum
  misc_feature (1)..(1228): Ceres Seq. ID no. 13597550
acacagccacaagatcgacacaatatagtacgtcgtctgcagttacacgcacgaaaggaacgtacgtcgtagatcggtcgaagaggcttgttgagatggagatgccgagggtctctgaggaaactgtggccgccgtcgtgcccatcgccgtgtactgggcatacgccggcgtgcacacggcgctggggcagtcgcggctcatggacaagtacaggctcaacaccaaggacgaggaggaccgcaagaacatggtgtccaagcgcgccgtcatcctcaacgtcctcatgcagcacctcatgcagctcgccgccctcgccgtgctcgccatggttacaggaggaagaggggcgacggcgaaggccgctggcggctcaccggcggcggtgtacctgacggcggccgcccggatcgcggtggccgtgctggtgttcgacgcgtaccggtacgcgtggcaccgcctggcgcacatcaaccggttcatttaccggcacctccactcgtggcaccaccgcatcgtggtgccctacgcgttcggcgccatctacggccacccgatcgaggtcctcatcgccgacacggccggggcctcgctcgccgtcctcgtcaccggcctgtcgccgtcgtcgccgcgcgccacggccgtgttcctcaccctctgcaccgtgaaggccatcgacaaccactgcggcgtgtgcctgctgccgcgccgcctgcagtcggtctggaacggcgccgcgtaccacggcgtgcaccacatgccgcgcggcgtccggtacaacttctccgacctcttcttcgtgacgtgggaccatgtgttcgggacccacatgccctacgccgtcgaggagaggccgggcggcgatggcctcgtgctcaagcccctgccgcctcccaaggcaactaattagttaacggcatgctcgatcaggcatgcagttactacgtaccactcctagtgctaatgagtatagttatatgtagattagtcaataagcaagcaagttgcatgtgtatgtacgtgtggcttgcatgcacgcatgcagctacaaaactagaagcagccagtgagatgtgcgtgttgaagtcagcgggtagacgtgagccagtcaaactatttgctcgctgcgccgagtgccgaccatagcacgcatgtgctcagtttttttgttttgttttgagtcactctatgtattgtatattccattcaataaagtgtagaagtctgttc

SEQ ID NO: 15214 - protein, 301 aa, Triticum aestivum
  peptide (1)..(301): Ceres Seq. ID no. 15222128
  misc_feature (39)..(294): NCBI GI NO: 34911990 NR Description: P0694A04.28
  misc_feature (37)..(293): NCBI GI NO: 22330531 NR Description: acid phosphatase, putative [Arabidopsis thaliana]
  misc_feature (37)..(293): NCBI GI NO: 25404823 NR Description: probable sterol desaturase T6C23.16
  misc_feature (37)..(298): NCBI GI NO: 18394095 NR Description: sterol desaturase domain-containing protein
  misc_feature (37)..(298): NCBI GI NO: 25511716 NR Description: F14L17.5 protein - Arabidopsis thaliana
  misc_feature (47)..(294): NCBI GI NO: 34913184 NR Description: similar to acid phosphatase
  misc_feature (116)..(277): NCBI GI NO: 19113281 NR Description: hypothetical integral membrane protein
  misc_feature (41)..(112): NCBI GI NO: 19113281 NR Description: hypothetical integral membrane protein
  misc_feature (129)..(283): NCBI GI NO: 40746027 NR Description: hypothetical protein AN0640.2
  misc_feature (37)..(108): NCBI GI NO: 40746027 NR Description: hypothetical protein AN0640.2
TATRSTQYSTSSAVTRTKGTYVVDRSKRLVEMEMPRVSEETVAAVVPIAVYWAYAGVHTALGQSRLMDKYRLNTKDEEDRKNMVSKRAVILNVLMQHLMQLAALAVLAMVTGGRGATAKAAGGSPAAVYLTAAARIAVAVLVFDAYRYAWHRLAHINRFIYRHLHSWHHRIVVPYAFGAIYGHPIEVLIADTAGASLAVLVTGLSPSSPRATAVFLTLCTVKAIDNHCGVCLLPRRLQSVWNGAAYHGVHHMPRGVRYNFSDLFFVTWDHVFGTHMPYAVEERPGGDGLVLKPLPPPKATN

SEQ ID NO: 15215 - protein, 270 aa, Triticum aestivum
  peptide (1)..(270): Ceres Seq. ID no. 15222129
  misc_feature (8)..(263): NCBI GI NO: 34911990 NR Description: P0694A04.28
  misc_feature (6)..(262): NCBI GI NO: 22330531 NR Description: acid phosphatase, putative [Arabidopsis thaliana]
  misc_feature (6)..(262): NCBI GI NO: 25404823 NR Description: probable sterol desaturase T6C23.16
  misc_feature (6)..(267): NCBI GI NO: 18394095 NR Description: sterol desaturase domain-containing protein
  misc_feature (6)..(267): NCBI GI NO: 25511716 NR Description: F14L17.5 protein - Arabidopsis thaliana
  misc_feature (16)..(263): NCBI GI NO: 34913184 NR Description: similar to acid phosphatase
  misc_feature (85)..(246): NCBI GI NO: 19113281 NR Description: hypothetical integral membrane protein
  misc_feature (10)..(81): NCBI GI NO: 19113281 NR Description: hypothetical integral membrane protein
  misc_feature (98)..(252): NCBI GI NO: 40746027 NR Description: hypothetical protein AN0640.2
  misc_feature (6)..(77): NCBI GI NO: 40746027 NR Description: hypothetical protein AN0640.2
MEMPRVSEETVAAVVPIAVYWAYAGVHTALGQSRLMDKYRLNTKDEEDRKNMVSKRAVILNVLMQHLMQLAALAVLAMVTGGRGATAKAAGGSPAAVYLTAAARIAVAVLVFDAYRYAWHRLAHINRFIYRHLHSWHHRIVVPYAFGAIYGHPIEVLIADTAGASLAVLVTGLSPSSPRATAVFLTLCTVKAIDNHCGVCLLPRRLQSVWNGAAYHGVHHMPRGVRYNFSDLFFVTWDHVFGTHMPYAVEERPGGDGLVLKPLPPPKATN

SEQ ID NO: 15216 - protein, 268 aa, Triticum aestivum
  peptide (1)..(268): Ceres Seq. ID no. 15222130
  misc_feature (6)..(261): NCBI GI NO: 34911990 NR Description: P0694A04.28
  misc_feature (4)..(260): NCBI GI NO: 22330531 NR Description: acid phosphatase, putative [Arabidopsis thaliana]
  misc_feature (4)..(260): NCBI GI NO: 25404823 NR Description: probable sterol desaturase T6C23.16
  misc_feature (4)..(265): NCBI GI NO: 18394095 NR Description: sterol desaturase domain-containing protein
  misc_feature (4)..(265): NCBI GI NO: 25511716 NR Description: F14L17.5 protein - Arabidopsis thaliana
  misc_feature (14)..(261): NCBI GI NO: 34913184 NR Description: similar to acid phosphatase
  misc_feature (83)..(244): NCBI GI NO: 19113281 NR Description: hypothetical integral membrane protein
  misc_feature (8)..(79): NCBI GI NO: 19113281 NR Description: hypothetical integral membrane protein
  misc_feature (96)..(250): NCBI GI NO: 40746027 NR Description: hypothetical protein AN0640.2
  misc_feature (4)..(75): NCBI GI NO: 40746027 NR Description: hypothetical protein AN0640.2
MPRVSEETVAAVVPIAVYWAYAGVHTALGQSRLMDKYRLNTKDEEDRKNMVSKRAVILNVLMQHLMQLAALAVLAMVTGGRGATAKAAGGSPAAVYLTAAARIAVAVLVFDAYRYAWHRLAHINRFIYRHLHSWHHRIVVPYAFGAIYGHPIEVLIADTAGASLAVLVTGLSPSSPRATAVFLTLCTVKAIDNHCGVCLLPRRLQSVWNGAAYHGVHHMPRGVRYNFSDLFFVTWDHVFGTHMPYAVEERPGGDGLVLKPLPPPKATN

SEQ ID NO: 15217 - DNA, 1152 bp, Triticum aestivum
  misc_feature (1)..(1152): Ceres Seq. ID no. 13598539
aacgccaatatttttggtggggcgcctgcttgctgccatccaaacagcccccaaatccgcgcgcctctcacatcccagaccgctgctgagcctggccgacatggccaccgcctcgatcgccgtccgctcggccttcggtgtcgccctggccgccttgatcgcggcgcgtgccgtccggcggcgctcgctggatgcctggggcggagctgccgggttcgccgtgatggcgctccaccttgcctgcggctataggtacggtgcgctgctgctggctttcttcttcacctcgtccaaggtgaccaagatcggcgaggaccgcaagcggcgcgttgaggaggatttcaaggagggtggccagcgcaactggatccaagttcttgcgaatagtgcaatagcaactgtattggttatcctattggcgataatgactgggggtcaggatcaatgcttggactcaaatggttcaaaggttataactggtataataggtgctattattggccattattgctgctgcaatggagacacttggtcatctgaaatcggtgtgcttagtgatgaacaaccaaggcttgtcactaccctgaaggtggtcagtaaacggggacctactgtcaccaagatttctggaatgactatcctggataatgatgctgttaatgcagtgtctgtgctgctaacatcggtgattacagcttatgcctgcattgtcttcttctagaagcaagggtttggttggctttttcacctgtccctaatgcgcagtgatgtgtaatgtgaatattccaaggacagaatgactgatgtttacttcaagcaagatgaacaatgaagtgttggaaatctttggctatttgctgggcacaattgacgagcctgatgacgtttgctccaggcagctagtttggtaatagtgcaagttgggaaattctaaattgttttaagcaagaaaaggccgtggtataatgcggaattgacaattatggtttttcgaaacctatctgtgtcgaagaaagtatctagttcgctgttttagaccacaatccaacaattatccccttgccaaattatagttaagttttgtctgaagtcaaattttgtgaactctgaccaattttatattatagagaaaaatatgaacatttacaatat

SEQ ID NO: 15218 - protein, 239 aa, Triticum aestivum
  peptide (1)..(239): Ceres Seq. ID no. 13598540
  misc_feature (40)..(200): Pfam Name: Pfam Description:  Integral membrane protein DUF92
  misc_feature (37)..(200): NCBI GI NO: 34914530 NR Description: OSJNBa0094H06.11
  misc_feature (42)..(235): NCBI GI NO: 18420075 NR Description: expressed protein [Arabidopsis thaliana]
  misc_feature (42)..(235): NCBI GI NO: 21537262 NR Description: unknown [Arabidopsis thaliana]
  misc_feature (9)..(233): NCBI GI NO: 34906132 NR Description: P0509B06.3
  misc_feature (41)..(200): NCBI GI NO: 24663759 NR Description: CG10171-PA [Drosophila melanogaster]
  misc_feature (41)..(200): NCBI GI NO: 24663763 NR Description: CG10171-PB [Drosophila melanogaster]
  misc_feature (196)..(229): NCBI GI NO: 24663759 NR Description: CG10171-PA [Drosophila melanogaster]
  misc_feature (196)..(229): NCBI GI NO: 24663763 NR Description: CG10171-PB [Drosophila melanogaster]
  misc_feature (42)..(230): NCBI GI NO: 21361720 NR Description: hypothetical protein FLJ10936 [Homo sapiens]
  misc_feature (42)..(230): NCBI GI NO: 7023297 NR Description: unnamed protein product [Homo sapiens]
TPIFLVGRLLAAIQTAPKSARLSHPRPLLSLADMATASIAVRSAFGVALAALIAARAVRRRSLDAWGGAAGFAVMALHLACGYRYGALLLAFFFTSSKVTKIGEDRKRRVEEDFKEGGQRNWIQVLANSAIATVLVILLAIMTGGQDQCLDSNGSKVITGIIGAIIGHYCCCNGDTWSSEIGVLSDEQPRLVTTLKVVSKRGPTVTKISGMTILDNDAVNAVSVLLTSVITAYACIVFF

SEQ ID NO: 15219 - protein, 206 aa, Triticum aestivum
  peptide (1)..(206): Ceres Seq. ID no. 13598541
  misc_feature (7)..(167): Pfam Name: Pfam Description:  Integral membrane protein DUF92
  misc_feature (4)..(167): NCBI GI NO: 34914530 NR Description: OSJNBa0094H06.11
  misc_feature (9)..(202): NCBI GI NO: 18420075 NR Description: expressed protein [Arabidopsis thaliana]
  misc_feature (9)..(202): NCBI GI NO: 21537262 NR Description: unknown [Arabidopsis thaliana]
  misc_feature (1)..(200): NCBI GI NO: 34906132 NR Description: P0509B06.3
  misc_feature (8)..(167): NCBI GI NO: 24663759 NR Description: CG10171-PA [Drosophila melanogaster]
  misc_feature (8)..(167): NCBI GI NO: 24663763 NR Description: CG10171-PB [Drosophila melanogaster]
  misc_feature (163)..(196): NCBI GI NO: 24663759 NR Description: CG10171-PA [Drosophila melanogaster]
  misc_feature (163)..(196): NCBI GI NO: 24663763 NR Description: CG10171-PB [Drosophila melanogaster]
  misc_feature (9)..(197): NCBI GI NO: 21361720 NR Description: hypothetical protein FLJ10936 [Homo sapiens]
  misc_feature (9)..(197): NCBI GI NO: 7023297 NR Description: unnamed protein product [Homo sapiens]
MATASIAVRSAFGVALAALIAARAVRRRSLDAWGGAAGFAVMALHLACGYRYGALLLAFFFTSSKVTKIGEDRKRRVEEDFKEGGQRNWIQVLANSAIATVLVILLAIMTGGQDQCLDSNGSKVITGIIGAIIGHYCCCNGDTWSSEIGVLSDEQPRLVTTLKVVSKRGPTVTKISGMTILDNDAVNAVSVLLTSVITAYACIVFF

SEQ ID NO: 15220 - protein, 165 aa, Triticum aestivum
  peptide (1)..(165): Ceres Seq. ID no. 13598542
  misc_feature (1)..(126): Pfam Name: Pfam Description:  Integral membrane protein DUF92
  misc_feature (1)..(126): NCBI GI NO: 34914530 NR Description: OSJNBa0094H06.11
  misc_feature (1)..(161): NCBI GI NO: 18420075 NR Description: expressed protein [Arabidopsis thaliana]
  misc_feature (1)..(161): NCBI GI NO: 21537262 NR Description: unknown [Arabidopsis thaliana]
  misc_feature (1)..(159): NCBI GI NO: 34906132 NR Description: P0509B06.3
  misc_feature (1)..(126): NCBI GI NO: 24663759 NR Description: CG10171-PA [Drosophila melanogaster]
  misc_feature (1)..(126): NCBI GI NO: 24663763 NR Description: CG10171-PB [Drosophila melanogaster]
  misc_feature (122)..(155): NCBI GI NO: 24663759 NR Description: CG10171-PA [Drosophila melanogaster]
  misc_feature (122)..(155): NCBI GI NO: 24663763 NR Description: CG10171-PB [Drosophila melanogaster]
  misc_feature (1)..(156): NCBI GI NO: 21361720 NR Description: hypothetical protein FLJ10936 [Homo sapiens]
  misc_feature (1)..(156): NCBI GI NO: 7023297 NR Description: unnamed protein product [Homo sapiens]
MALHLACGYRYGALLLAFFFTSSKVTKIGEDRKRRVEEDFKEGGQRNWIQVLANSAIATVLVILLAIMTGGQDQCLDSNGSKVITGIIGAIIGHYCCCNGDTWSSEIGVLSDEQPRLVTTLKVVSKRGPTVTKISGMTILDNDAVNAVSVLLTSVITAYACIVFF

SEQ ID NO: 15221 - DNA, 1949 bp, Triticum aestivum
  misc_feature (1)..(1949): Ceres Seq. ID no. 13595871
acacatgcacatcagccattcacccccggcacaacaagaggccgcacaaaaccctcctctctgatcctccaaagcggcggcgcggtgggcatggatggtgccggtatggcgacactgccggaggccaacacgtcgcccgcgcccaacggcggcggctgcggcgggatcagggttgagaattgctacgtcttcaagagcaggctgcaggagtacgcgcagaaagccggcctcatgacgccagagtaccaaaccctcaaggaggggccttcccatgagccaatcttcaagtcctccgtcgtgataaacaacaccaagtatgattctttgcctgggttcttcagccggaaggctgcagagcagtcggctgccgaagtcgcgctcatggaaatcggcaagtctgtggtgttaccaaccaatgcaaccatccccgcagtccaagaaactggtctgtgcaagaatcttcttcaggagtatgctcagaagatgaattatgctattccatcttatatttgcaacaaacaaggtccatacatatgcaccgtagagattggtggaatacaatacattggtgctacagcacggacaaagaaagaggcagagataaaagctgcccgaactgctcttcttgcaatccaagttgcaggccaatcagagggttgtgcaaatggtaccacaaaatatattgttgtgcctggcaaaaggcaaggtaaggagatcgagaaaaagcctgttgaaactccaaaatcacttaagaccaagaaaggtggtttcaagaagcaacggaacaagaataaattcatcaagaagaatggccaagaagttaacgaggaaaaggatgagactggagtgcctggagatgctcatcattcagatgtccctatgaagccagctgtaacaacagaagatccagtgaccaacactgtaatgatccagcctgatgaagcttggccattcgaacatgaaccaaccggtgacactgcaatgctgcaacctattgaagacgcttggccatccaaacatgaaccgaccggtgagactgcaatgctgcaacctgatggcgaagctacaaaagtggaacaggagcaactcagtgacacagcaatgctgcaacctgatgatgaaggtggaagagtagaacatgagccactcagcaacgctccaatggtgctacgtaatgaggaagctagaaatgtaaagcaggaagcactcatcagcactgcaatgccacaacctcacatggaagatagaagagtgggagcagagccacctagagatgctgcaatggtgcaacctaatgatgaagctagatgcataaagcaggagctactaattgacgctgcaatgcctctccccaatgaggaggccggagcagctgcaaatcctgtgccattgagtgactccataacagcgcaacctaatgcagtgactacaaatataaatgaggagtcactgaggaatgcagcatcagtgcaacataatgaagaagctaggaccgtaaaccaggagccacccagcagtgcttcactacagcagccaaaggaacccagagtcgagaacggtgaatttgtttctgaaaacaaggaccaaactctgggagatgcatctcgtgaggcaaataggtccaacgaagatgtgccagaaaagtgctcagataattcatctgcttttacaagtgtggaatgatatgtgctgtttgaatcaaatgcaatggccttccagttttacatcttgattttgcaaactagtaaaacctgaatagctggtttctcattttagaaatataattgcataacagatggatgtacgtggaccgaccgaggtccggttggtggtccatgttggccattagttattaggaagcttgcatgcctgatggtatgatcttggatccatggatgatgtatctcaagttgcttatctgatcaatgaactattagtgaactattatt

SEQ ID NO: 15222 - protein, 560 aa, Triticum aestivum
  peptide (1)..(560): Ceres Seq. ID no. 15221678
  misc_feature (64)..(130): Pfam Name: Pfam Description:  Double-stranded RNA binding motif
  misc_feature (40)..(455): NCBI GI NO: 9229939 NR Description: dsRNA-binding protein ODB1
  misc_feature (58)..(270): NCBI GI NO: 27262829 NR Description: dsRNA-binding protein [Brassica rapa subsp. rapa]
  misc_feature (58)..(265): NCBI GI NO: 8346542 NR Description: BcpLH protein [Brassica rapa]
  misc_feature (58)..(289): NCBI GI NO: 27262831 NR Description: dsRNA-binding protein
  misc_feature (58)..(289): NCBI GI NO: 27262835 NR Description: dsRNA-binding protein
  misc_feature (58)..(289): NCBI GI NO: 9967526 NR Description: RBP2 protein [Brassica oleracea var. capitata]
  misc_feature (58)..(265): NCBI GI NO: 27262837 NR Description: dsRNA-binding protein
  misc_feature (58)..(274): NCBI GI NO: 18391056 NR Description: hyponastic leave 1 protein [Arabidopsis thaliana]
  misc_feature (58)..(289): NCBI GI NO: 27262833 NR Description: dsRNA-binding protein
  misc_feature (63)..(222): NCBI GI NO: 37535422 NR Description: putative extensin
THAHQPFTPGTTRGRTKPSSLILQSGGAVGMDGAGMATLPEANTSPAPNGGGCGGIRVENCYVFKSRLQEYAQKAGLMTPEYQTLKEGPSHEPIFKSSVVINNTKYDSLPGFFSRKAAEQSAAEVALMEIGKSVVLPTNATIPAVQETGLCKNLLQEYAQKMNYAIPSYICNKQGPYICTVEIGGIQYIGATARTKKEAEIKAARTALLAIQVAGQSEGCANGTTKYIVVPGKRQGKEIEKKPVETPKSLKTKKGGFKKQRNKNKFIKKNGQEVNEEKDETGVPGDAHHSDVPMKPAVTTEDPVTNTVMIQPDEAWPFEHEPTGDTAMLQPIEDAWPSKHEPTGETAMLQPDGEATKVEQEQLSDTAMLQPDDEGGRVEHEPLSNAPMVLRNEEARNVKQEALISTAMPQPHMEDRRVGAEPPRDAAMVQPNDEARCIKQELLIDAAMPLPNEEAGAAANPVPLSDSITAQPNAVTTNINEESLRNAASVQHNEEARTVNQEPPSSASLQQPKEPRVENGEFVSENKDQTLGDASREANRSNEDVPEKCSDNSSAFTSVE

SEQ ID NO: 15223 - protein, 530 aa, Triticum aestivum
  peptide (1)..(530): Ceres Seq. ID no. 15221679
  misc_feature (34)..(100): Pfam Name: Pfam Description:  Double-stranded RNA binding motif
  misc_feature (10)..(425): NCBI GI NO: 9229939 NR Description: dsRNA-binding protein ODB1
  misc_feature (28)..(240): NCBI GI NO: 27262829 NR Description: dsRNA-binding protein [Brassica rapa subsp. rapa]
  misc_feature (28)..(235): NCBI GI NO: 8346542 NR Description: BcpLH protein [Brassica rapa]
  misc_feature (28)..(259): NCBI GI NO: 27262831 NR Description: dsRNA-binding protein
  misc_feature (28)..(259): NCBI GI NO: 27262835 NR Description: dsRNA-binding protein
  misc_feature (28)..(259): NCBI GI NO: 9967526 NR Description: RBP2 protein [Brassica oleracea var. capitata]
  misc_feature (28)..(235): NCBI GI NO: 27262837 NR Description: dsRNA-binding protein
  misc_feature (28)..(244): NCBI GI NO: 18391056 NR Description: hyponastic leave 1 protein [Arabidopsis thaliana]
  misc_feature (28)..(259): NCBI GI NO: 27262833 NR Description: dsRNA-binding protein
  misc_feature (33)..(192): NCBI GI NO: 37535422 NR Description: putative extensin
MDGAGMATLPEANTSPAPNGGGCGGIRVENCYVFKSRLQEYAQKAGLMTPEYQTLKEGPSHEPIFKSSVVINNTKYDSLPGFFSRKAAEQSAAEVALMEIGKSVVLPTNATIPAVQETGLCKNLLQEYAQKMNYAIPSYICNKQGPYICTVEIGGIQYIGATARTKKEAEIKAARTALLAIQVAGQSEGCANGTTKYIVVPGKRQGKEIEKKPVETPKSLKTKKGGFKKQRNKNKFIKKNGQEVNEEKDETGVPGDAHHSDVPMKPAVTTEDPVTNTVMIQPDEAWPFEHEPTGDTAMLQPIEDAWPSKHEPTGETAMLQPDGEATKVEQEQLSDTAMLQPDDEGGRVEHEPLSNAPMVLRNEEARNVKQEALISTAMPQPHMEDRRVGAEPPRDAAMVQPNDEARCIKQELLIDAAMPLPNEEAGAAANPVPLSDSITAQPNAVTTNINEESLRNAASVQHNEEARTVNQEPPSSASLQQPKEPRVENGEFVSENKDQTLGDASREANRSNEDVPEKCSDNSSAFTSVE

SEQ ID NO: 15224 - protein, 525 aa, Triticum aestivum
  peptide (1)..(525): Ceres Seq. ID no. 15221680
  misc_feature (29)..(95): Pfam Name: Pfam Description:  Double-stranded RNA binding motif
  misc_feature (5)..(420): NCBI GI NO: 9229939 NR Description: dsRNA-binding protein ODB1
  misc_feature (23)..(235): NCBI GI NO: 27262829 NR Description: dsRNA-binding protein [Brassica rapa subsp. rapa]
  misc_feature (23)..(230): NCBI GI NO: 8346542 NR Description: BcpLH protein [Brassica rapa]
  misc_feature (23)..(254): NCBI GI NO: 27262831 NR Description: dsRNA-binding protein
  misc_feature (23)..(254): NCBI GI NO: 27262835 NR Description: dsRNA-binding protein
  misc_feature (23)..(254): NCBI GI NO: 9967526 NR Description: RBP2 protein [Brassica oleracea var. capitata]
  misc_feature (23)..(230): NCBI GI NO: 27262837 NR Description: dsRNA-binding protein
  misc_feature (23)..(239): NCBI GI NO: 18391056 NR Description: hyponastic leave 1 protein [Arabidopsis thaliana]
  misc_feature (23)..(254): NCBI GI NO: 27262833 NR Description: dsRNA-binding protein
  misc_feature (28)..(187): NCBI GI NO: 37535422 NR Description: putative extensin
MATLPEANTSPAPNGGGCGGIRVENCYVFKSRLQEYAQKAGLMTPEYQTLKEGPSHEPIFKSSVVINNTKYDSLPGFFSRKAAEQSAAEVALMEIGKSVVLPTNATIPAVQETGLCKNLLQEYAQKMNYAIPSYICNKQGPYICTVEIGGIQYIGATARTKKEAEIKAARTALLAIQVAGQSEGCANGTTKYIVVPGKRQGKEIEKKPVETPKSLKTKKGGFKKQRNKNKFIKKNGQEVNEEKDETGVPGDAHHSDVPMKPAVTTEDPVTNTVMIQPDEAWPFEHEPTGDTAMLQPIEDAWPSKHEPTGETAMLQPDGEATKVEQEQLSDTAMLQPDDEGGRVEHEPLSNAPMVLRNEEARNVKQEALISTAMPQPHMEDRRVGAEPPRDAAMVQPNDEARCIKQELLIDAAMPLPNEEAGAAANPVPLSDSITAQPNAVTTNINEESLRNAASVQHNEEARTVNQEPPSSASLQQPKEPRVENGEFVSENKDQTLGDASREANRSNEDVPEKCSDNSSAFTSVE

SEQ ID NO: 15225 - DNA, 1464 bp, Triticum aestivum
  misc_feature (1)..(1464): Ceres Seq. ID no. 13598653
atagtttccttcctcttctgacttatctcacatgctctgacctcagctccaatctgagaccctagtccctcgagccgtcgccgtgccgtagctgatagcatcaccgtccgacgccccccacccgctcccaaccctcccgcctctcacgcgcgccgcccccatcgccgtccccgccgtatccactccgtccgcagtcgacgggttttgaggtggacatgcattttgcaaatgtcaggctctaatcagatggcttcggatggtaaatttggaaaaggtcctcgggagctcactggggctgttgatttaattagccgctacaggctgctgaaccatcacagtttcttttgtaagaaaccattgccactggctatctcagatacacattatcttcagaatgttgtgggtgatactgaaatccgtaaaggagaagggatggagatagatcaactcattcagaatccagatctgagggagaagaagactgcttatattcagccttttgacatggaaacactaggacacgcatttcagttgcgagaaacagcgccagtagatctgccttcggctgaaaaaggcactccaactatatcgggaaaatcaaaggttaagtccagggacaaagtgaagaagcataaaaagcacaaggagaaagacaaggacaaggaacacaagaagcacaaacatcgccataaggatcggagtaaagataaagacaaagacaaagagaaagagaaagagaaagaaaaagagaaggagaaggagaaagacaaagacaaagacaaagaaaagaaaaaagagaagagcgtgcatcatgatttgggaggtgataattccaaaaaacatcatgagaagaagaggaaacatgatggaatggaaaatttggcggctgtacgtaaccacaaaaaaacacaaaagcgcaaaattcaatgaaatgggcagtggactttgtttggcgtaagatgtgacaaattcgtttccgtgttagttctcgtaatatgactccatgttttatgctgttaatgggcgactctgaaggttttcttgtcaataccacttccgatggagttactgatggaatttcctttatcaagatgatccggttacaagggacgcgcccaatcagatcatgatacaccgtaaatcaattctgggaaaacttgaacttgtcatttggagttatttgattttttttgtgtgtgtgtgtgttagttctgtgcccattagcaattcttgagtgttgccctcctatatgccctgtcctgtaactcagacagaagaaaagggtttactgtcaaagccgcatgatgtgaccgtgtacaacaggagacgtcacgtgtagaagagaaaaattagccgtacacattccatgatccagcaaattcaatggtggtgatgaaccttaaggaactcgagcagtatgttctgtgtaccaatcatgttttcttaatcaaacaatcccagttt

SEQ ID NO: 15226 - protein, 233 aa, Triticum aestivum
  peptide (1)..(233): Ceres Seq. ID no. 13598654
  misc_feature (112)..(201): Pfam Name: Pfam Description:  SART-1 family
  misc_feature (12)..(222): NCBI GI NO: 15239910 NR Description: expressed protein [Arabidopsis thaliana]
  misc_feature (12)..(222): NCBI GI NO: 38454176 NR Description: At5g12230 [Arabidopsis thaliana]
  misc_feature (7)..(221): NCBI GI NO: 15239764 NR Description: hypothetical protein [Arabidopsis thaliana]
  misc_feature (127)..(230): NCBI GI NO: 15239910 NR Description: expressed protein [Arabidopsis thaliana]
  misc_feature (127)..(230): NCBI GI NO: 38454176 NR Description: At5g12230 [Arabidopsis thaliana]
  misc_feature (120)..(211): NCBI GI NO: 21040255 NR Description: splicing factor, arginine/serine-rich 12
  misc_feature (72)..(208): NCBI GI NO: 29246869 NR Description: GLP_191_32543_34384 [Giardia lamblia ATCC 50803]
  misc_feature (112)..(231): NCBI GI NO: 23612468 NR Description: heat shock protein 86 family protein
  misc_feature (104)..(232): NCBI GI NO: 2642506 NR Description: O1 [Plasmodium falciparum]
  misc_feature (137)..(230): NCBI GI NO: 15239764 NR Description: hypothetical protein [Arabidopsis thaliana]
MSGSNQMASDGKFGKGPRELTGAVDLISRYRLLNHHSFFCKKPLPLAISDTHYLQNVVGDTEIRKGEGMEIDQLIQNPDLREKKTAYIQPFDMETLGHAFQLRETAPVDLPSAEKGTPTISGKSKVKSRDKVKKHKKHKEKDKDKEHKKHKHRHKDRSKDKDKDKEKEKEKEKEKEKEKDKDKDKEKKKEKSVHHDLGGDNSKKHHEKKRKHDGMENLAAVRNHKKTQKRKIQ

SEQ ID NO: 15227 - protein, 227 aa, Triticum aestivum
  peptide (1)..(227): Ceres Seq. ID no. 13598655
  misc_feature (106)..(195): Pfam Name: Pfam Description:  SART-1 family
  misc_feature (6)..(216): NCBI GI NO: 15239910 NR Description: expressed protein [Arabidopsis thaliana]
  misc_feature (6)..(216): NCBI GI NO: 38454176 NR Description: At5g12230 [Arabidopsis thaliana]
  misc_feature (1)..(215): NCBI GI NO: 15239764 NR Description: hypothetical protein [Arabidopsis thaliana]
  misc_feature (121)..(224): NCBI GI NO: 15239910 NR Description: expressed protein [Arabidopsis thaliana]
  misc_feature (121)..(224): NCBI GI NO: 38454176 NR Description: At5g12230 [Arabidopsis thaliana]
  misc_feature (114)..(205): NCBI GI NO: 21040255 NR Description: splicing factor, arginine/serine-rich 12
  misc_feature (66)..(202): NCBI GI NO: 29246869 NR Description: GLP_191_32543_34384 [Giardia lamblia ATCC 50803]
  misc_feature (106)..(225): NCBI GI NO: 23612468 NR Description: heat shock protein 86 family protein
  misc_feature (98)..(226): NCBI GI NO: 2642506 NR Description: O1 [Plasmodium falciparum]
  misc_feature (131)..(224): NCBI GI NO: 15239764 NR Description: hypothetical protein [Arabidopsis thaliana]
MASDGKFGKGPRELTGAVDLISRYRLLNHHSFFCKKPLPLAISDTHYLQNVVGDTEIRKGEGMEIDQLIQNPDLREKKTAYIQPFDMETLGHAFQLRETAPVDLPSAEKGTPTISGKSKVKSRDKVKKHKKHKEKDKDKEHKKHKHRHKDRSKDKDKDKEKEKEKEKEKEKEKDKDKDKEKKKEKSVHHDLGGDNSKKHHEKKRKHDGMENLAAVRNHKKTQKRKIQ

SEQ ID NO: 15228 - protein, 165 aa, Triticum aestivum
  peptide (1)..(165): Ceres Seq. ID no. 13598656
  misc_feature (44)..(133): Pfam Name: Pfam Description:  SART-1 family
  misc_feature (1)..(154): NCBI GI NO: 15239910 NR Description: expressed protein [Arabidopsis thaliana]
  misc_feature (1)..(154): NCBI GI NO: 38454176 NR Description: At5g12230 [Arabidopsis thaliana]
  misc_feature (1)..(153): NCBI GI NO: 15239764 NR Description: hypothetical protein [Arabidopsis thaliana]
  misc_feature (59)..(162): NCBI GI NO: 15239910 NR Description: expressed protein [Arabidopsis thaliana]
  misc_feature (59)..(162): NCBI GI NO: 38454176 NR Description: At5g12230 [Arabidopsis thaliana]
  misc_feature (52)..(143): NCBI GI NO: 21040255 NR Description: splicing factor, arginine/serine-rich 12
  misc_feature (4)..(140): NCBI GI NO: 29246869 NR Description: GLP_191_32543_34384 [Giardia lamblia ATCC 50803]
  misc_feature (44)..(163): NCBI GI NO: 23612468 NR Description: heat shock protein 86 family protein
  misc_feature (36)..(164): NCBI GI NO: 2642506 NR Description: O1 [Plasmodium falciparum]
  misc_feature (69)..(162): NCBI GI NO: 15239764 NR Description: hypothetical protein [Arabidopsis thaliana]
MEIDQLIQNPDLREKKTAYIQPFDMETLGHAFQLRETAPVDLPSAEKGTPTISGKSKVKSRDKVKKHKKHKEKDKDKEHKKHKHRHKDRSKDKDKDKEKEKEKEKEKEKEKDKDKDKEKKKEKSVHHDLGGDNSKKHHEKKRKHDGMENLAAVRNHKKTQKRKIQ

SEQ ID NO: 15229 - DNA, 1055 bp, Triticum aestivum
  misc_feature (1)..(1055): Ceres Seq. ID no. 15168860
aaaataccaatcgctcccacgaacaaaagccaccaatgggctccacaaagctcatcgcagcgactcttctccccgctttcctcgccctccatctacacgccccagcagcaatggccaccgcggcaggaagctccaactccaacctcttccgcgactacatcggcgccctctacaacggcgtcaggttcgccgacgtgccggtcgacccgcgcgcccgcttcgacttcatcctcgcgttcgtcatcgactacaccaccgcgacggagcccccgtccccgaccaacggccggttcaacgtcttctggcaggacacggtgctcacccctgacgcggtcgccgaggtcaagcggcggaaccccaaagtgcgcgtggccgtcagtctcggcggcgccacggtcaacggcaggcccgtgttcttcaacgtcacctccggcgtcgactcctgggtccgcaacgccgtcgactccctcaccggcatcatccggcggtacggcctggatggcatcgacatcgactacgagcagttccaggtggacccggccaccttcgccgagtgcgccggccgtctcgtggcggcgctcaagagcaacggcgtcatcagcttcgcgtccatcgcgccgtacggcaacgccgacgtgcaacgctactaccggacgctgtgggcggcgcacggggccgcaatagactacgtcaacttccagttctacgcctacggtgctagcaccaccgcggcgcagtacgtcagcctcttcgacgagcagatcgccaactaccctggagccaacatcctggccagcttcaccacggcggcgacgaacacctcggtgccggtcgacaccgcgcttagtgcttgccggactctgcaggggcagggtaagctctacggcatatttgtctgggctgcagaccattccaggaaccaaggattcaagtatgagacacagtcgcaggccctgttgactgatgccaccacgtactagttacccacagcttcttggtttgcgtatatctatcttttagtgaaatcatatggaataaaacgagcatccgatttt

SEQ ID NO: 15230 - protein, 325 aa, Triticum aestivum
  peptide (1)..(325): Ceres Seq. ID no. 15168861
  misc_feature (65)..(304): Pfam Name: Pfam Description:  Glycosyl hydrolases family 18
  misc_feature (12)..(323): NCBI GI NO: 37534348 NR Description: putative class III chitinase RCB4
  misc_feature (45)..(323): NCBI GI NO: 27462188 NR Description: chitinase [Oryza sativa]
  misc_feature (48)..(319): NCBI GI NO: 7434972 NR Description: chitinase (EC 3
  misc_feature (20)..(324): NCBI GI NO: 11262118 NR Description: chitinase (EC 3
  misc_feature (48)..(319): NCBI GI NO: 7434971 NR Description: chitinase (EC 3
  misc_feature (47)..(319): NCBI GI NO: 7434970 NR Description: chitinase (EC 3.2.1.14) a - Gladiolus gandavensis
  misc_feature (45)..(321): NCBI GI NO: 37534356 NR Description: putative class III chitinase
NTNRSHEQKPPMGSTKLIAATLLPAFLALHLHAPAAMATAAGSSNSNLFRDYIGALYNGVRFADVPVDPRARFDFILAFVIDYTTATEPPSPTNGRFNVFWQDTVLTPDAVAEVKRRNPKVRVAVSLGGATVNGRPVFFNVTSGVDSWVRNAVDSLTGIIRRYGLDGIDIDYEQFQVDPATFAECAGRLVAALKSNGVISFASIAPYGNADVQRYYRTLWAAHGAAIDYVNFQFYAYGASTTAAQYVSLFDEQIANYPGANILASFTTAATNTSVPVDTALSACRTLQGQGKLYGIFVWAADHSRNQGFKYETQSQALLTDATTY

SEQ ID NO: 15231 - protein, 314 aa, Triticum aestivum
  peptide (1)..(314): Ceres Seq. ID no. 15168862
  misc_feature (54)..(293): Pfam Name: Pfam Description:  Glycosyl hydrolases family 18
  misc_feature (1)..(312): NCBI GI NO: 37534348 NR Description: putative class III chitinase RCB4
  misc_feature (34)..(312): NCBI GI NO: 27462188 NR Description: chitinase [Oryza sativa]
  misc_feature (37)..(308): NCBI GI NO: 7434972 NR Description: chitinase (EC 3
  misc_feature (9)..(313): NCBI GI NO: 11262118 NR Description: chitinase (EC 3
  misc_feature (37)..(308): NCBI GI NO: 7434971 NR Description: chitinase (EC 3
  misc_feature (36)..(308): NCBI GI NO: 7434970 NR Description: chitinase (EC 3.2.1.14) a - Gladiolus gandavensis
  misc_feature (34)..(310): NCBI GI NO: 37534356 NR Description: putative class III chitinase
MGSTKLIAATLLPAFLALHLHAPAAMATAAGSSNSNLFRDYIGALYNGVRFADVPVDPRARFDFILAFVIDYTTATEPPSPTNGRFNVFWQDTVLTPDAVAEVKRRNPKVRVAVSLGGATVNGRPVFFNVTSGVDSWVRNAVDSLTGIIRRYGLDGIDIDYEQFQVDPATFAECAGRLVAALKSNGVISFASIAPYGNADVQRYYRTLWAAHGAAIDYVNFQFYAYGASTTAAQYVSLFDEQIANYPGANILASFTTAATNTSVPVDTALSACRTLQGQGKLYGIFVWAADHSRNQGFKYETQSQALLTDATTY

SEQ ID NO: 15232 - protein, 289 aa, Triticum aestivum
  peptide (1)..(289): Ceres Seq. ID no. 15168863
  misc_feature (29)..(268): Pfam Name: Pfam Description:  Glycosyl hydrolases family 18
  misc_feature (1)..(287): NCBI GI NO: 37534348 NR Description: putative class III chitinase RCB4
  misc_feature (9)..(287): NCBI GI NO: 27462188 NR Description: chitinase [Oryza sativa]
  misc_feature (12)..(283): NCBI GI NO: 7434972 NR Description: chitinase (EC 3
  misc_feature (1)..(288): NCBI GI NO: 11262118 NR Description: chitinase (EC 3
  misc_feature (12)..(283): NCBI GI NO: 7434971 NR Description: chitinase (EC 3
  misc_feature (11)..(283): NCBI GI NO: 7434970 NR Description: chitinase (EC 3.2.1.14) a - Gladiolus gandavensis
  misc_feature (9)..(285): NCBI GI NO: 37534356 NR Description: putative class III chitinase
MATAAGSSNSNLFRDYIGALYNGVRFADVPVDPRARFDFILAFVIDYTTATEPPSPTNGRFNVFWQDTVLTPDAVAEVKRRNPKVRVAVSLGGATVNGRPVFFNVTSGVDSWVRNAVDSLTGIIRRYGLDGIDIDYEQFQVDPATFAECAGRLVAALKSNGVISFASIAPYGNADVQRYYRTLWAAHGAAIDYVNFQFYAYGASTTAAQYVSLFDEQIANYPGANILASFTTAATNTSVPVDTALSACRTLQGQGKLYGIFVWAADHSRNQGFKYETQSQALLTDATTY

SEQ ID NO: 15233 - DNA, 1266 bp, Triticum aestivum
  misc_feature (1)..(1266): Ceres Seq. ID no. 13503463
aaattcgtctgtgccgaaacccctctccaatctgagatctcctcacgagcgcgacccggagccgaaaccctagagtagagcaggggcggcggccatggccatcatctcggacatccaggaggaggaggcgccgccgcagcagccgcaagcggccccggccccggcggcggtcgacgtggacctggaggtcctcgaggcggtgctcgagcgcaagggcggcgcgctcccgttcctccacgcggccatcgacgtcgcgcaccggcgctccgacctcttccgcgacccctccgcggtcggcaagatcaccgcgatggcctcggcgtgcagggcgcaggtggaggcggaggagaggaaggccagggatgccaagaggaaggcggcggagctggagaaggcagcggcggccgagaaggagagggtggtcaaggccgcggccgagaaggagaagcgggagagctcggtggtgacggaggagcggggtgcagggagctcggcggagaaggatggcagcacggaggtggagaagaaggagagcaaggcgaacaaaccaaatgctggcaatggtcttgatatggagaagtattcctggactcagcagttaccagaggttaatgtcaatgttcctgttcctgaaggaacaaagtcaaggtttgttgtctgtgagatcaagaaggatcatctgaaggttgggttgaagggccagcctcctatcattgatggtgagcttcacaagccagttaaagtggatgactgcttctggagcatagaggatgggaaagcactgtctatactgctgacaaagcacaatcaaatggagtggtggaaatctgtgatcaaaggtgaccctgaagtcgacacccagaaggcggaaccagagactagcaagctttctgatctggatcctgagactaggcaaactgtggagaagatgatgtttgaccagcgccagaagcagatgggcctgccaacaagtgatgaaatgcagaagcaagacatgctcaagaagttcatgtctcagcacccggagatggacttctcaagggcgaagatagcttgagattggttggatccaaggggatgagaagtttttgatggataaatcgcatctatcctagttcttttcagtttcgggtgccttgtggttaagtgtctgattaaggtcgcgaaggacatggttttcgtgatgctttggaaatataagtgaactatgttttctgttgttggaactgatcgattgcctaattttctgtagtttgtgtttcgtcc

SEQ ID NO: 15234 - protein, 320 aa, Triticum aestivum
  peptide (1)..(320): Ceres Seq. ID no. 15223227
  misc_feature (153)..(304): Pfam Name: Pfam Description:  Nuclear movement protein
  misc_feature (1)..(318): NCBI GI NO: 21593329 NR Description: unknown [Arabidopsis thaliana]
  misc_feature (1)..(318): NCBI GI NO: 15238732 NR Description: expressed protein [Arabidopsis thaliana]
  misc_feature (44)..(318): NCBI GI NO: 30524691 NR Description: salt tolerance protein 5 [Beta vulgaris]
  misc_feature (44)..(318): NCBI GI NO: 15234308 NR Description: expressed protein [Arabidopsis thaliana]
  misc_feature (30)..(319): NCBI GI NO: 17553534 NR Description: Aspergillus nidulans NUclear Distribution gene C homolog
  misc_feature (29)..(319): NCBI GI NO: 39579898 NR Description: Hypothetical protein CBG24281
  misc_feature (78)..(318): NCBI GI NO: 6754910 NR Description: nuclear distribution gene C homolog [Mus musculus]
  misc_feature (78)..(318): NCBI GI NO: 8394272 NR Description: nuclear distribution gene C homolog
  misc_feature (79)..(320): NCBI GI NO: 28279157 NR Description: Similar to nuclear distribution gene C homolog
  misc_feature (78)..(318): NCBI GI NO: 5729953 NR Description: nuclear distribution gene C homolog (A
MAIISDIQEEEAPPQQPQAAPAPAAVDVDLEVLEAVLERKGGALPFLHAAIDVAHRRSDLFRDPSAVGKITAMASACRAQVEAEERKARDAKRKAAELEKAAAAEKERVVKAAAEKEKRESSVVTEERGAGSSAEKDGSTEVEKKESKANKPNAGNGLDMEKYSWTQQLPEVNVNVPVPEGTKSRFVVCEIKKDHLKVGLKGQPPIIDGELHKPVKVDDCFWSIEDGKALSILLTKHNQMEWWKSVIKGDPEVDTQKAEPETSKLSDLDPETRQTVEKMMFDQRQKQMGLPTSDEMQKQDMLKKFMSQHPEMDFSRAKIA

SEQ ID NO: 15235 - protein, 248 aa, Triticum aestivum
  peptide (1)..(248): Ceres Seq. ID no. 15223228
  misc_feature (81)..(232): Pfam Name: Pfam Description:  Nuclear movement protein
  misc_feature (1)..(246): NCBI GI NO: 21593329 NR Description: unknown [Arabidopsis thaliana]
  misc_feature (1)..(246): NCBI GI NO: 15238732 NR Description: expressed protein [Arabidopsis thaliana]
  misc_feature (1)..(246): NCBI GI NO: 30524691 NR Description: salt tolerance protein 5 [Beta vulgaris]
  misc_feature (1)..(246): NCBI GI NO: 15234308 NR Description: expressed protein [Arabidopsis thaliana]
  misc_feature (1)..(247): NCBI GI NO: 17553534 NR Description: Aspergillus nidulans NUclear Distribution gene C homolog
  misc_feature (1)..(247): NCBI GI NO: 39579898 NR Description: Hypothetical protein CBG24281
  misc_feature (6)..(246): NCBI GI NO: 6754910 NR Description: nuclear distribution gene C homolog [Mus musculus]
  misc_feature (6)..(246): NCBI GI NO: 8394272 NR Description: nuclear distribution gene C homolog
  misc_feature (7)..(248): NCBI GI NO: 28279157 NR Description: Similar to nuclear distribution gene C homolog
  misc_feature (6)..(246): NCBI GI NO: 5729953 NR Description: nuclear distribution gene C homolog (A
MASACRAQVEAEERKARDAKRKAAELEKAAAAEKERVVKAAAEKEKRESSVVTEERGAGSSAEKDGSTEVEKKESKANKPNAGNGLDMEKYSWTQQLPEVNVNVPVPEGTKSRFVVCEIKKDHLKVGLKGQPPIIDGELHKPVKVDDCFWSIEDGKALSILLTKHNQMEWWKSVIKGDPEVDTQKAEPETSKLSDLDPETRQTVEKMMFDQRQKQMGLPTSDEMQKQDMLKKFMSQHPEMDFSRAKIA

SEQ ID NO: 15236 - protein, 161 aa, Triticum aestivum
  peptide (1)..(161): Ceres Seq. ID no. 15223229
  misc_feature (1)..(145): Pfam Name: Pfam Description:  Nuclear movement protein
  misc_feature (1)..(159): NCBI GI NO: 21593329 NR Description: unknown [Arabidopsis thaliana]
  misc_feature (1)..(159): NCBI GI NO: 15238732 NR Description: expressed protein [Arabidopsis thaliana]
  misc_feature (1)..(159): NCBI GI NO: 30524691 NR Description: salt tolerance protein 5 [Beta vulgaris]
  misc_feature (1)..(159): NCBI GI NO: 15234308 NR Description: expressed protein [Arabidopsis thaliana]
  misc_feature (1)..(160): NCBI GI NO: 17553534 NR Description: Aspergillus nidulans NUclear Distribution gene C homolog
  misc_feature (1)..(160): NCBI GI NO: 39579898 NR Description: Hypothetical protein CBG24281
  misc_feature (1)..(159): NCBI GI NO: 6754910 NR Description: nuclear distribution gene C homolog [Mus musculus]
  misc_feature (1)..(159): NCBI GI NO: 8394272 NR Description: nuclear distribution gene C homolog
  misc_feature (1)..(161): NCBI GI NO: 28279157 NR Description: Similar to nuclear distribution gene C homolog
  misc_feature (1)..(159): NCBI GI NO: 5729953 NR Description: nuclear distribution gene C homolog (A
MEKYSWTQQLPEVNVNVPVPEGTKSRFVVCEIKKDHLKVGLKGQPPIIDGELHKPVKVDDCFWSIEDGKALSILLTKHNQMEWWKSVIKGDPEVDTQKAEPETSKLSDLDPETRQTVEKMMFDQRQKQMGLPTSDEMQKQDMLKKFMSQHPEMDFSRAKIA

SEQ ID NO: 15237 - DNA, 1675 bp, Triticum aestivum
  misc_feature (1)..(1675): Ceres Seq. ID no. 14302228
accacatattttcgtggacgccttgagtgcatggttaccagcgttaccagtacggcgccagaagcccataacgctcgtctttcttcgacgacatggccgtctcgcctcttgcactcgtgctcctcctcctcgccttcgccgtgtctctcttgtacatcctccgtaggcccgcccctctgcgcagcggcagcgatggaggacggaggcatcttccgccgtcaccgcgcggcctcccgctgctcggccacctacatctcctcggctcgttgccgcaccgggccctgcggtccctggccgccgcacacggcccggtcctgctgctccggctcggccgcgtgcccgccgtggtcgtgtcctcgccggccgccgcggaggaggtgatgagggcccgcgacctggccttcgcgagccggccccggagcgccatggccgaccggctcctctacgggcgcgacgtagcgttcgcgccctacggcgagtactggcgccaggcgcgccgcgtgtgcgtggtccacctcctcagcccgctccgcatcctctccttccgcggcgtccggggaggaggaggccgccgcgctggtcgagcgcgtccgcggagcggcggcgggcggcgccgctgtggacctgtgtgagctcctcgtcgctacgccaacacggtggtctcgcgcgccgcgttcggggacgacagcgcgcgcggcctgtatgaggaaggcaacaaggaacgcgagctgaggaaggtgttcaacgacttccaggagctgctcggcacggcgcctctgggggagctcctgccgtggctggggtggttggacgccgtgagggggatggaggggaagatcagacggacgttcaaggcgctcgacggtgtgctcgagaaggtgatcggcgaccaccgccgccggcgtcaagccggccagcagacgggagatgacggcggcgatcacagggatttcgtggacgtgttgttggacgtgagcgatactgatgacgaagctggcatgcgtctcagcacgaccgaaatcaaggccatcattttggacatgttcgcggcgggcacggacacgacgagcacggcaatggagtgggccatggcggaggtcatcacgcacccagacagcatgcgtaagctccaggacgagctcagggcggccgtcggtggctccgggcacgtcatcaccgaggaccacatcgacaagctgcactacctcaaggcggtggtcaaggagacgctacgcctgcacccaccgatcccgctcctcgtgccccgagagccacaagacgacgccgagatactcggccaccacgtcccggcgggcacgcgggtggtcatcaacgcgtgggccgtcggccgggacccggcggcgtgggagcgcgccgaggagttcgtaccggagaggtttctcgacggcgcggtggactacaaggggcaggacttccagctgataccgttcggtgctgggcggcgggggtgccccggggtcggattcgccgcggcgaccgttgagatggcgctggcgagtttgatgtaccatttcgactgggagccggccggggcgtcgctggacatgcgcgaggtgaacgggctcgccgtgcatctcaagtccggcctgccgcttgtcgctaaactgcggtttcgttagataaacttgttgctatgcaagaagaacaataatcc

SEQ ID NO: 15238 - protein, 271 aa, Triticum aestivum
  peptide (1)..(271): Ceres Seq. ID no. 14302229
  misc_feature (1)..(270): NCBI GI NO: 34904242 NR Description: putative cytochrome P-450LXXIA1 (cyp71A1) family
  misc_feature (1)..(242): NCBI GI NO: 34904246 NR Description: putative cytochrome P-450LXXIA1 (cyp71A1) family
  misc_feature (1)..(71): NCBI GI NO: 34904240 NR Description: putative cytochrome P-450LXXIA1 (cyp71A1) family
  misc_feature (60)..(245): NCBI GI NO: 34904240 NR Description: putative cytochrome P-450LXXIA1 (cyp71A1) family
  misc_feature (1)..(181): NCBI GI NO: 34904238 NR Description: putative cytochrome P-450LXXIA1 (cyp71A1) family
  misc_feature (1)..(267): NCBI GI NO: 25282608 NR Description: cytochrome P-450LXXIA1 [similarity] - avocado
  misc_feature (1)..(243): NCBI GI NO: 117188 NR Description: CYTOCHROME P450 71A1 (CYPLXXIA1) (ARP-2)
  misc_feature (1)..(265): NCBI GI NO: 5915814 NR Description: Cytochrome P450 71A6
  misc_feature (1)..(267): NCBI GI NO: 40645046 NR Description: cytochrome P450 [Asparagus officinalis]
  misc_feature (1)..(266): NCBI GI NO: 584863 NR Description: Cytochrome P450 71A4 (CYPLXXIA4) (P-450EG2)
MEGKIRRTFKALDGVLEKVIGDHRRRRQAGQQTGDDGGDHRDFVDVLLDVSDTDDEAGMRLSTTEIKAIILDMFAAGTDTTSTAMEWAMAEVITHPDSMRKLQDELRAAVGGSGHVITEDHIDKLHYLKAVVKETLRLHPPIPLLVPREPQDDAEILGHHVPAGTRVVINAWAVGRDPAAWERAEEFVPERFLDGAVDYKGQDFQLIPFGAGRRGCPGVGFAAATVEMALASLMYHFDWEPAGASLDMREVNGLAVHLKSGLPLVAKLRFR

SEQ ID NO: 15239 - protein, 213 aa, Triticum aestivum
  peptide (1)..(213): Ceres Seq. ID no. 14302230
  misc_feature (1)..(212): NCBI GI NO: 34904242 NR Description: putative cytochrome P-450LXXIA1 (cyp71A1) family
  misc_feature (1)..(184): NCBI GI NO: 34904246 NR Description: putative cytochrome P-450LXXIA1 (cyp71A1) family
  misc_feature (1)..(13): NCBI GI NO: 34904240 NR Description: putative cytochrome P-450LXXIA1 (cyp71A1) family
  misc_feature (2)..(187): NCBI GI NO: 34904240 NR Description: putative cytochrome P-450LXXIA1 (cyp71A1) family
  misc_feature (1)..(123): NCBI GI NO: 34904238 NR Description: putative cytochrome P-450LXXIA1 (cyp71A1) family
  misc_feature (1)..(209): NCBI GI NO: 25282608 NR Description: cytochrome P-450LXXIA1 [similarity] - avocado
  misc_feature (1)..(185): NCBI GI NO: 117188 NR Description: CYTOCHROME P450 71A1 (CYPLXXIA1) (ARP-2)
  misc_feature (1)..(207): NCBI GI NO: 5915814 NR Description: Cytochrome P450 71A6
  misc_feature (1)..(209): NCBI GI NO: 40645046 NR Description: cytochrome P450 [Asparagus officinalis]
  misc_feature (1)..(208): NCBI GI NO: 584863 NR Description: Cytochrome P450 71A4 (CYPLXXIA4) (P-450EG2)
MRLSTTEIKAIILDMFAAGTDTTSTAMEWAMAEVITHPDSMRKLQDELRAAVGGSGHVITEDHIDKLHYLKAVVKETLRLHPPIPLLVPREPQDDAEILGHHVPAGTRVVINAWAVGRDPAAWERAEEFVPERFLDGAVDYKGQDFQLIPFGAGRRGCPGVGFAAATVEMALASLMYHFDWEPAGASLDMREVNGLAVHLKSGLPLVAKLRFR

SEQ ID NO: 15240 - protein, 199 aa, Triticum aestivum
  peptide (1)..(199): Ceres Seq. ID no. 14302231
  misc_feature (1)..(198): NCBI GI NO: 34904242 NR Description: putative cytochrome P-450LXXIA1 (cyp71A1) family
  misc_feature (1)..(170): NCBI GI NO: 34904246 NR Description: putative cytochrome P-450LXXIA1 (cyp71A1) family
  misc_feature (1)..(173): NCBI GI NO: 34904240 NR Description: putative cytochrome P-450LXXIA1 (cyp71A1) family
  misc_feature (1)..(109): NCBI GI NO: 34904238 NR Description: putative cytochrome P-450LXXIA1 (cyp71A1) family
  misc_feature (1)..(195): NCBI GI NO: 25282608 NR Description: cytochrome P-450LXXIA1 [similarity] - avocado
  misc_feature (1)..(171): NCBI GI NO: 117188 NR Description: CYTOCHROME P450 71A1 (CYPLXXIA1) (ARP-2)
  misc_feature (1)..(193): NCBI GI NO: 5915814 NR Description: Cytochrome P450 71A6
  misc_feature (1)..(195): NCBI GI NO: 40645046 NR Description: cytochrome P450 [Asparagus officinalis]
  misc_feature (1)..(194): NCBI GI NO: 584863 NR Description: Cytochrome P450 71A4 (CYPLXXIA4) (P-450EG2)
  misc_feature (1)..(194): NCBI GI NO: 584861 NR Description: Cytochrome P450 71A2 (CYPLXXIA2) (P-450EG4)
MFAAGTDTTSTAMEWAMAEVITHPDSMRKLQDELRAAVGGSGHVITEDHIDKLHYLKAVVKETLRLHPPIPLLVPREPQDDAEILGHHVPAGTRVVINAWAVGRDPAAWERAEEFVPERFLDGAVDYKGQDFQLIPFGAGRRGCPGVGFAAATVEMALASLMYHFDWEPAGASLDMREVNGLAVHLKSGLPLVAKLRFR

SEQ ID NO: 15241 - DNA, 1469 bp, Triticum aestivum
  misc_feature (1)..(1469): Ceres Seq. ID no. 13598543
aaaacccccgaaacccccaaacgcacggcaggccatggagctgtcgatgagcggcggcgcgctgcggaccttctcccgcttcgtcacctgcctcgcccgcatcggctccgacctcgtcttccaggcctaccccgacaagctggagctgcacacgctcaacagctcgcggtcggcgttcgcgtccgtctccctcacgcgcgacttcttcgaccacttccacctccccgccgccgccgcgccgtcgtccacgccgctccagtgcagcgtcctcctcaagtccgtcctcgctgtgctccgcacgcccacctccgcggtcgaccgcctcaacgcttctctcccaaacccccaagcgtccaagctcgagttcgtcatccactgcatcagcgggcgtaagaagacgcaccggatctcgtgcagcgccgagtccgacgtgcagactctggcgctcgaccgcaacggcttccccagccgcctcgccatacggccacgggatctcacgcgcctgctttccaatttccagtcctcgctgcaggagctcacctttattgccacccagcctgctgcacggttgcctggcgtcgatgatgccactggggggaaggcagtcgagctcctaagctacatcgacccgaccaaagatgactacgacagtaggctgcacacacaactgtggatcgatccagcagaggagttcttggagtatgagcatgctggtgatcccgtagatgtcacatttggggtgaaagaattgaaggcatttttaacattttgtgaaggatgtgaggttgatattctcctattctatcagaaggctggcgaacctgtcctgttggctccaagatttggaatcgatgatggttcaagttctaatttcgatgtaactctagttctagccactatgcttgtatcacaactaaatgatggcagtgtgcctcagcagccacctacgtcagcacatcatgcagaagaaccaagggctgccgctgctgcaccatcaccagttcccgaaaatgtctcaaaccatacaagaatatggtcagagctttcaggtgttactcccaaaagctttgaagctaacgcagaaaatcgtgcccagatggagagaaatggaagagctaacgtgctgaatgacacatcagtgcttcccaataccaatgctccctgcaagctaccagtgacagataacgcaaactatatagagcagcctgtgcaaatggatcacttggaagagcctcctgaagttgtggttgataaccctcgttcgcagcatcacccaagcaactgggtaggtgccgacgaagacgatgatgatgaagaagatgaggagctttttgtccaaacaacacctcactacatggactaaggaccgatgctgattctgaatattgcaggtgtacagatcatgtgagtgtttctactgggcatcacggagttcctggcaggggtagggtggcgagaacaattattgt

SEQ ID NO: 15242 - protein, 453 aa, Triticum aestivum
  peptide (1)..(453): Ceres Seq. ID no. 13598544
  misc_feature (12)..(355): Pfam Name: Pfam Description:  Rad9
  misc_feature (12)..(453): NCBI GI NO: 20152532 NR Description: putative auxin response factor 75
  misc_feature (12)..(453): NCBI GI NO: 30679518 NR Description: expressed protein [Arabidopsis thaliana]
  misc_feature (12)..(244): NCBI GI NO: 7596764 NR Description: hypothetical protein [Arabidopsis thaliana]
  misc_feature (274)..(453): NCBI GI NO: 7596764 NR Description: hypothetical protein [Arabidopsis thaliana]
  misc_feature (16)..(285): NCBI GI NO: 34148782 NR Description: RAD9B [Homo sapiens]
  misc_feature (12)..(179): NCBI GI NO: 28277913 NR Description: Similar to RAD9 homolog (S. pombe) [Danio rerio]
  misc_feature (12)..(278): NCBI GI NO: 34148784 NR Description: RAD9B [Mus musculus]
  misc_feature (12)..(180): NCBI GI NO: 15928780 NR Description: RAD9 (S. pombe) homolog [Homo sapiens]
  misc_feature (12)..(180): NCBI GI NO: 4759022 NR Description: RAD9 homolog
  misc_feature (12)..(180): NCBI GI NO: 34861801 NR Description: similar to cell cycle checkpoint control proteinMrad9
KPPKPPNARQAMELSMSGGALRTFSRFVTCLARIGSDLVFQAYPDKLELHTLNSSRSAFASVSLTRDFFDHFHLPAAAAPSSTPLQCSVLLKSVLAVLRTPTSAVDRLNASLPNPQASKLEFVIHCISGRKKTHRISCSAESDVQTLALDRNGFPSRLAIRPRDLTRLLSNFQSSLQELTFIATQPAARLPGVDDATGGKAVELLSYIDPTKDDYDSRLHTQLWIDPAEEFLEYEHAGDPVDVTFGVKELKAFLTFCEGCEVDILLFYQKAGEPVLLAPRFGIDDGSSSNFDVTLVLATMLVSQLNDGSVPQQPPTSAHHAEEPRAAAAAPSPVPENVSNHTRIWSELSGVTPKSFEANAENRAQMERNGRANVLNDTSVLPNTNAPCKLPVTDNANYIEQPVQMDHLEEPPEVVVDNPRSQHHPSNWVGADEDDDDEEDEELFVQTTPHYMD

SEQ ID NO: 15243 - protein, 442 aa, Triticum aestivum
  peptide (1)..(442): Ceres Seq. ID no. 13598545
  misc_feature (1)..(344): Pfam Name: Pfam Description:  Rad9
  misc_feature (1)..(442): NCBI GI NO: 20152532 NR Description: putative auxin response factor 75
  misc_feature (1)..(442): NCBI GI NO: 30679518 NR Description: expressed protein [Arabidopsis thaliana]
  misc_feature (1)..(233): NCBI GI NO: 7596764 NR Description: hypothetical protein [Arabidopsis thaliana]
  misc_feature (263)..(442): NCBI GI NO: 7596764 NR Description: hypothetical protein [Arabidopsis thaliana]
  misc_feature (5)..(274): NCBI GI NO: 34148782 NR Description: RAD9B [Homo sapiens]
  misc_feature (1)..(168): NCBI GI NO: 28277913 NR Description: Similar to RAD9 homolog (S. pombe) [Danio rerio]
  misc_feature (1)..(267): NCBI GI NO: 34148784 NR Description: RAD9B [Mus musculus]
  misc_feature (1)..(169): NCBI GI NO: 15928780 NR Description: RAD9 (S. pombe) homolog [Homo sapiens]
  misc_feature (1)..(169): NCBI GI NO: 4759022 NR Description: RAD9 homolog
  misc_feature (1)..(169): NCBI GI NO: 34861801 NR Description: similar to cell cycle checkpoint control proteinMrad9
MELSMSGGALRTFSRFVTCLARIGSDLVFQAYPDKLELHTLNSSRSAFASVSLTRDFFDHFHLPAAAAPSSTPLQCSVLLKSVLAVLRTPTSAVDRLNASLPNPQASKLEFVIHCISGRKKTHRISCSAESDVQTLALDRNGFPSRLAIRPRDLTRLLSNFQSSLQELTFIATQPAARLPGVDDATGGKAVELLSYIDPTKDDYDSRLHTQLWIDPAEEFLEYEHAGDPVDVTFGVKELKAFLTFCEGCEVDILLFYQKAGEPVLLAPRFGIDDGSSSNFDVTLVLATMLVSQLNDGSVPQQPPTSAHHAEEPRAAAAAPSPVPENVSNHTRIWSELSGVTPKSFEANAENRAQMERNGRANVLNDTSVLPNTNAPCKLPVTDNANYIEQPVQMDHLEEPPEVVVDNPRSQHHPSNWVGADEDDDDEEDEELFVQTTPHYMD

SEQ ID NO: 15244 - protein, 438 aa, Triticum aestivum
  peptide (1)..(438): Ceres Seq. ID no. 13598546
  misc_feature (1)..(340): Pfam Name: Pfam Description:  Rad9
  misc_feature (1)..(438): NCBI GI NO: 20152532 NR Description: putative auxin response factor 75
  misc_feature (1)..(438): NCBI GI NO: 30679518 NR Description: expressed protein [Arabidopsis thaliana]
  misc_feature (1)..(229): NCBI GI NO: 7596764 NR Description: hypothetical protein [Arabidopsis thaliana]
  misc_feature (259)..(438): NCBI GI NO: 7596764 NR Description: hypothetical protein [Arabidopsis thaliana]
  misc_feature (1)..(270): NCBI GI NO: 34148782 NR Description: RAD9B [Homo sapiens]
  misc_feature (1)..(164): NCBI GI NO: 28277913 NR Description: Similar to RAD9 homolog (S. pombe) [Danio rerio]
  misc_feature (1)..(263): NCBI GI NO: 34148784 NR Description: RAD9B [Mus musculus]
  misc_feature (1)..(165): NCBI GI NO: 15928780 NR Description: RAD9 (S. pombe) homolog [Homo sapiens]
  misc_feature (1)..(165): NCBI GI NO: 4759022 NR Description: RAD9 homolog
  misc_feature (1)..(165): NCBI GI NO: 34861801 NR Description: similar to cell cycle checkpoint control proteinMrad9
MSGGALRTFSRFVTCLARIGSDLVFQAYPDKLELHTLNSSRSAFASVSLTRDFFDHFHLPAAAAPSSTPLQCSVLLKSVLAVLRTPTSAVDRLNASLPNPQASKLEFVIHCISGRKKTHRISCSAESDVQTLALDRNGFPSRLAIRPRDLTRLLSNFQSSLQELTFIATQPAARLPGVDDATGGKAVELLSYIDPTKDDYDSRLHTQLWIDPAEEFLEYEHAGDPVDVTFGVKELKAFLTFCEGCEVDILLFYQKAGEPVLLAPRFGIDDGSSSNFDVTLVLATMLVSQLNDGSVPQQPPTSAHHAEEPRAAAAAPSPVPENVSNHTRIWSELSGVTPKSFEANAENRAQMERNGRANVLNDTSVLPNTNAPCKLPVTDNANYIEQPVQMDHLEEPPEVVVDNPRSQHHPSNWVGADEDDDDEEDEELFVQTTPHYMD

SEQ ID NO: 15245 - DNA, 1321 bp, Triticum aestivum
  misc_feature (1)..(1321): Ceres Seq. ID no. 13597462
aattggttgggcaaactctgtttcgacacagcctcgccatttcgtcgaacacgtggtagtgcgtcgcaccggcccttccgcaatggcctccttcctcgtcgcccgccgcctcctctgccctgcctccgcccggcgcctcctcccatgcacttccccgccaccttctgcccccgctgctctctgctggctgtccaccgacgcctcgccctcaccgcctcttcccgtcccccctctggagcccacagtcgaccctcccaagaaggatggagcctccttctccgccggttccggcgctggaggggcctaccggactggacagggagctgcatcggggggtcgccgatctggtggcgcggggtacgaggaggagcagcagaaggtcctccgcgcgtcgcttctccacgtgccgaggatgggatggagcgagtcggccatgatcgcgggtgcgagggacgtggccatgtcgccggccatcgttggtgccttcccaaggaaggaggctgcgctagttgagtttttcatggatgactgccttcaacaactcatggatcgcattgatgctggtgagggagagcttttgaaaaacttgatgctcactgagagactatctaggcttgttcggatgaggcttgagatgcagacaccttacatatcaaagtggcctcaagcgctgagcattcagtcccaaccagcaaatgtctcaacaagcttaaagcagagagcagtccttgttgatgagatttggcatgctgctggagatgctggatcagatattgattggtatgtgaaacgtactgtgcttggtggcatctactcagcctcagaggtgtacatgttaacagataattctccagagtttcacgacacatggacatttgtgaatcgccgcatcaaagatgctcttgatttgcagaaatcttataaggaggtcgcttatctaaccgaaaccctgggagcagggatcggtggctccatacagggcgtcctgaacaaggttttccagaaatgaaaaaacttgcctttgcaggctgccttctcggcatttccgccaccactttcttatgtcacgttaagattctatgacattgtatatagtactctcttttacaaacaaacgctgttagggtagccaagaagctatttagtcggtggtcagaggtcagaggtcagttgagttgttgattagtcgtcattgcgcaattctgctacaggttggcgaaaaatgtgtgaactctacagactctagtccatgtgtcatgtgcgagttgctgcaaacagaacaagacactcgtggctttgcatggacacgacttggcattcg

SEQ ID NO: 15246 - protein, 335 aa, Triticum aestivum
  peptide (1)..(335): Ceres Seq. ID no. 13597463
  misc_feature (47)..(334): NCBI GI NO: 18394701 NR Description: expressed protein [Arabidopsis thaliana]
  misc_feature (47)..(334): NCBI GI NO: 21593282 NR Description: unknown [Arabidopsis thaliana]
  misc_feature (47)..(283): NCBI GI NO: 8778288 NR Description: F14D16.30 [Arabidopsis thaliana]
  misc_feature (120)..(324): NCBI GI NO: 33859690 NR Description: RIKEN cDNA 2310005O14 [Mus musculus]
  misc_feature (120)..(324): NCBI GI NO: 40789233 NR Description: hypothetical protein DKFZp434K046 [Homo sapiens]
  misc_feature (47)..(227): NCBI GI NO: 14532534 NR Description: T29M8.1/T29M8.1 [Arabidopsis thaliana]
  misc_feature (90)..(316): NCBI GI NO: 24586344 NR Description: CG30493-PB [Drosophila melanogaster]
  misc_feature (120)..(309): NCBI GI NO: 34851240 NR Description: similar to Polymerase
  misc_feature (120)..(324): NCBI GI NO: 6841302 NR Description: HSPC326 [Homo sapiens]
  misc_feature (90)..(316): NCBI GI NO: 18447632 NR Description: SD02734p [Drosophila melanogaster]
IGWANSVSTQPRHFVEHVVVRRTGPSAMASFLVARRLLCPASARRLLPCTSPPPSAPAALCWLSTDASPSPPLPVPPLEPTVDPPKKDGASFSAGSGAGGAYRTGQGAASGGRRSGGAGYEEEQQKVLRASLLHVPRMGWSESAMIAGARDVAMSPAIVGAFPRKEAALVEFFMDDCLQQLMDRIDAGEGELLKNLMLTERLSRLVRMRLEMQTPYISKWPQALSIQSQPANVSTSLKQRAVLVDEIWHAAGDAGSDIDWYVKRTVLGGIYSASEVYMLTDNSPEFHDTWTFVNRRIKDALDLQKSYKEVAYLTETLGAGIGGSIQGVLNKVFQK

SEQ ID NO: 15247 - protein, 308 aa, Triticum aestivum
  peptide (1)..(308): Ceres Seq. ID no. 13597464
  misc_feature (20)..(307): NCBI GI NO: 18394701 NR Description: expressed protein [Arabidopsis thaliana]
  misc_feature (20)..(307): NCBI GI NO: 21593282 NR Description: unknown [Arabidopsis thaliana]
  misc_feature (20)..(256): NCBI GI NO: 8778288 NR Description: F14D16.30 [Arabidopsis thaliana]
  misc_feature (93)..(297): NCBI GI NO: 33859690 NR Description: RIKEN cDNA 2310005O14 [Mus musculus]
  misc_feature (93)..(297): NCBI GI NO: 40789233 NR Description: hypothetical protein DKFZp434K046 [Homo sapiens]
  misc_feature (20)..(200): NCBI GI NO: 14532534 NR Description: T29M8.1/T29M8.1 [Arabidopsis thaliana]
  misc_feature (63)..(289): NCBI GI NO: 24586344 NR Description: CG30493-PB [Drosophila melanogaster]
  misc_feature (93)..(282): NCBI GI NO: 34851240 NR Description: similar to Polymerase
  misc_feature (93)..(297): NCBI GI NO: 6841302 NR Description: HSPC326 [Homo sapiens]
  misc_feature (63)..(289): NCBI GI NO: 18447632 NR Description: SD02734p [Drosophila melanogaster]
MASFLVARRLLCPASARRLLPCTSPPPSAPAALCWLSTDASPSPPLPVPPLEPTVDPPKKDGASFSAGSGAGGAYRTGQGAASGGRRSGGAGYEEEQQKVLRASLLHVPRMGWSESAMIAGARDVAMSPAIVGAFPRKEAALVEFFMDDCLQQLMDRIDAGEGELLKNLMLTERLSRLVRMRLEMQTPYISKWPQALSIQSQPANVSTSLKQRAVLVDEIWHAAGDAGSDIDWYVKRTVLGGIYSASEVYMLTDNSPEFHDTWTFVNRRIKDALDLQKSYKEVAYLTETLGAGIGGSIQGVLNKVFQK

SEQ ID NO: 15248 - protein, 198 aa, Triticum aestivum
  peptide (1)..(198): Ceres Seq. ID no. 13597465
  misc_feature (1)..(197): NCBI GI NO: 18394701 NR Description: expressed protein [Arabidopsis thaliana]
  misc_feature (1)..(197): NCBI GI NO: 21593282 NR Description: unknown [Arabidopsis thaliana]
  misc_feature (1)..(146): NCBI GI NO: 8778288 NR Description: F14D16.30 [Arabidopsis thaliana]
  misc_feature (1)..(187): NCBI GI NO: 33859690 NR Description: RIKEN cDNA 2310005O14 [Mus musculus]
  misc_feature (1)..(187): NCBI GI NO: 40789233 NR Description: hypothetical protein DKFZp434K046 [Homo sapiens]
  misc_feature (1)..(90): NCBI GI NO: 14532534 NR Description: T29M8.1/T29M8.1 [Arabidopsis thaliana]
  misc_feature (1)..(179): NCBI GI NO: 24586344 NR Description: CG30493-PB [Drosophila melanogaster]
  misc_feature (1)..(172): NCBI GI NO: 34851240 NR Description: similar to Polymerase
  misc_feature (1)..(187): NCBI GI NO: 6841302 NR Description: HSPC326 [Homo sapiens]
  misc_feature (1)..(179): NCBI GI NO: 18447632 NR Description: SD02734p [Drosophila melanogaster]
MGWSESAMIAGARDVAMSPAIVGAFPRKEAALVEFFMDDCLQQLMDRIDAGEGELLKNLMLTERLSRLVRMRLEMQTPYISKWPQALSIQSQPANVSTSLKQRAVLVDEIWHAAGDAGSDIDWYVKRTVLGGIYSASEVYMLTDNSPEFHDTWTFVNRRIKDALDLQKSYKEVAYLTETLGAGIGGSIQGVLNKVFQK

SEQ ID NO: 15249 - DNA, 1039 bp, Triticum aestivum
  misc_feature (1)..(1039): Ceres Seq. ID no. 13597679
acacacacacacacagagagagagagagagagagagagagagagagagagagagagagagatggcagccgctggagttagcagggagcagaggtggagcctcgccggcgcaaccgcgctggtcaccggaggcagcagaggaattggacatgcaattgtggaggagcttgtcgggctcggggcgcgggtgcacacgtgctccgagaacgcggtggagctggaggggtgccgtcggcggtgggaggagatgaagcttccggtcaccgtctccgtctgcgacgtctccgtgcgagccgagagggagaagctcatggagtcggcgaagcaaaccttcgacggcaagctcgacatactagtaaacaacgtgggacggaatgtggccaaggcgaccgtggagtgcacggcggaggagtactcgcatctcatgtcgactaacttagagtcggcgttccacctaagccagctcgcacacccctttctccgagacgcctccatcgccggaggaggcagcgtcgttaacatctcctcagttgcaagctcacttggctactccaccctcgcactgtactgcatatctaaaggaggagttaaccagcttacaaggagccttgctgccgagtgggctcaagataagatccgtgtcaactccgtcgctccgggtgggatcaataccgagctgcaaaacagtgtggatccaaaggtcatagaaaatacgttgttgagaactccgatgcatcggctcggtgagccagtggaggtggcgtcgatggtgtcgttcctttgcatgccagcagcttcgttcgtcaccggccaggttatgtacgtcgatggaggccgaaccattagtggctaatcaattattccaacctactttagtaaccattaagctcctctcccggttgatcggtgcgaacaaaattaggtttttggttgtgatatgtattctaaaaaggtggttgtgagttgtgagcggtaagaaagttattataaactttcagctatggaaaatttgaaagttgtttggttgagggacaaccgtg

SEQ ID NO: 15250 - protein, 283 aa, Triticum aestivum
  peptide (1)..(283): Ceres Seq. ID no. 13597680
  misc_feature (21)..(282): NCBI GI NO: 34907122 NR Description: putative short chain alcohol dehydrogenase
  misc_feature (29)..(283): NCBI GI NO: 15239327 NR Description: short-chain dehydrogenase/reductase family protein
  misc_feature (29)..(283): NCBI GI NO: 21536785 NR Description: short chain alcohol dehydrogenase-like
  misc_feature (21)..(281): NCBI GI NO: 34907124 NR Description: putative short chain alcohol dehydrogenase
  misc_feature (21)..(283): NCBI GI NO: 15227040 NR Description: short-chain dehydrogenase/reductase family protein
  misc_feature (22)..(283): NCBI GI NO: 15227060 NR Description: short-chain dehydrogenase/reductase family protein
  misc_feature (24)..(283): NCBI GI NO: 15222399 NR Description: short-chain dehydrogenase/reductase family protein
  misc_feature (22)..(283): NCBI GI NO: 28393476 NR Description: putative tropinone reductase
  misc_feature (21)..(283): NCBI GI NO: 15227076 NR Description: short-chain dehydrogenase/reductase family protein
  misc_feature (28)..(283): NCBI GI NO: 25406975 NR Description: protein F22G5.20 [imported] - Arabidopsis thaliana
THTHTEREREREREREREREMAAAGVSREQRWSLAGATALVTGGSRGIGHAIVEELVGLGARVHTCSENAVELEGCRRRWEEMKLPVTVSVCDVSVRAEREKLMESAKQTFDGKLDILVNNVGRNVAKATVECTAEEYSHLMSTNLESAFHLSQLAHPFLRDASIAGGGSVVNISSVASSLGYSTLALYCISKGGVNQLTRSLAAEWAQDKIRVNSVAPGGINTELQNSVDPKVIENTLLRTPMHRLGEPVEVASMVSFLCMPAASFVTGQVMYVDGGRTISG

SEQ ID NO: 15251 - protein, 263 aa, Triticum aestivum
  peptide (1)..(263): Ceres Seq. ID no. 13597681
  misc_feature (1)..(262): NCBI GI NO: 34907122 NR Description: putative short chain alcohol dehydrogenase
  misc_feature (9)..(263): NCBI GI NO: 15239327 NR Description: short-chain dehydrogenase/reductase family protein
  misc_feature (9)..(263): NCBI GI NO: 21536785 NR Description: short chain alcohol dehydrogenase-like
  misc_feature (1)..(261): NCBI GI NO: 34907124 NR Description: putative short chain alcohol dehydrogenase
  misc_feature (1)..(263): NCBI GI NO: 15227040 NR Description: short-chain dehydrogenase/reductase family protein
  misc_feature (2)..(263): NCBI GI NO: 15227060 NR Description: short-chain dehydrogenase/reductase family protein
  misc_feature (4)..(263): NCBI GI NO: 15222399 NR Description: short-chain dehydrogenase/reductase family protein
  misc_feature (2)..(263): NCBI GI NO: 28393476 NR Description: putative tropinone reductase
  misc_feature (1)..(263): NCBI GI NO: 15227076 NR Description: short-chain dehydrogenase/reductase family protein
  misc_feature (8)..(263): NCBI GI NO: 25406975 NR Description: protein F22G5.20 [imported] - Arabidopsis thaliana
MAAAGVSREQRWSLAGATALVTGGSRGIGHAIVEELVGLGARVHTCSENAVELEGCRRRWEEMKLPVTVSVCDVSVRAEREKLMESAKQTFDGKLDILVNNVGRNVAKATVECTAEEYSHLMSTNLESAFHLSQLAHPFLRDASIAGGGSVVNISSVASSLGYSTLALYCISKGGVNQLTRSLAAEWAQDKIRVNSVAPGGINTELQNSVDPKVIENTLLRTPMHRLGEPVEVASMVSFLCMPAASFVTGQVMYVDGGRTISG

SEQ ID NO: 15252 - protein, 201 aa, Triticum aestivum
  peptide (1)..(201): Ceres Seq. ID no. 13597682
  misc_feature (1)..(200): NCBI GI NO: 34907122 NR Description: putative short chain alcohol dehydrogenase
  misc_feature (1)..(201): NCBI GI NO: 15239327 NR Description: short-chain dehydrogenase/reductase family protein
  misc_feature (1)..(201): NCBI GI NO: 21536785 NR Description: short chain alcohol dehydrogenase-like
  misc_feature (1)..(199): NCBI GI NO: 34907124 NR Description: putative short chain alcohol dehydrogenase
  misc_feature (1)..(201): NCBI GI NO: 15227040 NR Description: short-chain dehydrogenase/reductase family protein
  misc_feature (1)..(201): NCBI GI NO: 15227060 NR Description: short-chain dehydrogenase/reductase family protein
  misc_feature (1)..(201): NCBI GI NO: 15222399 NR Description: short-chain dehydrogenase/reductase family protein
  misc_feature (1)..(201): NCBI GI NO: 28393476 NR Description: putative tropinone reductase
  misc_feature (1)..(201): NCBI GI NO: 15227076 NR Description: short-chain dehydrogenase/reductase family protein
  misc_feature (1)..(201): NCBI GI NO: 25406975 NR Description: protein F22G5.20 [imported] - Arabidopsis thaliana
MKLPVTVSVCDVSVRAEREKLMESAKQTFDGKLDILVNNVGRNVAKATVECTAEEYSHLMSTNLESAFHLSQLAHPFLRDASIAGGGSVVNISSVASSLGYSTLALYCISKGGVNQLTRSLAAEWAQDKIRVNSVAPGGINTELQNSVDPKVIENTLLRTPMHRLGEPVEVASMVSFLCMPAASFVTGQVMYVDGGRTISG

SEQ ID NO: 15253 - DNA, 1066 bp, Triticum aestivum
  misc_feature (1)..(1066): Ceres Seq. ID no. 13597466
agtctttttacagcttactcctaccttgtaaagaaaaggttgtcttcttcttcgccgcttccatccatccatcctcaggagtcaggggcctgagctaacctcttggagcttttactccccgagctgccctcccccgttccaagagcaaatcagacgccgaggggagcggccgcagagcgagtcaaccgggcatggcgatggcgagctcgacgaggaggcttgcgtttgtgctactcgtgctggccttttcggccgcgctcgcagagagcagagatgcatatatgaggagcgcaaatcgatatgcctgcatactgacccaggaaagcttccctcttgcaagcagaggggcaggattaacttcggcaaacggaaagctgtgtgtactatgtgagcagtactcaaccgaagctctggtctacctgcgacaaaacgaaacccagaccgagattctcagtgccctccaccacacgtgtgcaagtcttggtcctctaagacagcagtgcatcacgctggttgactactacattcccgctttcttcttggaggtttctgtggttaaacctgaagagctctgtgagtcagcgcacctctgcccaaagggggcggcgactcggtcgtccacgcgaggggaggcctgtggtctatgccatcatgttcttgttgaagttcttaccatgcttaaggatcccaacaccaagctggagatagtcgggcttcttttcaaaacatgcagcaaggcaaagaactatgaaccgcagtgcaagaggcttgtccttgactacatcccactgattctggtgaagacccagaacttccttgagacgacggatgtctgctttgcgacacatgcctgtaaaacaggcatgcaagcaaccattcctctatccgccgctttgtgaagaacaaatgtgtaggaatcatacgcggcaaagaagcctgtaaatgttcttcctatgtttagctcaagcactaccaagctatgaaacttcgggtcgtgtgatgctttgtctgtacaatttgagctctgccctctgaagtttatgcagcaagcctgcagctgtactac

SEQ ID NO: 15254 - protein, 235 aa, Triticum aestivum
  peptide (1)..(235): Ceres Seq. ID no. 15222102
  misc_feature (60)..(98): Pfam Name: Pfam Description:  Saposin-like type B, region 1
  misc_feature (18)..(234): NCBI GI NO: 34896130 NR Description: P0701D05.19
  misc_feature (62)..(221): NCBI GI NO: 15231028 NR Description: expressed protein [Arabidopsis thaliana]
  misc_feature (59)..(221): NCBI GI NO: 15241065 NR Description: expressed protein [Arabidopsis thaliana]
  misc_feature (65)..(234): NCBI GI NO: 6942199 NR Description: putative protein [Vitis riparia]
  misc_feature (60)..(221): NCBI GI NO: 26364659 NR Description: unnamed protein product [Mus musculus]
  misc_feature (60)..(221): NCBI GI NO: 34878577 NR Description: similar to prosaposin
  misc_feature (60)..(221): NCBI GI NO: 26324414 NR Description: unnamed protein product [Mus musculus]
  misc_feature (60)..(221): NCBI GI NO: 21757548 NR Description: unnamed protein product [Homo sapiens]
  misc_feature (63)..(221): NCBI GI NO: 27819951 NR Description: LD25144p [Drosophila melanogaster]
  misc_feature (63)..(230): NCBI GI NO: 1513234 NR Description: SapA
MAMASSTRRLAFVLLVLAFSAALAESRDAYMRSANRYACILTQESFPLASRGAGLTSANGKLCVLCEQYSTEALVYLRQNETQTEILSALHHTCASLGPLRQQCITLVDYYIPAFFLEVSVVKPEELCESAHLCPKGAATRSSTRGEACGLCHHVLVEVLTMLKDPNTKLEIVGLLFKTCSKAKNYEPQCKRLVLDYIPLILVKTQNFLETTDVCFATHACKTGMQATIPLSAAL

SEQ ID NO: 15255 - protein, 233 aa, Triticum aestivum
  peptide (1)..(233): Ceres Seq. ID no. 15222103
  misc_feature (58)..(96): Pfam Name: Pfam Description:  Saposin-like type B, region 1
  misc_feature (16)..(232): NCBI GI NO: 34896130 NR Description: P0701D05.19
  misc_feature (60)..(219): NCBI GI NO: 15231028 NR Description: expressed protein [Arabidopsis thaliana]
  misc_feature (57)..(219): NCBI GI NO: 15241065 NR Description: expressed protein [Arabidopsis thaliana]
  misc_feature (63)..(232): NCBI GI NO: 6942199 NR Description: putative protein [Vitis riparia]
  misc_feature (58)..(219): NCBI GI NO: 26364659 NR Description: unnamed protein product [Mus musculus]
  misc_feature (58)..(219): NCBI GI NO: 34878577 NR Description: similar to prosaposin
  misc_feature (58)..(219): NCBI GI NO: 26324414 NR Description: unnamed protein product [Mus musculus]
  misc_feature (58)..(219): NCBI GI NO: 21757548 NR Description: unnamed protein product [Homo sapiens]
  misc_feature (61)..(219): NCBI GI NO: 27819951 NR Description: LD25144p [Drosophila melanogaster]
  misc_feature (61)..(228): NCBI GI NO: 1513234 NR Description: SapA
MASSTRRLAFVLLVLAFSAALAESRDAYMRSANRYACILTQESFPLASRGAGLTSANGKLCVLCEQYSTEALVYLRQNETQTEILSALHHTCASLGPLRQQCITLVDYYIPAFFLEVSVVKPEELCESAHLCPKGAATRSSTRGEACGLCHHVLVEVLTMLKDPNTKLEIVGLLFKTCSKAKNYEPQCKRLVLDYIPLILVKTQNFLETTDVCFATHACKTGMQATIPLSAAL

SEQ ID NO: 15256 - protein, 205 aa, Triticum aestivum
  peptide (1)..(205): Ceres Seq. ID no. 15222104
  misc_feature (30)..(68): Pfam Name: Pfam Description:  Saposin-like type B, region 1
  misc_feature (1)..(204): NCBI GI NO: 34896130 NR Description: P0701D05.19
  misc_feature (32)..(191): NCBI GI NO: 15231028 NR Description: expressed protein [Arabidopsis thaliana]
  misc_feature (29)..(191): NCBI GI NO: 15241065 NR Description: expressed protein [Arabidopsis thaliana]
  misc_feature (35)..(204): NCBI GI NO: 6942199 NR Description: putative protein [Vitis riparia]
  misc_feature (30)..(191): NCBI GI NO: 26364659 NR Description: unnamed protein product [Mus musculus]
  misc_feature (30)..(191): NCBI GI NO: 34878577 NR Description: similar to prosaposin
  misc_feature (30)..(191): NCBI GI NO: 26324414 NR Description: unnamed protein product [Mus musculus]
  misc_feature (30)..(191): NCBI GI NO: 21757548 NR Description: unnamed protein product [Homo sapiens]
  misc_feature (33)..(191): NCBI GI NO: 27819951 NR Description: LD25144p [Drosophila melanogaster]
  misc_feature (33)..(200): NCBI GI NO: 1513234 NR Description: SapA
MRSANRYACILTQESFPLASRGAGLTSANGKLCVLCEQYSTEALVYLRQNETQTEILSALHHTCASLGPLRQQCITLVDYYIPAFFLEVSVVKPEELCESAHLCPKGAATRSSTRGEACGLCHHVLVEVLTMLKDPNTKLEIVGLLFKTCSKAKNYEPQCKRLVLDYIPLILVKTQNFLETTDVCFATHACKTGMQATIPLSAAL

SEQ ID NO: 15257 - DNA, 1307 bp, Triticum aestivum
  misc_feature (1)..(1307): Ceres Seq. ID no. 13597467
acctagaacatcctaatcaaaaaaaaatttcaaacgcagccgtcgccagcgccccttgccccaaacctaccacgcccaacagcgccgcagccaatccccgaaacccgccgccgccgccgccatgggaaggctgggcgacaagtccgactatgagagcatccgcgaggcccgcatctcggagaacatggcccggatggagatgctcggcctgcgccgctgcgccggggagctgagcgccatctcctccgccccctccccccgcgccgggagcgtcaccccgaggaagaccccgaagccgccgcgggtcctcaccccgctccgccgctcgggccgcctgattgccgccgcgacgccgcccggctccggctctcgccgctccgcgcggctcaacggggactccgtgcagcacaaggcgctgccctacagaggagcggacgccgaggaagaggagcaggaggagaagtgtcccatgtacatcgacaaggagaggctgcgggtgctgcaggagacgcggtgcgacagcaaggcgagggggtccgtgtacgaccccgttctcgggatctgctgccatttctgcaggcagaagaaactctgcggcgaggagggctgcaagcgctgtggggaaggagactttgagcagcaatgcatagggaagacggagtgctcctcttgccattcctcctatgggatcctctgccgtgcttgccttaaagttaggtacggtgaagagatggaagaggtcaggaagaacaagaagtggatgtgccctcactgtgttgaggagaagggtaccaagaaattctggatatgcaacagctccatctgcttgaagaagaggaagatagcaccaaccgggatcgccatattccaagcgcgtgagcaaggatatgcgtcggtcgcacaccttctcatggaccagctgaagagccgcggatcattctgacaacgacgtacgcctgcctggagttccccgcttgctcacttcttcagtgattttagggatgattgatggttgctctggatcttttgtttcgttgacggtttagatggtagacagcttagagtctgttgctgaagaatgtggagctaccaaaaccttctcccagatgttcccagagtgaccttcgctgaagatcgaagcaaggattctgcgtctctcacatgtagcggatggatgagctttgagcttatccttgtatgttctctgttgtttgtaaaacgtcagttgtgtgcacttgtgctgtagaatctatgcttttggaatcattggtgcttcttcagtcaagaaaataaaagtgaatgtcgtc

SEQ ID NO: 15258 - protein, 273 aa, Triticum aestivum
  peptide (1)..(273): Ceres Seq. ID no. 13597468
  misc_feature (26)..(270): NCBI GI NO: 13324785 NR Description: hypothetical protein [Oryza sativa]
  misc_feature (1)..(114): NCBI GI NO: 13324785 NR Description: hypothetical protein [Oryza sativa]
  misc_feature (110)..(264): NCBI GI NO: 25407788 NR Description: hypothetical protein AT4g37110
  misc_feature (1)..(264): NCBI GI NO: 30690864 NR Description: expressed protein [Arabidopsis thaliana]
  misc_feature (136)..(263): NCBI GI NO: 11360288 NR Description: hypothetical protein DKFZp762L0311
  misc_feature (128)..(263): NCBI GI NO: 9828631 NR Description: F1N21.9 [Arabidopsis thaliana]
  misc_feature (128)..(263): NCBI GI NO: 15220396 NR Description: hypothetical protein [Arabidopsis thaliana]
  misc_feature (163)..(273): NCBI GI NO: 15220539 NR Description: F12A21.9 [Arabidopsis thaliana]
  misc_feature (163)..(263): NCBI GI NO: 10176837 NR Description: gb|AAF26952
  misc_feature (163)..(263): NCBI GI NO: 22327451 NR Description: expressed protein [Arabidopsis thaliana]
MGRLGDKSDYESIREARISENMARMEMLGLRRCAGELSAISSAPSPRAGSVTPRKTPKPPRVLTPLRRSGRLIAAATPPGSGSRRSARLNGDSVQHKALPYRGADAEEEEQEEKCPMYIDKERLRVLQETRCDSKARGSVYDPVLGICCHFCRQKKLCGEEGCKRCGEGDFEQQCIGKTECSSCHSSYGILCRACLKVRYGEEMEEVRKNKKWMCPHCVEEKGTKKFWICNSSICLKKRKIAPTGIAIFQAREQGYASVAHLLMDQLKSRGSF

SEQ ID NO: 15259 - protein, 252 aa, Triticum aestivum
  peptide (1)..(252): Ceres Seq. ID no. 13597469
  misc_feature (5)..(249): NCBI GI NO: 13324785 NR Description: hypothetical protein [Oryza sativa]
  misc_feature (1)..(93): NCBI GI NO: 13324785 NR Description: hypothetical protein [Oryza sativa]
  misc_feature (89)..(243): NCBI GI NO: 25407788 NR Description: hypothetical protein AT4g37110
  misc_feature (1)..(243): NCBI GI NO: 30690864 NR Description: expressed protein [Arabidopsis thaliana]
  misc_feature (115)..(242): NCBI GI NO: 11360288 NR Description: hypothetical protein DKFZp762L0311
  misc_feature (107)..(242): NCBI GI NO: 9828631 NR Description: F1N21.9 [Arabidopsis thaliana]
  misc_feature (107)..(242): NCBI GI NO: 15220396 NR Description: hypothetical protein [Arabidopsis thaliana]
  misc_feature (142)..(252): NCBI GI NO: 15220539 NR Description: F12A21.9 [Arabidopsis thaliana]
  misc_feature (142)..(242): NCBI GI NO: 10176837 NR Description: gb|AAF26952
  misc_feature (142)..(242): NCBI GI NO: 22327451 NR Description: expressed protein [Arabidopsis thaliana]
MARMEMLGLRRCAGELSAISSAPSPRAGSVTPRKTPKPPRVLTPLRRSGRLIAAATPPGSGSRRSARLNGDSVQHKALPYRGADAEEEEQEEKCPMYIDKERLRVLQETRCDSKARGSVYDPVLGICCHFCRQKKLCGEEGCKRCGEGDFEQQCIGKTECSSCHSSYGILCRACLKVRYGEEMEEVRKNKKWMCPHCVEEKGTKKFWICNSSICLKKRKIAPTGIAIFQAREQGYASVAHLLMDQLKSRGSF

SEQ ID NO: 15260 - protein, 249 aa, Triticum aestivum
  peptide (1)..(249): Ceres Seq. ID no. 13597470
  misc_feature (2)..(246): NCBI GI NO: 13324785 NR Description: hypothetical protein [Oryza sativa]
  misc_feature (1)..(90): NCBI GI NO: 13324785 NR Description: hypothetical protein [Oryza sativa]
  misc_feature (86)..(240): NCBI GI NO: 25407788 NR Description: hypothetical protein AT4g37110
  misc_feature (1)..(240): NCBI GI NO: 30690864 NR Description: expressed protein [Arabidopsis thaliana]
  misc_feature (112)..(239): NCBI GI NO: 11360288 NR Description: hypothetical protein DKFZp762L0311
  misc_feature (104)..(239): NCBI GI NO: 9828631 NR Description: F1N21.9 [Arabidopsis thaliana]
  misc_feature (104)..(239): NCBI GI NO: 15220396 NR Description: hypothetical protein [Arabidopsis thaliana]
  misc_feature (139)..(249): NCBI GI NO: 15220539 NR Description: F12A21.9 [Arabidopsis thaliana]
  misc_feature (139)..(239): NCBI GI NO: 10176837 NR Description: gb|AAF26952
  misc_feature (139)..(239): NCBI GI NO: 22327451 NR Description: expressed protein [Arabidopsis thaliana]
MEMLGLRRCAGELSAISSAPSPRAGSVTPRKTPKPPRVLTPLRRSGRLIAAATPPGSGSRRSARLNGDSVQHKALPYRGADAEEEEQEEKCPMYIDKERLRVLQETRCDSKARGSVYDPVLGICCHFCRQKKLCGEEGCKRCGEGDFEQQCIGKTECSSCHSSYGILCRACLKVRYGEEMEEVRKNKKWMCPHCVEEKGTKKFWICNSSICLKKRKIAPTGIAIFQAREQGYASVAHLLMDQLKSRGSF

SEQ ID NO: 15261 - DNA, 1241 bp, Triticum aestivum
  misc_feature (1)..(1241): Ceres Seq. ID no. 13590699
gaccgcaaaacgaaagcaagccgccggccctagttcgtttcagtgcctccgcagtctccaccacacggacttgccaccatgacggcggctcctcttttatcgttgacggatgcggcgacggcgacggcgacggcggcgctggcccccggccgagcgcccgccagagcccgcattcaggccgccccccgccaccccgccaccgtctcgctgagatgccaccgcgctcggcccctaaccgcggccgccgccacgggcgactcgccgtcgtccgccgcgttccacggcgagtgcttcgtcgtcggggacaacatcgacaccgaccagatcatcccggccgagcacctgaccctggtgccgtccaagcccgacgagtaccgcaagctcggctccttcgccttcgtgggcctccccgccgcggcctacccgattccgttcgtggcccctggcgaggagtcgtcccgctacgccgtcatcatcggcggcgccaacttcgggtgcggctcctcccgcgagcacgcgcccgtcgcgctcggagccgccggcgcgcgcgccgttgtggccgagggctacgcccgcatcttcttccgcaattccgtggccaccggggaggtgtaccccctggagctcgcggacagtggtgccagcaaggagtgcaagacaggggatgtggtcacagtggacctcgataactcggtcttgattaaccacacatccggaaagcagtacaagctgaagcctattggtgatgcaggcccggttattgaggccggggggatcttcgcttatgctcggaagactgggatgatcgcgtccaaatctgcttgaacaaaaagtaagctttatctgctgtcagattggttgaggccttgcgggtggcaagtaagactggtttatgaataagagtcgctgcacctctcccttcggtggtgaggtgtgattgtccagcagttttgctactactttggcattggcttgcaccagtaattgtgcgcaaaaactcggtttgagagtgctgaactttgttgtattgaaatgttacacccatgtaatacagtagttttgtttgcacctgtcatctttgatgtcaagtgtactcatgcactagcttatgtttattgattgcagtggtggattgtatcagttacttctgatgttcctattcagtgacaaaaatcaaattcacctgcttttgtatttacgaaagcgattggcgaaacaataagttaatttcgtcttccctg

SEQ ID NO: 15262 - protein, 248 aa, Triticum aestivum
  peptide (1)..(248): Ceres Seq. ID no. 13590700
  misc_feature (1)..(248): NCBI GI NO: 14140144 NR Description: putative protein [Oryza sativa]
  misc_feature (2)..(248): NCBI GI NO: 15224221 NR Description: aconitase family [Arabidopsis thaliana]
  misc_feature (39)..(245): NCBI GI NO: 15231608 NR Description: aconitase family [Arabidopsis thaliana]
  misc_feature (8)..(245): NCBI GI NO: 15224222 NR Description: aconitase family [Arabidopsis thaliana]
  misc_feature (69)..(246): NCBI GI NO: 23041579 NR Description: hypothetical protein
  misc_feature (69)..(248): NCBI GI NO: 21673448 NR Description: 3-isopropylmalate dehydratase
  misc_feature (69)..(239): NCBI GI NO: 15643321 NR Description: 3-isopropylmalate dehydratase, small subunit
  misc_feature (69)..(239): NCBI GI NO: 15669463 NR Description: 3-isopropylmalate dehydratase (leuD)
  misc_feature (69)..(239): NCBI GI NO: 23051508 NR Description: hypothetical protein [Methanosarcina barkeri]
  misc_feature (67)..(246): NCBI GI NO: 7994624 NR Description: 3-ISOPROPYLMALATE DEHYDRATASE SMALL SUBUNIT
MTAAPLLSLTDAATATATAALAPGRAPARARIQAAPRHPATVSLRCHRARPLTAAAATGDSPSSAAFHGECFVVGDNIDTDQIIPAEHLTLVPSKPDEYRKLGSFAFVGLPAAAYPIPFVAPGEESSRYAVIIGGANFGCGSSREHAPVALGAAGARAVVAEGYARIFFRNSVATGEVYPLELADSGASKECKTGDVVTVDLDNSVLINHTSGKQYKLKPIGDAGPVIEAGGIFAYARKTGMIASKSA

SEQ ID NO: 15263 - protein, 228 aa, Triticum aestivum
  peptide (1)..(228): Ceres Seq. ID no. 13590701
PQNESKPPALVRFSASAVSTTRTCHHDGGSSFIVDGCGDGDGDGGAGPRPSARQSPHSGRPPPPRHRLAEMPPRSAPNRGRRHGRLAVVRRVPRRVLRRRGQHRHRPDHPGRAPDPGAVQARRVPQARLLRLRGPPRRGLPDSVRGPWRGVVPLRRHHRRRQLRVRLLPRARARRARSRRRARRCGRGLRPHLLPQFRGHRGGVPPGARGQWCQQGVQDRGCGHSGPR

SEQ ID NO: 15264 - protein, 158 aa, Triticum aestivum
  peptide (1)..(158): Ceres Seq. ID no. 13590702
MPPRSAPNRGRRHGRLAVVRRVPRRVLRRRGQHRHRPDHPGRAPDPGAVQARRVPQARLLRLRGPPRRGLPDSVRGPWRGVVPLRRHHRRRQLRVRLLPRARARRARSRRRARRCGRGLRPHLLPQFRGHRGGVPPGARGQWCQQGVQDRGCGHSGPR

SEQ ID NO: 15265 - DNA, 1580 bp, Triticum aestivum
  misc_feature (1)..(1580): Ceres Seq. ID no. 12617417
acatcagacatcaaacagcacgaagaagaatttcagccagctgtactgaaccagtagatcctcctaggccccactcactcaccgacccacccaccgatcgccatggcgcaggcggagagcgagcgcatgcgcgtggtcatgttcccgtggctggcgcacggccacatcaacccgtacctcgagctggccaagcgcctcgtcgccgccagccccgacgaccaccacctcgacgtcgtcgtgcacctcgtctccaccccggccaacctggcgcccctcgcgcaccaccagacggacagggtcaggctcgtcgagctccatctcccggcgctccccggcctcccgcccgcgctgcacaccaccaagggccttcccgcgcacctcatgccggccctcaagcgcgcctgcgacctcgccgcgccgcgcttcggagcgctcctcgacgagctcagcccggacattgtcgtctacgacttcctccagccgtgggcgccgctcgaggccgcggcgcgcggcgtgcctgccgtccacttcagcaccttcagcgccgtcgccaaggcattcgtcgtccactgcctcaagaatgaacggacccccagcgccttcccgttcgagaccatcagcctcggcgccgccgaggaggacgccaaatacgcggcgcagctcgtctcccgcgatgacggcacagccgagatccccgagcgcgaccgcctgccgctcagcctggagcgctcctccgggttcgtggccatcaagacgtgcgccgacatcgagcgcaagtacgtcgactacctgtcccagctcgtgggcaaggaggtcgtgcccaccggcccgttgctcgtggactccggtggctccgaggggaagcgcgacggcggccgcatcatgaggtggctcgacggcaaggagccgtgttccgtggtgctcgtctccttcggcagcgagtactacatgtcagaccggcagatggcgcagatggcgcgcgggctggagctcagcagggtgccctacctgtgggtggtgcggttcccgaacgcggaggacgacgcccgcggcgccgcgaggtccatgccgcgggggttcaagccggcgcgcgggctggtgctggaagggtgggcgccgcagtggcgcatcctgtcgcaccagtcctgcggcgcgttcctgacccactgcgggtggagctcggtgctggagtccatggcagcgggggtgccgatggtggcgctgccgctgcacatcgaccagccgctcaacgccaacctcgcggtggagctgggcgcggcggccacgcgcgtgaagcaggagcgcttcggggagttcaaggcggaggatgtggcgcgggcggtgcgctcggctgtcaacgggagagaacggatggcggcgaggcgccgtgcgagggagctgcgggagctggtggcgcggaacaacggcgacgaccggcagatcgcgacgctgctacagaggatggcgcggctatgcggcaagggccaggccgtgccaaattagtgggatttttttatgaacgtattttcaactgttgttttagtcgaataaataagacagtcgggcccagtggctgtcac

SEQ ID NO: 15266 - protein, 466 aa, Triticum aestivum
  peptide (1)..(466): Ceres Seq. ID no. 12617418
  misc_feature (10)..(461): Pfam Name: Pfam Description:  UDP-glucoronosyl and UDP-glucosyl transferase
  misc_feature (1)..(461): NCBI GI NO: 22831137 NR Description: putative UDP rhamnose
  misc_feature (1)..(462): NCBI GI NO: 27461029 NR Description: flavonoid 1-2 rhamnosyltransferase [Citrus maxima]
  misc_feature (9)..(452): NCBI GI NO: 34908562 NR Description: putative anthocyanidine rhamnosyl-transferase
  misc_feature (1)..(451): NCBI GI NO: 20149064 NR Description: putative anthocyanidine rhamnosyl-transferase
  misc_feature (1)..(454): NCBI GI NO: 15240534 NR Description: anthocyanidin-3- glucoside rhamnosyltransferase-like
  misc_feature (5)..(436): NCBI GI NO: 21435782 NR Description: UDP-glucosyltransferase [Stevia rebaudiana]
  misc_feature (1)..(440): NCBI GI NO: 15238503 NR Description: anthocyanidin-3-glucoside rhamnosyltransferase
  misc_feature (2)..(456): NCBI GI NO: 34393985 NR Description: putative UDP-glucosyltransferase
  misc_feature (1)..(440): NCBI GI NO: 26452040 NR Description: putative anthocyanidin-3-glucosiderhamnosyltransferase
  misc_feature (8)..(435): NCBI GI NO: 30017585 NR Description: putative immediate-early salicylate-inducedglucosyltransferase
MAQAESERMRVVMFPWLAHGHINPYLELAKRLVAASPDDHHLDVVVHLVSTPANLAPLAHHQTDRVRLVELHLPALPGLPPALHTTKGLPAHLMPALKRACDLAAPRFGALLDELSPDIVVYDFLQPWAPLEAAARGVPAVHFSTFSAVAKAFVVHCLKNERTPSAFPFETISLGAAEEDAKYAAQLVSRDDGTAEIPERDRLPLSLERSSGFVAIKTCADIERKYVDYLSQLVGKEVVPTGPLLVDSGGSEGKRDGGRIMRWLDGKEPCSVVLVSFGSEYYMSDRQMAQMARGLELSRVPYLWVVRFPNAEDDARGAARSMPRGFKPARGLVLEGWAPQWRILSHQSCGAFLTHCGWSSVLESMAAGVPMVALPLHIDQPLNANLAVELGAAATRVKQERFGEFKAEDVARAVRSAVNGRERMAARRRARELRELVARNNGDDRQIATLLQRMARLCGKGQAVPN

SEQ ID NO: 15267 - protein, 458 aa, Triticum aestivum
  peptide (1)..(458): Ceres Seq. ID no. 12617419
  misc_feature (2)..(453): Pfam Name: Pfam Description:  UDP-glucoronosyl and UDP-glucosyl transferase
  misc_feature (1)..(453): NCBI GI NO: 22831137 NR Description: putative UDP rhamnose
  misc_feature (1)..(454): NCBI GI NO: 27461029 NR Description: flavonoid 1-2 rhamnosyltransferase [Citrus maxima]
  misc_feature (1)..(444): NCBI GI NO: 34908562 NR Description: putative anthocyanidine rhamnosyl-transferase
  misc_feature (1)..(443): NCBI GI NO: 20149064 NR Description: putative anthocyanidine rhamnosyl-transferase
  misc_feature (1)..(446): NCBI GI NO: 15240534 NR Description: anthocyanidin-3- glucoside rhamnosyltransferase-like
  misc_feature (1)..(428): NCBI GI NO: 21435782 NR Description: UDP-glucosyltransferase [Stevia rebaudiana]
  misc_feature (1)..(432): NCBI GI NO: 15238503 NR Description: anthocyanidin-3-glucoside rhamnosyltransferase
  misc_feature (1)..(448): NCBI GI NO: 34393985 NR Description: putative UDP-glucosyltransferase
  misc_feature (1)..(432): NCBI GI NO: 26452040 NR Description: putative anthocyanidin-3-glucosiderhamnosyltransferase
  misc_feature (1)..(427): NCBI GI NO: 30017585 NR Description: putative immediate-early salicylate-inducedglucosyltransferase
MRVVMFPWLAHGHINPYLELAKRLVAASPDDHHLDVVVHLVSTPANLAPLAHHQTDRVRLVELHLPALPGLPPALHTTKGLPAHLMPALKRACDLAAPRFGALLDELSPDIVVYDFLQPWAPLEAAARGVPAVHFSTFSAVAKAFVVHCLKNERTPSAFPFETISLGAAEEDAKYAAQLVSRDDGTAEIPERDRLPLSLERSSGFVAIKTCADIERKYVDYLSQLVGKEVVPTGPLLVDSGGSEGKRDGGRIMRWLDGKEPCSVVLVSFGSEYYMSDRQMAQMARGLELSRVPYLWVVRFPNAEDDARGAARSMPRGFKPARGLVLEGWAPQWRILSHQSCGAFLTHCGWSSVLESMAAGVPMVALPLHIDQPLNANLAVELGAAATRVKQERFGEFKAEDVARAVRSAVNGRERMAARRRARELRELVARNNGDDRQIATLLQRMARLCGKGQAVPN

SEQ ID NO: 15268 - protein, 454 aa, Triticum aestivum
  peptide (1)..(454): Ceres Seq. ID no. 12617420
  misc_feature (1)..(449): Pfam Name: Pfam Description:  UDP-glucoronosyl and UDP-glucosyl transferase
  misc_feature (1)..(449): NCBI GI NO: 22831137 NR Description: putative UDP rhamnose
  misc_feature (1)..(450): NCBI GI NO: 27461029 NR Description: flavonoid 1-2 rhamnosyltransferase [Citrus maxima]
  misc_feature (1)..(440): NCBI GI NO: 34908562 NR Description: putative anthocyanidine rhamnosyl-transferase
  misc_feature (1)..(439): NCBI GI NO: 20149064 NR Description: putative anthocyanidine rhamnosyl-transferase
  misc_feature (1)..(442): NCBI GI NO: 15240534 NR Description: anthocyanidin-3- glucoside rhamnosyltransferase-like
  misc_feature (1)..(424): NCBI GI NO: 21435782 NR Description: UDP-glucosyltransferase [Stevia rebaudiana]
  misc_feature (1)..(428): NCBI GI NO: 15238503 NR Description: anthocyanidin-3-glucoside rhamnosyltransferase
  misc_feature (1)..(444): NCBI GI NO: 34393985 NR Description: putative UDP-glucosyltransferase
  misc_feature (1)..(428): NCBI GI NO: 26452040 NR Description: putative anthocyanidin-3-glucosiderhamnosyltransferase
  misc_feature (1)..(423): NCBI GI NO: 30017585 NR Description: putative immediate-early salicylate-inducedglucosyltransferase
MFPWLAHGHINPYLELAKRLVAASPDDHHLDVVVHLVSTPANLAPLAHHQTDRVRLVELHLPALPGLPPALHTTKGLPAHLMPALKRACDLAAPRFGALLDELSPDIVVYDFLQPWAPLEAAARGVPAVHFSTFSAVAKAFVVHCLKNERTPSAFPFETISLGAAEEDAKYAAQLVSRDDGTAEIPERDRLPLSLERSSGFVAIKTCADIERKYVDYLSQLVGKEVVPTGPLLVDSGGSEGKRDGGRIMRWLDGKEPCSVVLVSFGSEYYMSDRQMAQMARGLELSRVPYLWVVRFPNAEDDARGAARSMPRGFKPARGLVLEGWAPQWRILSHQSCGAFLTHCGWSSVLESMAAGVPMVALPLHIDQPLNANLAVELGAAATRVKQERFGEFKAEDVARAVRSAVNGRERMAARRRARELRELVARNNGDDRQIATLLQRMARLCGKGQAVPN

SEQ ID NO: 15269 - DNA, 1166 bp, Triticum aestivum
  misc_feature (1)..(1166): Ceres Seq. ID no. 13598553
aagttttcaaccaagtgagcggtaggtgggcggcggctgcacgcggccgctctgttgttccttccttcctcatcctcttttccccgccttgtcgcccgtccacgccgtggagagaccgcagaccagagccgttcgcaccgccattgcagcttgcccaggcaggtgctcgtgcgctcctgctcgcccgcggcccctgcccctccccctccccagcgatggcgacggcgttctcaaccaagcagcccctgcgggtcgctacgcctgcaagcaaatggcgtccaaggttgccactggttaaagtgcaatattcgtccaacaaacaagctagtgcttccatttcattgacgtccagtgcggaggatgcggagagaaacgagcccatagtcaaaatgtgcggcatcacatctgccagagatgcagaattcgccgcaaaggctggagctaaacttatcgggatgattctttggcctaagtccaaacgatctgtccaactgtcagaagcgaaggaaatatccagagtagcaaagtcatatggggctgaagctgttggtgtgtttgtcgatgatgatgaagagaccatcttaagagtgtctgattcatgcgaccttgaacttatccagcttcatggagatagttctcgagcactagttcctgctcttgccaagaacaaccggattgtatatgttcttaatgctgacgcggatggaaaacttatcaattctcctcctagtgaagaatatgacgttgactggtttttggtggacagtgcagagggtggaagtggcaaaggattcaactgggagaatttccgaatgccatcggtgaaaagcaagaacggctggctgttagcaggaggacttcatgcagacaatgtttgtcaagccgctaccgctctaaaaccaaatggtgtggatgttagcagcggaatatgctctcctgacggtataagcaaggacccgaagagaatatcatccttcatgagaagcgtacagtccttaagttcccgatgaggtctctatttagactccccaggcttattatagcttcttgcttcagtttgtgaagacatttgcaaataagctgtcctgaatgatagcagtaaataaacaactttgaagctgagttccaactatgcttgtctaatggtagcattagaccagtttctg

SEQ ID NO: 15270 - protein, 335 aa, Triticum aestivum
  peptide (1)..(335): Ceres Seq. ID no. 13598554
  misc_feature (128)..(326): Pfam Name: 5'phosphoribosyl Pfam Description: N-
  misc_feature (99)..(332): NCBI GI NO: 15223003 NR Description: phosphoribosylanthranilate isomerase (PAI1)
  misc_feature (99)..(332): NCBI GI NO: 25407008 NR Description: hypothetical protein
  misc_feature (100)..(332): NCBI GI NO: 619749 NR Description: phosphoribosylanthranilate isomerase
  misc_feature (99)..(332): NCBI GI NO: 1403670 NR Description: phosphoribosylanthranilate isomerase
  misc_feature (99)..(332): NCBI GI NO: 10178136 NR Description: phosphoribosylanthranilate isomerase
  misc_feature (99)..(332): NCBI GI NO: 30681012 NR Description: phosphoribosylanthranilate isomerase (PAI2)
  misc_feature (99)..(331): NCBI GI NO: 5031261 NR Description: phosphoribosylanthranilate isomerase
  misc_feature (99)..(332): NCBI GI NO: 5031254 NR Description: phosphoribosylanthranilate isomerase
  misc_feature (99)..(332): NCBI GI NO: 5031256 NR Description: phosphoribosylanthranilate isomerase
  misc_feature (99)..(332): NCBI GI NO: 5031258 NR Description: phosphoribosylanthranilate isomerase
VFNQVSGRWAAAARGRSVVPSFLILFSPPCRPSTPWRDRRPEPFAPPLQLAQAGARALLLARGPCPSPSPAMATAFSTKQPLRVATPASKWRPRLPLVKVQYSSNKQASASISLTSSAEDAERNEPIVKMCGITSARDAEFAAKAGAKLIGMILWPKSKRSVQLSEAKEISRVAKSYGAEAVGVFVDDDEETILRVSDSCDLELIQLHGDSSRALVPALAKNNRIVYVLNADADGKLINSPPSEEYDVDWFLVDSAEGGSGKGFNWENFRMPSVKSKNGWLLAGGLHADNVCQAATALKPNGVDVSSGICSPDGISKDPKRISSFMRSVQSLSSR

SEQ ID NO: 15271 - protein, 264 aa, Triticum aestivum
  peptide (1)..(264): Ceres Seq. ID no. 13598555
  misc_feature (57)..(255): Pfam Name: 5'phosphoribosyl Pfam Description: N-
  misc_feature (28)..(261): NCBI GI NO: 15223003 NR Description: phosphoribosylanthranilate isomerase (PAI1)
  misc_feature (28)..(261): NCBI GI NO: 25407008 NR Description: hypothetical protein
  misc_feature (29)..(261): NCBI GI NO: 619749 NR Description: phosphoribosylanthranilate isomerase
  misc_feature (28)..(261): NCBI GI NO: 1403670 NR Description: phosphoribosylanthranilate isomerase
  misc_feature (28)..(261): NCBI GI NO: 10178136 NR Description: phosphoribosylanthranilate isomerase
  misc_feature (28)..(261): NCBI GI NO: 30681012 NR Description: phosphoribosylanthranilate isomerase (PAI2)
  misc_feature (28)..(260): NCBI GI NO: 5031261 NR Description: phosphoribosylanthranilate isomerase
  misc_feature (28)..(261): NCBI GI NO: 5031254 NR Description: phosphoribosylanthranilate isomerase
  misc_feature (28)..(261): NCBI GI NO: 5031256 NR Description: phosphoribosylanthranilate isomerase
  misc_feature (28)..(261): NCBI GI NO: 5031258 NR Description: phosphoribosylanthranilate isomerase
MATAFSTKQPLRVATPASKWRPRLPLVKVQYSSNKQASASISLTSSAEDAERNEPIVKMCGITSARDAEFAAKAGAKLIGMILWPKSKRSVQLSEAKEISRVAKSYGAEAVGVFVDDDEETILRVSDSCDLELIQLHGDSSRALVPALAKNNRIVYVLNADADGKLINSPPSEEYDVDWFLVDSAEGGSGKGFNWENFRMPSVKSKNGWLLAGGLHADNVCQAATALKPNGVDVSSGICSPDGISKDPKRISSFMRSVQSLSSR

SEQ ID NO: 15272 - protein, 206 aa, Triticum aestivum
  peptide (1)..(206): Ceres Seq. ID no. 13598556
  misc_feature (1)..(197): Pfam Name: 5'phosphoribosyl Pfam Description: N-
  misc_feature (1)..(203): NCBI GI NO: 15223003 NR Description: phosphoribosylanthranilate isomerase (PAI1)
  misc_feature (1)..(203): NCBI GI NO: 25407008 NR Description: hypothetical protein
  misc_feature (1)..(203): NCBI GI NO: 619749 NR Description: phosphoribosylanthranilate isomerase
  misc_feature (1)..(203): NCBI GI NO: 1403670 NR Description: phosphoribosylanthranilate isomerase
  misc_feature (1)..(203): NCBI GI NO: 10178136 NR Description: phosphoribosylanthranilate isomerase
  misc_feature (1)..(203): NCBI GI NO: 30681012 NR Description: phosphoribosylanthranilate isomerase (PAI2)
  misc_feature (1)..(202): NCBI GI NO: 5031261 NR Description: phosphoribosylanthranilate isomerase
  misc_feature (1)..(203): NCBI GI NO: 5031254 NR Description: phosphoribosylanthranilate isomerase
  misc_feature (1)..(203): NCBI GI NO: 5031256 NR Description: phosphoribosylanthranilate isomerase
  misc_feature (1)..(203): NCBI GI NO: 5031258 NR Description: phosphoribosylanthranilate isomerase
MCGITSARDAEFAAKAGAKLIGMILWPKSKRSVQLSEAKEISRVAKSYGAEAVGVFVDDDEETILRVSDSCDLELIQLHGDSSRALVPALAKNNRIVYVLNADADGKLINSPPSEEYDVDWFLVDSAEGGSGKGFNWENFRMPSVKSKNGWLLAGGLHADNVCQAATALKPNGVDVSSGICSPDGISKDPKRISSFMRSVQSLSSR

SEQ ID NO: 15273 - DNA, 1610 bp, Triticum aestivum
  misc_feature (1)..(1610): Ceres Seq. ID no. 13502943
  misc_feature (1495)..(1495): n is a, c, t, g, unknown, or other
atttcgcttctcgacttccccaatcggccaccccccacctccgccttccttcctggccagcgcggcggcttatggcctccatgaccacacctcggctccccttcctccccgcccgaacccgctccgccgtcgccgccacctcctcttcgtccccctcctccccgctaccacgccgctccatcaaatgcagcagctccaccaacgctaactcggcccccctcccttccacatcgcggcagccccgggcgcccgtggcggacggcgtagggtccgccgacctcaacggcctccgggccccgcctatacctgtcgcggactcccctctacccgcgtaccgcgatccgcacgggctgcctcggcctctcactagtgcggatctgatggagtcgagcggggaggggctcaaggttgcctaccagggcttccctggagcgtacagcgaggctgcagcaaagaaggcctatccaaattgccagacagtgccctgtgagcactttgatactgcatttcaggctgttcaaaactggatagttgatagggcggtactgccacttgagaatactctgggtggtagtatacatcggaactatgaccttttacttcggcatgagctgcacatagttggagaggttcgccttgcagttcggcattgcttggtagccaatcgtggagtgaagatcggaaacctaagaaatgtcatcagtcatccccaggctcttgcgcaatgtgagcatacgctgacagagttaggaattgaacatagacaggctgttgatgacactgctggtgcagcaaagttagtcgcagaacaaatgctccaagatactggtgctgttgccagttcattagctgctgaactttatggactcgatattcttgctgaaaatattcaggacgaaaaagtcaatgtcacccgttttatgatgcttgcttgggaacctattatacctcgggttgataaaccattcaagactagtattgtgttttcacttgaagaaggacctggacagctcttcaaggcacttgcagtttttgcactgagggaaatcaacctcaccaagatagaaagccgtccacacaagaaaaggccttttcgtgtagctgatgatgctttctccacgcgagtcaagtacttcgactacctgttttatgtcgaccttgaggcgtctatggctgatccaaaaactcagaatgctctcagaaatttggaggagtttgcaacttttttaagagtcctggggagctatcctacagacgtgagcgaagcttgaatagcaagtgcttgctgcagatcacatgttagtgattaatcaattgtgtgcctttctcttaatcggataaacatccgcctttgatagctgctgtttggtgtaatgaaataaacatagttctccattatagagtcagaaacatgtagctctcagagcatatttcctagtacttggattgggacttgagcagtcttattactcataaaatgtacgtgggtagtccncagcagaatagtggatatactcccggggattgttcaggttgagtacaatgtagaatcagaatactgaactatgcgttgtgggggtcaacaaagtggatataaagtgattgggggg

SEQ ID NO: 15274 - protein, 422 aa, Triticum aestivum
  peptide (1)..(422): Ceres Seq. ID no. 13502944
  misc_feature (136)..(314): Pfam Name: Pfam Description:  Prephenate dehydratase
  misc_feature (72)..(422): NCBI GI NO: 34394031 NR Description: putative prephenate dehydratase
  misc_feature (26)..(420): NCBI GI NO: 21537054 NR Description: putative P-protein: chorismate mutase
  misc_feature (26)..(420): NCBI GI NO: 15231489 NR Description: prephenate dehydratase family
  misc_feature (36)..(420): NCBI GI NO: 18390869 NR Description: prephenate dehydratase family
  misc_feature (108)..(419): NCBI GI NO: 14596233 NR Description: Unknown protein [Arabidopsis thaliana]
  misc_feature (21)..(420): NCBI GI NO: 15226259 NR Description: prephenate dehydratase family
  misc_feature (108)..(419): NCBI GI NO: 15221096 NR Description: prephenate dehydratase family
  misc_feature (21)..(420): NCBI GI NO: 21593283 NR Description: putative chorismate mutase/prephenate dehydratase
  misc_feature (37)..(420): NCBI GI NO: 38347597 NR Description: OSJNBa0042I15.10
  misc_feature (119)..(420): NCBI GI NO: 15230489 NR Description: prephenate dehydratase family
FASRLPQSATPHLRLPSWPARRLMASMTTPRLPFLPARTRSAVAATSSSSPSSPLPRRSIKCSSSTNANSAPLPSTSRQPRAPVADGVGSADLNGLRAPPIPVADSPLPAYRDPHGLPRPLTSADLMESSGEGLKVAYQGFPGAYSEAAAKKAYPNCQTVPCEHFDTAFQAVQNWIVDRAVLPLENTLGGSIHRNYDLLLRHELHIVGEVRLAVRHCLVANRGVKIGNLRNVISHPQALAQCEHTLTELGIEHRQAVDDTAGAAKLVAEQMLQDTGAVASSLAAELYGLDILAENIQDEKVNVTRFMMLAWEPIIPRVDKPFKTSIVFSLEEGPGQLFKALAVFALREINLTKIESRPHKKRPFRVADDAFSTRVKYFDYLFYVDLEASMADPKTQNALRNLEEFATFLRVLGSYPTDVSEA

SEQ ID NO: 15275 - protein, 399 aa, Triticum aestivum
  peptide (1)..(399): Ceres Seq. ID no. 13502945
  misc_feature (113)..(291): Pfam Name: Pfam Description:  Prephenate dehydratase
  misc_feature (49)..(399): NCBI GI NO: 34394031 NR Description: putative prephenate dehydratase
  misc_feature (3)..(397): NCBI GI NO: 21537054 NR Description: putative P-protein: chorismate mutase
  misc_feature (3)..(397): NCBI GI NO: 15231489 NR Description: prephenate dehydratase family
  misc_feature (13)..(397): NCBI GI NO: 18390869 NR Description: prephenate dehydratase family
  misc_feature (85)..(396): NCBI GI NO: 14596233 NR Description: Unknown protein [Arabidopsis thaliana]
  misc_feature (1)..(397): NCBI GI NO: 15226259 NR Description: prephenate dehydratase family
  misc_feature (85)..(396): NCBI GI NO: 15221096 NR Description: prephenate dehydratase family
  misc_feature (1)..(397): NCBI GI NO: 21593283 NR Description: putative chorismate mutase/prephenate dehydratase
  misc_feature (14)..(397): NCBI GI NO: 38347597 NR Description: OSJNBa0042I15.10
  misc_feature (96)..(397): NCBI GI NO: 15230489 NR Description: prephenate dehydratase family
MASMTTPRLPFLPARTRSAVAATSSSSPSSPLPRRSIKCSSSTNANSAPLPSTSRQPRAPVADGVGSADLNGLRAPPIPVADSPLPAYRDPHGLPRPLTSADLMESSGEGLKVAYQGFPGAYSEAAAKKAYPNCQTVPCEHFDTAFQAVQNWIVDRAVLPLENTLGGSIHRNYDLLLRHELHIVGEVRLAVRHCLVANRGVKIGNLRNVISHPQALAQCEHTLTELGIEHRQAVDDTAGAAKLVAEQMLQDTGAVASSLAAELYGLDILAENIQDEKVNVTRFMMLAWEPIIPRVDKPFKTSIVFSLEEGPGQLFKALAVFALREINLTKIESRPHKKRPFRVADDAFSTRVKYFDYLFYVDLEASMADPKTQNALRNLEEFATFLRVLGSYPTDVSEA

SEQ ID NO: 15276 - protein, 396 aa, Triticum aestivum
  peptide (1)..(396): Ceres Seq. ID no. 13502946
  misc_feature (110)..(288): Pfam Name: Pfam Description:  Prephenate dehydratase
  misc_feature (46)..(396): NCBI GI NO: 34394031 NR Description: putative prephenate dehydratase
  misc_feature (1)..(394): NCBI GI NO: 21537054 NR Description: putative P-protein: chorismate mutase
  misc_feature (1)..(394): NCBI GI NO: 15231489 NR Description: prephenate dehydratase family
  misc_feature (10)..(394): NCBI GI NO: 18390869 NR Description: prephenate dehydratase family
  misc_feature (82)..(393): NCBI GI NO: 14596233 NR Description: Unknown protein [Arabidopsis thaliana]
  misc_feature (1)..(394): NCBI GI NO: 15226259 NR Description: prephenate dehydratase family
  misc_feature (82)..(393): NCBI GI NO: 15221096 NR Description: prephenate dehydratase family
  misc_feature (1)..(394): NCBI GI NO: 21593283 NR Description: putative chorismate mutase/prephenate dehydratase
  misc_feature (11)..(394): NCBI GI NO: 38347597 NR Description: OSJNBa0042I15.10
  misc_feature (93)..(394): NCBI GI NO: 15230489 NR Description: prephenate dehydratase family
MTTPRLPFLPARTRSAVAATSSSSPSSPLPRRSIKCSSSTNANSAPLPSTSRQPRAPVADGVGSADLNGLRAPPIPVADSPLPAYRDPHGLPRPLTSADLMESSGEGLKVAYQGFPGAYSEAAAKKAYPNCQTVPCEHFDTAFQAVQNWIVDRAVLPLENTLGGSIHRNYDLLLRHELHIVGEVRLAVRHCLVANRGVKIGNLRNVISHPQALAQCEHTLTELGIEHRQAVDDTAGAAKLVAEQMLQDTGAVASSLAAELYGLDILAENIQDEKVNVTRFMMLAWEPIIPRVDKPFKTSIVFSLEEGPGQLFKALAVFALREINLTKIESRPHKKRPFRVADDAFSTRVKYFDYLFYVDLEASMADPKTQNALRNLEEFATFLRVLGSYPTDVSEA

SEQ ID NO: 15277 - DNA, 1293 bp, Triticum aestivum
  misc_feature (1)..(1293): Ceres Seq. ID no. 13597471
aaaaccggagacagcacaggcagctccccccataattgcctgtgccactggtggttggactggaagccgcctccctctcccccctgtcctccccttgcccgtcctcgacctcgccgccggccagcgatggagcggcgatccaccacccgcttctcgccttccgagattgcaaggatggagaagttggtttcatcagacagaaaagagcaagtcttggttgatagtttctgccagaagcttgtagaagaatttaatcgttctccagctcgagtcggaagcagagctctacaggctacacaggttcgaggatggttccttgataagctccctgcatcaactcctaaacctgcttccttgcctactacttctgaagaaaagcctttagcctcagaaccagatgcgttaatttctgagataaagacttcagcttctgatgaagaaaaagttttagctcttgatacaagtatttcaaacaatgaggatgcactttctgcggatttacccaaagagactacagataaggttcctgaatttgaagacttgcagtttgaggctaagtcatcaaaggattctgcatggtacgacgtcgccctcttcttggcacacaggaagacaagtttgggagaagttgaagtccgggtgaggtttatcggatatggggctgaagaagatgagtgggtgaatgtcaggaaggctgtccgccagcaatccattccgctggagtcctcagaatgccgaagcattgtcaaaggagatcttgtcctgtgtttcaaggagagcaatgatgaagcactgcatttcgatgcgcacgttgtggatgtccagcggaaacagcatgatataaggggatgcagatgcctcttccatgttgaatatgatcatgatcaaagccaggagatggtgaacctcaagagaatctccaggcggccaagatacctttgatggcttctgctaacatggatctgcttcctgctgctatccgagcttgtgtcgtactaacgggagccctcgaatcttggttgagaccgctgcactctgattgtttgttcttattgatgtactgtgtctagtagtaaaacacccgggagagtagttaagccccctctttggcacatagctgctgtaacggctatgagtaggctccgtgatagccaatttttgcacacacacgagaaagttggtgccaaagcgggcggagagccggattttaactggtgtgttggcagcagattaccatgtcactatgtcagtgtttgccgttctgaacctcttggggcgatttgcctctgcttc

SEQ ID NO: 15278 - protein, 313 aa, Triticum aestivum
  peptide (1)..(313): Ceres Seq. ID no. 13597472
  misc_feature (40)..(310): NCBI GI NO: 22331151 NR Description: expressed protein [Arabidopsis thaliana]
  misc_feature (78)..(310): NCBI GI NO: 11994101 NR Description: gb|AAD39678
  misc_feature (69)..(310): NCBI GI NO: 25402795 NR Description: protein F9L1.16 [imported] - Arabidopsis thaliana
  misc_feature (69)..(310): NCBI GI NO: 30684244 NR Description: expressed protein [Arabidopsis thaliana]
  misc_feature (69)..(300): NCBI GI NO: 30684237 NR Description: expressed protein [Arabidopsis thaliana]
KTGDSTGSSPHNCLCHWWLDWKPPPSPPCPPLARPRPRRRPAMERRSTTRFSPSEIARMEKLVSSDRKEQVLVDSFCQKLVEEFNRSPARVGSRALQATQVRGWFLDKLPASTPKPASLPTTSEEKPLASEPDALISEIKTSASDEEKVLALDTSISNNEDALSADLPKETTDKVPEFEDLQFEAKSSKDSAWYDVALFLAHRKTSLGEVEVRVRFIGYGAEEDEWVNVRKAVRQQSIPLESSECRSIVKGDLVLCFKESNDEALHFDAHVVDVQRKQHDIRGCRCLFHVEYDHDQSQEMVNLKRISRRPRYL

SEQ ID NO: 15279 - protein, 271 aa, Triticum aestivum
  peptide (1)..(271): Ceres Seq. ID no. 13597473
  misc_feature (1)..(268): NCBI GI NO: 22331151 NR Description: expressed protein [Arabidopsis thaliana]
  misc_feature (36)..(268): NCBI GI NO: 11994101 NR Description: gb|AAD39678
  misc_feature (27)..(268): NCBI GI NO: 25402795 NR Description: protein F9L1.16 [imported] - Arabidopsis thaliana
  misc_feature (27)..(268): NCBI GI NO: 30684244 NR Description: expressed protein [Arabidopsis thaliana]
  misc_feature (27)..(258): NCBI GI NO: 30684237 NR Description: expressed protein [Arabidopsis thaliana]
MERRSTTRFSPSEIARMEKLVSSDRKEQVLVDSFCQKLVEEFNRSPARVGSRALQATQVRGWFLDKLPASTPKPASLPTTSEEKPLASEPDALISEIKTSASDEEKVLALDTSISNNEDALSADLPKETTDKVPEFEDLQFEAKSSKDSAWYDVALFLAHRKTSLGEVEVRVRFIGYGAEEDEWVNVRKAVRQQSIPLESSECRSIVKGDLVLCFKESNDEALHFDAHVVDVQRKQHDIRGCRCLFHVEYDHDQSQEMVNLKRISRRPRYL

SEQ ID NO: 15280 - protein, 255 aa, Triticum aestivum
  peptide (1)..(255): Ceres Seq. ID no. 13597474
  misc_feature (1)..(252): NCBI GI NO: 22331151 NR Description: expressed protein [Arabidopsis thaliana]
  misc_feature (20)..(252): NCBI GI NO: 11994101 NR Description: gb|AAD39678
  misc_feature (11)..(252): NCBI GI NO: 25402795 NR Description: protein F9L1.16 [imported] - Arabidopsis thaliana
  misc_feature (11)..(252): NCBI GI NO: 30684244 NR Description: expressed protein [Arabidopsis thaliana]
  misc_feature (11)..(242): NCBI GI NO: 30684237 NR Description: expressed protein [Arabidopsis thaliana]
MEKLVSSDRKEQVLVDSFCQKLVEEFNRSPARVGSRALQATQVRGWFLDKLPASTPKPASLPTTSEEKPLASEPDALISEIKTSASDEEKVLALDTSISNNEDALSADLPKETTDKVPEFEDLQFEAKSSKDSAWYDVALFLAHRKTSLGEVEVRVRFIGYGAEEDEWVNVRKAVRQQSIPLESSECRSIVKGDLVLCFKESNDEALHFDAHVVDVQRKQHDIRGCRCLFHVEYDHDQSQEMVNLKRISRRPRYL

SEQ ID NO: 15281 - DNA, 1228 bp, Triticum aestivum
  misc_feature (1)..(1228): Ceres Seq. ID no. 13597475
actcgtcattgctgattacggagggagtagttgactacctccccacgattatcagcagccggcgccgccgttgctgttatcctgccgccgccgccgccgccgccgcctggttcggagaaatgggcaaaagagccatccgatacgccgtggtggatgccttcgcggctgagcccttcaagggcaaccccgccgcagtatgcctcctcgaagaggagggcgcctccgcggccatggacgaccggtggatgcagtccgtcgccgccgagttcaacctctcggagaccgccttcctcgcccgggactcctccgggggagccggcgcagccccgcggttccacctccgatggttcactcccgtcacggaggttgacctctgcgggcacgcgacgttggcctctgcgcacttcctcttcacgactgttcttccggagcatggcaagctggagttcatgaccaggtccgggatcctaactgccaagaaagtccctgcaccagggagcactggcgtcccaggtgaggagcaggggaagctgtttattgagctggatttccccatgattggttttctggactgcaaccaaatgccgtcgattccagagaccctaaacggtgcgcccattgtcagcgttcacaaatcggctaccgacggcgacctcattgtggaactttcttcaggaaaagaagttgttaatatccttcctagcatcgatgaaattaaaaacttggcctgcaggggtcttattgttacaggaccggcgccggctggatctggttatgacttctttacacgtttcttctgcccaaaatttgggatagatgaggaccctgttacgggcagtatacattgtgttttggcaccctattggggcagaaagctggggaagcaaaaattgacggcatttcaagcgtctccaaggggtggaacactatacctgcaactggatgacgcaaatcagagagtgcaaatccagggagaagctcttactgtgatggatgggacgctcctagcctagccagccattggcaatttggcatccatctactcgtatatgctttgaagggactaccattcatccatctactcgtatatttacggagttataatatgactttggatgtttgtgattatatttgctgttatatgcttgttgaacagttaactgtttatggatataaaaaatgccccctccattccctaaaaaaaaaaaaaaaaaagcttatcgatacc

SEQ ID NO: 15282 - protein, 336 aa, Triticum aestivum
  peptide (1)..(336): Ceres Seq. ID no. 15222105
  misc_feature (40)..(336): NCBI GI NO: 34903112 NR Description: unnamed protein product
  misc_feature (40)..(335): NCBI GI NO: 15236203 NR Description: expressed protein [Arabidopsis thaliana]
  misc_feature (42)..(335): NCBI GI NO: 15218739 NR Description: expressed protein [Arabidopsis thaliana]
  misc_feature (40)..(335): NCBI GI NO: 20466358 NR Description: putative protein [Arabidopsis thaliana]
  misc_feature (145)..(334): NCBI GI NO: 23017885 NR Description: hypothetical protein [Thermobifida fusca]
  misc_feature (46)..(157): NCBI GI NO: 23017885 NR Description: hypothetical protein [Thermobifida fusca]
  misc_feature (45)..(335): NCBI GI NO: 15236201 NR Description: hypothetical protein [Arabidopsis thaliana]
  misc_feature (181)..(335): NCBI GI NO: 23063080 NR Description: hypothetical protein
  misc_feature (45)..(160): NCBI GI NO: 23063080 NR Description: hypothetical protein
  misc_feature (78)..(335): NCBI GI NO: 29833535 NR Description: putative oxidoreductase
SSLLITEGVVDYLPTIISSRRRRCCYPAAAAAAAAWFGEMGKRAIRYAVVDAFAAEPFKGNPAAVCLLEEEGASAAMDDRWMQSVAAEFNLSETAFLARDSSGGAGAAPRFHLRWFTPVTEVDLCGHATLASAHFLFTTVLPEHGKLEFMTRSGILTAKKVPAPGSTGVPGEEQGKLFIELDFPMIGFLDCNQMPSIPETLNGAPIVSVHKSATDGDLIVELSSGKEVVNILPSIDEIKNLACRGLIVTGPAPAGSGYDFFTRFFCPKFGIDEDPVTGSIHCVLAPYWGRKLGKQKLTAFQASPRGGTLYLQLDDANQRVQIQGEALTVMDGTLLA

SEQ ID NO: 15283 - protein, 297 aa, Triticum aestivum
  peptide (1)..(297): Ceres Seq. ID no. 15222106
  misc_feature (1)..(297): NCBI GI NO: 34903112 NR Description: unnamed protein product
  misc_feature (1)..(296): NCBI GI NO: 15236203 NR Description: expressed protein [Arabidopsis thaliana]
  misc_feature (3)..(296): NCBI GI NO: 15218739 NR Description: expressed protein [Arabidopsis thaliana]
  misc_feature (1)..(296): NCBI GI NO: 20466358 NR Description: putative protein [Arabidopsis thaliana]
  misc_feature (106)..(295): NCBI GI NO: 23017885 NR Description: hypothetical protein [Thermobifida fusca]
  misc_feature (7)..(118): NCBI GI NO: 23017885 NR Description: hypothetical protein [Thermobifida fusca]
  misc_feature (6)..(296): NCBI GI NO: 15236201 NR Description: hypothetical protein [Arabidopsis thaliana]
  misc_feature (142)..(296): NCBI GI NO: 23063080 NR Description: hypothetical protein
  misc_feature (6)..(121): NCBI GI NO: 23063080 NR Description: hypothetical protein
  misc_feature (39)..(296): NCBI GI NO: 29833535 NR Description: putative oxidoreductase
MGKRAIRYAVVDAFAAEPFKGNPAAVCLLEEEGASAAMDDRWMQSVAAEFNLSETAFLARDSSGGAGAAPRFHLRWFTPVTEVDLCGHATLASAHFLFTTVLPEHGKLEFMTRSGILTAKKVPAPGSTGVPGEEQGKLFIELDFPMIGFLDCNQMPSIPETLNGAPIVSVHKSATDGDLIVELSSGKEVVNILPSIDEIKNLACRGLIVTGPAPAGSGYDFFTRFFCPKFGIDEDPVTGSIHCVLAPYWGRKLGKQKLTAFQASPRGGTLYLQLDDANQRVQIQGEALTVMDGTLLA

SEQ ID NO: 15284 - protein, 260 aa, Triticum aestivum
  peptide (1)..(260): Ceres Seq. ID no. 15222107
  misc_feature (1)..(260): NCBI GI NO: 34903112 NR Description: unnamed protein product
  misc_feature (1)..(259): NCBI GI NO: 15236203 NR Description: expressed protein [Arabidopsis thaliana]
  misc_feature (1)..(259): NCBI GI NO: 15218739 NR Description: expressed protein [Arabidopsis thaliana]
  misc_feature (1)..(259): NCBI GI NO: 20466358 NR Description: putative protein [Arabidopsis thaliana]
  misc_feature (69)..(258): NCBI GI NO: 23017885 NR Description: hypothetical protein [Thermobifida fusca]
  misc_feature (1)..(81): NCBI GI NO: 23017885 NR Description: hypothetical protein [Thermobifida fusca]
  misc_feature (1)..(259): NCBI GI NO: 15236201 NR Description: hypothetical protein [Arabidopsis thaliana]
  misc_feature (105)..(259): NCBI GI NO: 23063080 NR Description: hypothetical protein
  misc_feature (1)..(84): NCBI GI NO: 23063080 NR Description: hypothetical protein
  misc_feature (2)..(259): NCBI GI NO: 29833535 NR Description: putative oxidoreductase
MDDRWMQSVAAEFNLSETAFLARDSSGGAGAAPRFHLRWFTPVTEVDLCGHATLASAHFLFTTVLPEHGKLEFMTRSGILTAKKVPAPGSTGVPGEEQGKLFIELDFPMIGFLDCNQMPSIPETLNGAPIVSVHKSATDGDLIVELSSGKEVVNILPSIDEIKNLACRGLIVTGPAPAGSGYDFFTRFFCPKFGIDEDPVTGSIHCVLAPYWGRKLGKQKLTAFQASPRGGTLYLQLDDANQRVQIQGEALTVMDGTLLA

SEQ ID NO: 15285 - DNA, 1440 bp, Triticum aestivum
  misc_feature (1)..(1440): Ceres Seq. ID no. 13502858
ccgaaacagatccacctcctcagcgtcgcgtggtgggaagacgagaacctcccaaaggccaaagcccataacccctaacctagggtttcgccgccatgggatccgccgcctccgccgcctccgacgcagcgccgccaccgccttctccagcgcaaccacacggggccgcgccgccgtatggggttgggctcgccggcatcctccctcagaagccggatggggatgataagaaggaggagaaggtggactacctcaacctcccttgccccgtgccgtacgaggagatccagcgcgaggccctcatgtctctgaagcctgaactttttgaaggtttgaggtttgacttcacaaagatgttaacccagaagttcgctcttagccatagtgtccttatgggctccctggaagttccgtctcagtcagctgatgttataaaagtcccaacatcacagtatgaatttggtgccaattttttagatccaaagttaatgcttatcggaaggttgatgactgatggaaggctgaatgctcgtgtgaaatgtgatctgacagagaatctcgcgctgaaaataaatgcacagcttactagtgagcctcattactctcaagggatgttcaactttgactacaagggcacagactatcgagcacagtttcaaattggaaacaatgcgttctatggggcaaattatatccagagtgttacgccaaatttgtcgatgggaacagagatattctggcttggtcagcaaaggaagtcaggaattggatttaattctcgctacaatacagataagatggtgggtactctacaggttgctagcactggtattgttgcgttaagttatgtccagaaagtttctgaaaaggtatctcttgctactgactttatgtataaccacatgtccagagatgtgacttccagcgttggttacgattatatccttaggcagtgccgtctaaggggcaaagttgactcaaatggtgtcgttgctgcatacttggaggagagattgaacatgggtgtcaactttcttctgtctgcagagattgaccatccaaagaagaactacaagtttggttttggaatgactgtaggagagtagatatgctcacagcaattactgtgagaggactacagatgtctcctcagttcgttataagtgcaggtttaccatatggtctcggttcaagtgttcgggacctacagattcgctcctcaagcgttgcaggctttttcggtgtacttgcggttgtctcatttcagctgctttagatagcatgggcatttgggcgtccatgattctttgtttatctaaaacaagctgaaacgttgttgtaataatgttcacttggttgttggagatttttgacccttaggttcccagcaataggcttctgtgaaatgaccgtactccacaagctacagattatacattg

SEQ ID NO: 15286 - protein, 336 aa, Triticum aestivum
  peptide (1)..(336): Ceres Seq. ID no. 13502859
  misc_feature (58)..(329): Pfam Name: Pfam Description:  Eukaryotic porin
  misc_feature (32)..(335): NCBI GI NO: 15231008 NR Description: membrane import protein -related
  misc_feature (41)..(332): NCBI GI NO: 15222963 NR Description: hypothetical protein [Arabidopsis thaliana]
  misc_feature (162)..(335): NCBI GI NO: 11994775 NR Description: membrane import protein-like
  misc_feature (32)..(131): NCBI GI NO: 11994775 NR Description: membrane import protein-like
  misc_feature (159)..(332): NCBI GI NO: 13162531 NR Description: Hypothetical protein [Arabidopsis thaliana]
  misc_feature (159)..(332): NCBI GI NO: 25405370 NR Description: hypothetical protein F14I3.2
  misc_feature (244)..(336): NCBI GI NO: 2982293 NR Description: ISP42-like protein [Picea mariana]
  misc_feature (1)..(279): NCBI GI NO: 34903264 NR Description: unnamed protein product
  misc_feature (209)..(336): NCBI GI NO: 34903264 NR Description: unnamed protein product
  misc_feature (41)..(172): NCBI GI NO: 13162531 NR Description: Hypothetical protein [Arabidopsis thaliana]
MGSAASAASDAAPPPPSPAQPHGAAPPYGVGLAGILPQKPDGDDKKEEKVDYLNLPCPVPYEEIQREALMSLKPELFEGLRFDFTKMLTQKFALSHSVLMGSLEVPSQSADVIKVPTSQYEFGANFLDPKLMLIGRLMTDGRLNARVKCDLTENLALKINAQLTSEPHYSQGMFNFDYKGTDYRAQFQIGNNAFYGANYIQSVTPNLSMGTEIFWLGQQRKSGIGFNSRYNTDKMVGTLQVASTGIVALSYVQKVSEKVSLATDFMYNHMSRDVTSSVGYDYILRQCRLRGKVDSNGVVAAYLEERLNMGVNFLLSAEIDHPKKNYKFGFGMTVGE

SEQ ID NO: 15287 - protein, 267 aa, Triticum aestivum
  peptide (1)..(267): Ceres Seq. ID no. 13502860
  misc_feature (1)..(260): Pfam Name: Pfam Description:  Eukaryotic porin
  misc_feature (1)..(266): NCBI GI NO: 15231008 NR Description: membrane import protein -related
  misc_feature (1)..(263): NCBI GI NO: 15222963 NR Description: hypothetical protein [Arabidopsis thaliana]
  misc_feature (93)..(266): NCBI GI NO: 11994775 NR Description: membrane import protein-like
  misc_feature (1)..(62): NCBI GI NO: 11994775 NR Description: membrane import protein-like
  misc_feature (90)..(263): NCBI GI NO: 13162531 NR Description: Hypothetical protein [Arabidopsis thaliana]
  misc_feature (90)..(263): NCBI GI NO: 25405370 NR Description: hypothetical protein F14I3.2
  misc_feature (175)..(267): NCBI GI NO: 2982293 NR Description: ISP42-like protein [Picea mariana]
  misc_feature (1)..(210): NCBI GI NO: 34903264 NR Description: unnamed protein product
  misc_feature (140)..(267): NCBI GI NO: 34903264 NR Description: unnamed protein product
  misc_feature (1)..(103): NCBI GI NO: 13162531 NR Description: Hypothetical protein [Arabidopsis thaliana]
MSLKPELFEGLRFDFTKMLTQKFALSHSVLMGSLEVPSQSADVIKVPTSQYEFGANFLDPKLMLIGRLMTDGRLNARVKCDLTENLALKINAQLTSEPHYSQGMFNFDYKGTDYRAQFQIGNNAFYGANYIQSVTPNLSMGTEIFWLGQQRKSGIGFNSRYNTDKMVGTLQVASTGIVALSYVQKVSEKVSLATDFMYNHMSRDVTSSVGYDYILRQCRLRGKVDSNGVVAAYLEERLNMGVNFLLSAEIDHPKKNYKFGFGMTVGE

SEQ ID NO: 15288 - protein, 250 aa, Triticum aestivum
  peptide (1)..(250): Ceres Seq. ID no. 13502861
  misc_feature (1)..(243): Pfam Name: Pfam Description:  Eukaryotic porin
  misc_feature (1)..(249): NCBI GI NO: 15231008 NR Description: membrane import protein -related
  misc_feature (1)..(246): NCBI GI NO: 15222963 NR Description: hypothetical protein [Arabidopsis thaliana]
  misc_feature (76)..(249): NCBI GI NO: 11994775 NR Description: membrane import protein-like
  misc_feature (1)..(45): NCBI GI NO: 11994775 NR Description: membrane import protein-like
  misc_feature (73)..(246): NCBI GI NO: 13162531 NR Description: Hypothetical protein [Arabidopsis thaliana]
  misc_feature (73)..(246): NCBI GI NO: 25405370 NR Description: hypothetical protein F14I3.2
  misc_feature (158)..(250): NCBI GI NO: 2982293 NR Description: ISP42-like protein [Picea mariana]
  misc_feature (1)..(193): NCBI GI NO: 34903264 NR Description: unnamed protein product
  misc_feature (123)..(250): NCBI GI NO: 34903264 NR Description: unnamed protein product
  misc_feature (1)..(86): NCBI GI NO: 13162531 NR Description: Hypothetical protein [Arabidopsis thaliana]
MLTQKFALSHSVLMGSLEVPSQSADVIKVPTSQYEFGANFLDPKLMLIGRLMTDGRLNARVKCDLTENLALKINAQLTSEPHYSQGMFNFDYKGTDYRAQFQIGNNAFYGANYIQSVTPNLSMGTEIFWLGQQRKSGIGFNSRYNTDKMVGTLQVASTGIVALSYVQKVSEKVSLATDFMYNHMSRDVTSSVGYDYILRQCRLRGKVDSNGVVAAYLEERLNMGVNFLLSAEIDHPKKNYKFGFGMTVGE

SEQ ID NO: 15289 - DNA, 1490 bp, Triticum aestivum
  misc_feature (1)..(1490): Ceres Seq. ID no. 13584608
attaagctcgctcctcgttgtgcttctccactcgcacggcgaagaacagggcacctctgaccgaacatagcagcatagcatctccccacgctctcacgcatcaccacagctacagcatcaagatcactagtagtagatcaactagccaggtatagctatggcgtccgagcagagtcgccgcgaggagcgcgcgcaggccgcggcgcagaaggcgaccgacgagctcgccgcggccaggcgggacatgcgcgagcccagcagcccaggacggcggaccggcatcttcggcaccgtgcaggagagcgcgcgctccctgatgggcgccgtccgcgacaccttctccggcggcgtccgggacacaaccacggcacacgacagccactccacaggcgccatggggaccgcgggggggaaactcaatgagtacgggagctacgcatcccagaaggccgatgaagggaaggagagcgcgagtgagatggcggaagccgccgcggggaagaccaaggagaccaaggatgcggccgcggagaagacgagggagatggcggacgccgccgcggggaagaccaaggagaccaaggacgcggcggtggagaagacgagggagatggcggacaccgccgcgacgaaggccgtggagaccaaggacgcggccgcagagaaggcgcgcggcgcgggggagatggtgacggagaaggcgaggagtgccaaggacacggcggctgacaaggcgagtggagcggcggagaaggcgaagggcgccaaggacgcagccttcgatacagcggagggtgccaaggagtacatggtggacaagaaggaggacgcccggcgagcgctcgccggctcggccaaggatagcaagggcgagacgaacgagtcggcgtggcaacagggccaggacgtgcggcggcgggcggcggagaaggccgaggaggttcgtcagcgcacgcaccaaccgccggaggaggggaggtcgaagtcggcaacggagaacatcttcgggtcggcgcaggggttgacggaggcgttcaaggagaagatgacgatgccgacggacgtgatcgagcggaagctcgctgagaggaaggggacgccgacggacgcgagcaggggcgaggcactgaacacggacgacgtgatgatgcgcgtgaaggaggcggaccagatgaccgggacagggtttaacgacgtcggcaagatgggcgaggagggcacgggcatgaaggcggcactgagggtcgacgatgaggaggacgtgatgctgcgggtgaaggcggcggaccagatgacagggcaggcgttcaacgacgtcggcccgatgggcgaggagggcacgggatggggtccggcgttgagggcgcggaaggacgcctgagagcgttgacacgtgcatgcactcctgttgcgtgtgagcgttttgtgtgacactttgtagtacaagctactcctgtagcaaatcaataaattatgcccggcaacttttt

SEQ ID NO: 15290 - protein, 407 aa, Triticum aestivum
  peptide (1)..(407): Ceres Seq. ID no. 13584609
  misc_feature (224)..(302): Pfam Name: Pfam Description:  Late embryogenesis abundant protein
  misc_feature (93)..(407): NCBI GI NO: 485510 NR Description: embryonic abundant protein, group 3 - wheat
  misc_feature (2)..(354): NCBI GI NO: 481805 NR Description: embryonic protein BP8 - European white birch
  misc_feature (46)..(394): NCBI GI NO: 282899 NR Description: embryonic abundant protein, 59K - soybean
  misc_feature (2)..(361): NCBI GI NO: 15228014 NR Description: late embryogenesis abundant (LEA) protein (ECP63)
  misc_feature (2)..(361): NCBI GI NO: 7487938 NR Description: late embryogenesis abundant protein
  misc_feature (146)..(396): NCBI GI NO: 34903266 NR Description: unnamed protein product
  misc_feature (3)..(353): NCBI GI NO: 15231736 NR Description: late embryogenesis abundant
  misc_feature (85)..(393): NCBI GI NO: 119127 NR Description: Embryonic protein DC-8
  misc_feature (4)..(376): NCBI GI NO: 481805 NR Description: embryonic protein BP8 - European white birch
  misc_feature (48)..(396): NCBI GI NO: 15231736 NR Description: late embryogenesis abundant
MASEQSRREERAQAAAQKATDELAAARRDMREPSSPGRRTGIFGTVQESARSLMGAVRDTFSGGVRDTTTAHDSHSTGAMGTAGGKLNEYGSYASQKADEGKESASEMAEAAAGKTKETKDAAAEKTREMADAAAGKTKETKDAAVEKTREMADTAATKAVETKDAAAEKARGAGEMVTEKARSAKDTAADKASGAAEKAKGAKDAAFDTAEGAKEYMVDKKEDARRALAGSAKDSKGETNESAWQQGQDVRRRAAEKAEEVRQRTHQPPEEGRSKSATENIFGSAQGLTEAFKEKMTMPTDVIERKLAERKGTPTDASRGEALNTDDVMMRVKEADQMTGTGFNDVGKMGEEGTGMKAALRVDDEEDVMLRVKAADQMTGQAFNDVGPMGEEGTGWGPALRARKDA

SEQ ID NO: 15291 - protein, 378 aa, Triticum aestivum
  peptide (1)..(378): Ceres Seq. ID no. 13584610
  misc_feature (195)..(273): Pfam Name: Pfam Description:  Late embryogenesis abundant protein
  misc_feature (64)..(378): NCBI GI NO: 485510 NR Description: embryonic abundant protein, group 3 - wheat
  misc_feature (1)..(325): NCBI GI NO: 481805 NR Description: embryonic protein BP8 - European white birch
  misc_feature (17)..(365): NCBI GI NO: 282899 NR Description: embryonic abundant protein, 59K - soybean
  misc_feature (1)..(332): NCBI GI NO: 15228014 NR Description: late embryogenesis abundant (LEA) protein (ECP63)
  misc_feature (1)..(332): NCBI GI NO: 7487938 NR Description: late embryogenesis abundant protein
  misc_feature (117)..(367): NCBI GI NO: 34903266 NR Description: unnamed protein product
  misc_feature (1)..(324): NCBI GI NO: 15231736 NR Description: late embryogenesis abundant
  misc_feature (56)..(364): NCBI GI NO: 119127 NR Description: Embryonic protein DC-8
  misc_feature (1)..(347): NCBI GI NO: 481805 NR Description: embryonic protein BP8 - European white birch
  misc_feature (19)..(367): NCBI GI NO: 15231736 NR Description: late embryogenesis abundant
MREPSSPGRRTGIFGTVQESARSLMGAVRDTFSGGVRDTTTAHDSHSTGAMGTAGGKLNEYGSYASQKADEGKESASEMAEAAAGKTKETKDAAAEKTREMADAAAGKTKETKDAAVEKTREMADTAATKAVETKDAAAEKARGAGEMVTEKARSAKDTAADKASGAAEKAKGAKDAAFDTAEGAKEYMVDKKEDARRALAGSAKDSKGETNESAWQQGQDVRRRAAEKAEEVRQRTHQPPEEGRSKSATENIFGSAQGLTEAFKEKMTMPTDVIERKLAERKGTPTDASRGEALNTDDVMMRVKEADQMTGTGFNDVGKMGEEGTGMKAALRVDDEEDVMLRVKAADQMTGQAFNDVGPMGEEGTGWGPALRARKDA

SEQ ID NO: 15292 - protein, 354 aa, Triticum aestivum
  peptide (1)..(354): Ceres Seq. ID no. 13584611
  misc_feature (171)..(249): Pfam Name: Pfam Description:  Late embryogenesis abundant protein
  misc_feature (40)..(354): NCBI GI NO: 485510 NR Description: embryonic abundant protein, group 3 - wheat
  misc_feature (1)..(301): NCBI GI NO: 481805 NR Description: embryonic protein BP8 - European white birch
  misc_feature (1)..(341): NCBI GI NO: 282899 NR Description: embryonic abundant protein, 59K - soybean
  misc_feature (1)..(308): NCBI GI NO: 15228014 NR Description: late embryogenesis abundant (LEA) protein (ECP63)
  misc_feature (1)..(308): NCBI GI NO: 7487938 NR Description: late embryogenesis abundant protein
  misc_feature (93)..(343): NCBI GI NO: 34903266 NR Description: unnamed protein product
  misc_feature (1)..(300): NCBI GI NO: 15231736 NR Description: late embryogenesis abundant
  misc_feature (32)..(340): NCBI GI NO: 119127 NR Description: Embryonic protein DC-8
  misc_feature (1)..(323): NCBI GI NO: 481805 NR Description: embryonic protein BP8 - European white birch
  misc_feature (1)..(343): NCBI GI NO: 15231736 NR Description: late embryogenesis abundant
MGAVRDTFSGGVRDTTTAHDSHSTGAMGTAGGKLNEYGSYASQKADEGKESASEMAEAAAGKTKETKDAAAEKTREMADAAAGKTKETKDAAVEKTREMADTAATKAVETKDAAAEKARGAGEMVTEKARSAKDTAADKASGAAEKAKGAKDAAFDTAEGAKEYMVDKKEDARRALAGSAKDSKGETNESAWQQGQDVRRRAAEKAEEVRQRTHQPPEEGRSKSATENIFGSAQGLTEAFKEKMTMPTDVIERKLAERKGTPTDASRGEALNTDDVMMRVKEADQMTGTGFNDVGKMGEEGTGMKAALRVDDEEDVMLRVKAADQMTGQAFNDVGPMGEEGTGWGPALRARKDA

SEQ ID NO: 15293 - DNA, 2306 bp, Triticum aestivum
  misc_feature (1)..(2306): Ceres Seq. ID no. 13655755
atccctctcccaactccaaaccatctccgccgccgccgccgaacaccacctccaccgcccacgaaatcttctccccgaagacgcgcgaaccccgccggagacgagaggcatggacgccaagtcggtgacgccgggcgccgtggctctcatcctcgccaaccccacgccggagtcgcccgacgacgtgccggagatcgtcgtgcaggtcctcgacctcaagcccatcggctcccgcttcactttcatggccagcgacggggaggcgaaggtcaaggcgatcctctccacccacttcgcgtcggaggtccactccggcaagctccagaacctcggcctcgtccgcatcctcaactacacgtgcaacgacatcccacaaaagacggacaagatggtgatcatcaccaagtgcgaggtcgtgtcccaggcgctcgacgccgagatcaagagcgaggtcaggatagaagagccagcggctctcatgaagcccaaggaggaggctgcggtcctctccaagcccattggcggggccccggctgcgattatgctgaagccgaggcatgacgtgaagtccgcgtcccagattgttagcgagcagcgcggaaatgctgctcccgctgctcgcttggccatgacgagacgggtgcatcctctgatctccctgaacccctaccaggggaactgggtcatcaaagtgcgggtcacaagcaagggcaacctcaggtcatacaggaatgcccgtggagaaggccatgtcttcaacgtagagctcactgatgaggatggcacccagatccaggccaccatgttcaacgagcctgcaaagaagttctatcccgtgtttgagcttgggaaggtctactacatctccaaggggtcgctcagaattgcgaacaagcagttcaagacagtccagaatgactatgagatgaccctgaatgagaatgctgttgttgaagaagctgagggtgaatctttcattccaccagtgcaatacaactttgtcaagattgatatgctggggccatatgttggtggcagggagttagtagatatcattggtgttgttcagagtgtatcacctactttgagtatcagaagaaagatcgacaatgagtcaatcccaaagcgtgacattgttgttgcagatgactcgaacaaaactgtcaccatttctctttggaatgatcttgccaccactgtcggtgaggaactcttggacatggttgactctgcacctatcattgcagtcaagagcctgaaggtgtctgactttcaaggtgtgtctgtttctacagtaggcaaaagcacacttgtgattaacccagagttgcctgagactgagaagcttagagcttggtatgaatctgaaggcaagggtactgccttggcatcagttggtgctggaatgggtgcatccaacgctggtggcttgagatcaatgtactctgacagagtttttctgtctcacatcacaagtgaccctaacttgggccaggataagcctgttttcttcagcctgtatgccaacataagcaacatcaagcctgaccagaccatgtggtaccgcgcttgcaccacctgtaacaagaaggtgactgaggcacttggatcaggattctggtgtgaagggtgccagaagaactatgagcagtgctcattgaggtacatcatggtgatcaaggtctctgatcccactggtgaggcctggctgtctcttttcaatgaccaagcagagagaatcgtcggctgcagcgcagatgagcttgatcggatcaggaaagaggagggcgatgacatgttccagctcaagctgaaggaagccacctggattcctcacctgttccgtgtcagcgtcgtgcagaacgagtacatgggcgagaagaggcagcgaatcaccgtgaggagcgagtcaccggtcgactacgccgctgaagccaggtaccagctcgaggagatcgccaagctcacctccagctagaagaagatgcaagaggagtatgcctgctcccctcgaggagattcccaagctcaccgctgcctgctgggagaagatgctccccttgaggagatagatatccaggctcatcgcactagacggagccatgttttggccccaagtttcctgaagtgtagtgctgcttcagccgtgtctttctgccgtgtcgctcctcaaatgtagtggtaacttaaaacgtgttatatatgtagatgtttgattcggaggacatcggggtattcttctgttctactatctgtttgatctgcaaccttctgcatatgacaaggatgtatgcagatccactgcc

SEQ ID NO: 15294 - protein, 658 aa, Triticum aestivum
  peptide (1)..(658): Ceres Seq. ID no. 13655756
  misc_feature (227)..(311): Pfam Name: Pfam Description:  OB-fold nucleic acid binding domain
  misc_feature (39)..(656): NCBI GI NO: 7440032 NR Description: probable replication protein A1 - rice
  misc_feature (39)..(656): NCBI GI NO: 31580977 NR Description: replication protein A 70b
  misc_feature (176)..(658): NCBI GI NO: 15241489 NR Description: replication protein, putative
  misc_feature (41)..(185): NCBI GI NO: 15241489 NR Description: replication protein, putative
  misc_feature (41)..(653): NCBI GI NO: 15239494 NR Description: replication protein, putative
  misc_feature (185)..(654): NCBI GI NO: 15225129 NR Description: replication protein, putative
  misc_feature (41)..(141): NCBI GI NO: 15225129 NR Description: replication protein, putative
  misc_feature (201)..(655): NCBI GI NO: 15242405 NR Description: replication protein, putative
  misc_feature (39)..(139): NCBI GI NO: 15242405 NR Description: replication protein, putative
  misc_feature (42)..(654): NCBI GI NO: 34872759 NR Description: similar to replication protein A1
SLSQLQTISAAAAEHHLHRPRNLLPEDARTPPETRGMDAKSVTPGAVALILANPTPESPDDVPEIVVQVLDLKPIGSRFTFMASDGEAKVKAILSTHFASEVHSGKLQNLGLVRILNYTCNDIPQKTDKMVIITKCEVVSQALDAEIKSEVRIEEPAALMKPKEEAAVLSKPIGGAPAAIMLKPRHDVKSASQIVSEQRGNAAPAARLAMTRRVHPLISLNPYQGNWVIKVRVTSKGNLRSYRNARGEGHVFNVELTDEDGTQIQATMFNEPAKKFYPVFELGKVYYISKGSLRIANKQFKTVQNDYEMTLNENAVVEEAEGESFIPPVQYNFVKIDMLGPYVGGRELVDIIGVVQSVSPTLSIRRKIDNESIPKRDIVVADDSNKTVTISLWNDLATTVGEELLDMVDSAPIIAVKSLKVSDFQGVSVSTVGKSTLVINPELPETEKLRAWYESEGKGTALASVGAGMGASNAGGLRSMYSDRVFLSHITSDPNLGQDKPVFFSLYANISNIKPDQTMWYRACTTCNKKVTEALGSGFWCEGCQKNYEQCSLRYIMVIKVSDPTGEAWLSLFNDQAERIVGCSADELDRIRKEEGDDMFQLKLKEATWIPHLFRVSVVQNEYMGEKRQRITVRSESPVDYAAEARYQLEEIAKLTSS

SEQ ID NO: 15295 - protein, 622 aa, Triticum aestivum
  peptide (1)..(622): Ceres Seq. ID no. 13655757
  misc_feature (191)..(275): Pfam Name: Pfam Description:  OB-fold nucleic acid binding domain
  misc_feature (3)..(620): NCBI GI NO: 7440032 NR Description: probable replication protein A1 - rice
  misc_feature (3)..(620): NCBI GI NO: 31580977 NR Description: replication protein A 70b
  misc_feature (140)..(622): NCBI GI NO: 15241489 NR Description: replication protein, putative
  misc_feature (5)..(149): NCBI GI NO: 15241489 NR Description: replication protein, putative
  misc_feature (5)..(617): NCBI GI NO: 15239494 NR Description: replication protein, putative
  misc_feature (149)..(618): NCBI GI NO: 15225129 NR Description: replication protein, putative
  misc_feature (5)..(105): NCBI GI NO: 15225129 NR Description: replication protein, putative
  misc_feature (165)..(619): NCBI GI NO: 15242405 NR Description: replication protein, putative
  misc_feature (3)..(103): NCBI GI NO: 15242405 NR Description: replication protein, putative
  misc_feature (6)..(618): NCBI GI NO: 34872759 NR Description: similar to replication protein A1
MDAKSVTPGAVALILANPTPESPDDVPEIVVQVLDLKPIGSRFTFMASDGEAKVKAILSTHFASEVHSGKLQNLGLVRILNYTCNDIPQKTDKMVIITKCEVVSQALDAEIKSEVRIEEPAALMKPKEEAAVLSKPIGGAPAAIMLKPRHDVKSASQIVSEQRGNAAPAARLAMTRRVHPLISLNPYQGNWVIKVRVTSKGNLRSYRNARGEGHVFNVELTDEDGTQIQATMFNEPAKKFYPVFELGKVYYISKGSLRIANKQFKTVQNDYEMTLNENAVVEEAEGESFIPPVQYNFVKIDMLGPYVGGRELVDIIGVVQSVSPTLSIRRKIDNESIPKRDIVVADDSNKTVTISLWNDLATTVGEELLDMVDSAPIIAVKSLKVSDFQGVSVSTVGKSTLVINPELPETEKLRAWYESEGKGTALASVGAGMGASNAGGLRSMYSDRVFLSHITSDPNLGQDKPVFFSLYANISNIKPDQTMWYRACTTCNKKVTEALGSGFWCEGCQKNYEQCSLRYIMVIKVSDPTGEAWLSLFNDQAERIVGCSADELDRIRKEEGDDMFQLKLKEATWIPHLFRVSVVQNEYMGEKRQRITVRSESPVDYAAEARYQLEEIAKLTSS

SEQ ID NO: 15296 - protein, 577 aa, Triticum aestivum
  peptide (1)..(577): Ceres Seq. ID no. 13655758
  misc_feature (146)..(230): Pfam Name: Pfam Description:  OB-fold nucleic acid binding domain
  misc_feature (1)..(575): NCBI GI NO: 7440032 NR Description: probable replication protein A1 - rice
  misc_feature (1)..(575): NCBI GI NO: 31580977 NR Description: replication protein A 70b
  misc_feature (95)..(577): NCBI GI NO: 15241489 NR Description: replication protein, putative
  misc_feature (1)..(104): NCBI GI NO: 15241489 NR Description: replication protein, putative
  misc_feature (1)..(572): NCBI GI NO: 15239494 NR Description: replication protein, putative
  misc_feature (104)..(573): NCBI GI NO: 15225129 NR Description: replication protein, putative
  misc_feature (1)..(60): NCBI GI NO: 15225129 NR Description: replication protein, putative
  misc_feature (120)..(574): NCBI GI NO: 15242405 NR Description: replication protein, putative
  misc_feature (1)..(58): NCBI GI NO: 15242405 NR Description: replication protein, putative
  misc_feature (1)..(573): NCBI GI NO: 34872759 NR Description: similar to replication protein A1
MASDGEAKVKAILSTHFASEVHSGKLQNLGLVRILNYTCNDIPQKTDKMVIITKCEVVSQALDAEIKSEVRIEEPAALMKPKEEAAVLSKPIGGAPAAIMLKPRHDVKSASQIVSEQRGNAAPAARLAMTRRVHPLISLNPYQGNWVIKVRVTSKGNLRSYRNARGEGHVFNVELTDEDGTQIQATMFNEPAKKFYPVFELGKVYYISKGSLRIANKQFKTVQNDYEMTLNENAVVEEAEGESFIPPVQYNFVKIDMLGPYVGGRELVDIIGVVQSVSPTLSIRRKIDNESIPKRDIVVADDSNKTVTISLWNDLATTVGEELLDMVDSAPIIAVKSLKVSDFQGVSVSTVGKSTLVINPELPETEKLRAWYESEGKGTALASVGAGMGASNAGGLRSMYSDRVFLSHITSDPNLGQDKPVFFSLYANISNIKPDQTMWYRACTTCNKKVTEALGSGFWCEGCQKNYEQCSLRYIMVIKVSDPTGEAWLSLFNDQAERIVGCSADELDRIRKEEGDDMFQLKLKEATWIPHLFRVSVVQNEYMGEKRQRITVRSESPVDYAAEARYQLEEIAKLTSS

SEQ ID NO: 15297 - DNA, 1399 bp, Triticum aestivum
  misc_feature (1)..(1399): Ceres Seq. ID no. 13503512
acttcgcttccttcatcttcccgggcggtgcggtgcgtacggcgcaaccagatctcacggcgaggccgagctaaccgcctccggatccgcacaaacccccaacagccgtacgcaccgcagcagcggcggcggaggagcatggagagctcgtcgccttcggtgccgttcccgctgctgcaggcgccagtggagagcacgtaccgtgcctgcaccataccctaccgcttcccctccgacaacccccacaaggccacccccgtcgagatccagtggatcgacctcttcctgaaatccgtgccatccttcaggcagcgggcggagaatgaccccacggtgccggatgcccccgccaaggccgagaagtttgctcagaggtacactgatatgcttgaggagttgaagaagaacccagagagccatggaggacctcctgattgcatacttctttgtaggcttcgtgagctaatccttagagaattggggtttcatgacatcttcaagaaggtcaaggatgaggagaacgctaaggctatgtcactgtttgagggagttgttcagcggaatgatgaaatagaagatggtgagaaacgagcagagaacttgatccgtggaatcttagcaggaaacatatttgacttagggtctgcacagcttgcagaagtttttgctaaagatggcatgtccttcttggcgagttgccagaatcttttatctcgaccttgggttattgatgacctagatgcatttaaaagcaaatggaccaagaaatcttgggaaaaggcagttatttttgttgataattctggtgctgatatcatattgggcatattaccatttgcgagggagttgctccgacgtggcactaaggtgatacttgccgccaatgacatgccttccatcaacgatatcacttacctagagttagttgagattgtaaacaagctcaaggacgaaaatggaaagcttgctggtgtggatgtatctgacctcattgttgccaactccgggaacgatctgccagtaatagatttgtctagcgtcgcaccggaactagcctatatggcaagtgatgctgacttggtcatcctagaaggcatgggaagaggaatcgaaaccaacctatacgcacaaatgagatgtgactcgatcaagattggaatggtcaagcatcctgaagtggcgcagtttttgggtggaaggctttatgattgtgtcttcaagttcaacgaggcctgaaaaacactgaagcccctgcatggcaccagccatattgcattcattttaatcattgattactgatgcaatcgtacactgaatgtatgcgtccacgatgatagcaagtggaagaaattacaattcgcttgttgtactgtgaggaaggacaatttttattgcaaat

SEQ ID NO: 15298 - protein, 411 aa, Triticum aestivum
  peptide (1)..(411): Ceres Seq. ID no. 13503513
  misc_feature (83)..(408): Pfam Name: Pfam Description:  Protein of unknown function DUF89
  misc_feature (47)..(410): NCBI GI NO: 21554145 NR Description: unknown [Arabidopsis thaliana]
  misc_feature (47)..(410): NCBI GI NO: 18418688 NR Description: expressed protein [Arabidopsis thaliana]
  misc_feature (47)..(410): NCBI GI NO: 21554574 NR Description: unknown [Arabidopsis thaliana]
  misc_feature (47)..(410): NCBI GI NO: 18398388 NR Description: expressed protein [Arabidopsis thaliana]
  misc_feature (47)..(213): NCBI GI NO: 25370535 NR Description: hypothetical protein At2g17340
  misc_feature (289)..(410): NCBI GI NO: 25370535 NR Description: hypothetical protein At2g17340
  misc_feature (54)..(226): NCBI GI NO: 15227811 NR Description: expressed protein [Arabidopsis thaliana]
  misc_feature (310)..(410): NCBI GI NO: 15227811 NR Description: expressed protein [Arabidopsis thaliana]
  misc_feature (210)..(315): NCBI GI NO: 15227811 NR Description: expressed protein [Arabidopsis thaliana]
  misc_feature (54)..(217): NCBI GI NO: 7486028 NR Description: hypothetical protein F23E12
TSLPSSSRAVRCVRRNQISRRGRANRLRIRTNPQQPYAPQQRRRRSMESSSPSVPFPLLQAPVESTYRACTIPYRFPSDNPHKATPVEIQWIDLFLKSVPSFRQRAENDPTVPDAPAKAEKFAQRYTDMLEELKKNPESHGGPPDCILLCRLRELILRELGFHDIFKKVKDEENAKAMSLFEGVVQRNDEIEDGEKRAENLIRGILAGNIFDLGSAQLAEVFAKDGMSFLASCQNLLSRPWVIDDLDAFKSKWTKKSWEKAVIFVDNSGADIILGILPFARELLRRGTKVILAANDMPSINDITYLELVEIVNKLKDENGKLAGVDVSDLIVANSGNDLPVIDLSSVAPELAYMASDADLVILEGMGRGIETNLYAQMRCDSIKIGMVKHPEVAQFLGGRLYDCVFKFNEA

SEQ ID NO: 15299 - protein, 365 aa, Triticum aestivum
  peptide (1)..(365): Ceres Seq. ID no. 13503514
  misc_feature (37)..(362): Pfam Name: Pfam Description:  Protein of unknown function DUF89
  misc_feature (1)..(364): NCBI GI NO: 21554145 NR Description: unknown [Arabidopsis thaliana]
  misc_feature (1)..(364): NCBI GI NO: 18418688 NR Description: expressed protein [Arabidopsis thaliana]
  misc_feature (1)..(364): NCBI GI NO: 21554574 NR Description: unknown [Arabidopsis thaliana]
  misc_feature (1)..(364): NCBI GI NO: 18398388 NR Description: expressed protein [Arabidopsis thaliana]
  misc_feature (1)..(167): NCBI GI NO: 25370535 NR Description: hypothetical protein At2g17340
  misc_feature (243)..(364): NCBI GI NO: 25370535 NR Description: hypothetical protein At2g17340
  misc_feature (8)..(180): NCBI GI NO: 15227811 NR Description: expressed protein [Arabidopsis thaliana]
  misc_feature (264)..(364): NCBI GI NO: 15227811 NR Description: expressed protein [Arabidopsis thaliana]
  misc_feature (164)..(269): NCBI GI NO: 15227811 NR Description: expressed protein [Arabidopsis thaliana]
  misc_feature (8)..(171): NCBI GI NO: 7486028 NR Description: hypothetical protein F23E12
MESSSPSVPFPLLQAPVESTYRACTIPYRFPSDNPHKATPVEIQWIDLFLKSVPSFRQRAENDPTVPDAPAKAEKFAQRYTDMLEELKKNPESHGGPPDCILLCRLRELILRELGFHDIFKKVKDEENAKAMSLFEGVVQRNDEIEDGEKRAENLIRGILAGNIFDLGSAQLAEVFAKDGMSFLASCQNLLSRPWVIDDLDAFKSKWTKKSWEKAVIFVDNSGADIILGILPFARELLRRGTKVILAANDMPSINDITYLELVEIVNKLKDENGKLAGVDVSDLIVANSGNDLPVIDLSSVAPELAYMASDADLVILEGMGRGIETNLYAQMRCDSIKIGMVKHPEVAQFLGGRLYDCVFKFNEA

SEQ ID NO: 15300 - protein, 283 aa, Triticum aestivum
  peptide (1)..(283): Ceres Seq. ID no. 13503515
  misc_feature (1)..(280): Pfam Name: Pfam Description:  Protein of unknown function DUF89
  misc_feature (1)..(282): NCBI GI NO: 21554145 NR Description: unknown [Arabidopsis thaliana]
  misc_feature (1)..(282): NCBI GI NO: 18418688 NR Description: expressed protein [Arabidopsis thaliana]
  misc_feature (1)..(282): NCBI GI NO: 21554574 NR Description: unknown [Arabidopsis thaliana]
  misc_feature (1)..(282): NCBI GI NO: 18398388 NR Description: expressed protein [Arabidopsis thaliana]
  misc_feature (1)..(85): NCBI GI NO: 25370535 NR Description: hypothetical protein At2g17340
  misc_feature (161)..(282): NCBI GI NO: 25370535 NR Description: hypothetical protein At2g17340
  misc_feature (1)..(98): NCBI GI NO: 15227811 NR Description: expressed protein [Arabidopsis thaliana]
  misc_feature (182)..(282): NCBI GI NO: 15227811 NR Description: expressed protein [Arabidopsis thaliana]
  misc_feature (82)..(187): NCBI GI NO: 15227811 NR Description: expressed protein [Arabidopsis thaliana]
  misc_feature (1)..(89): NCBI GI NO: 7486028 NR Description: hypothetical protein F23E12
MLEELKKNPESHGGPPDCILLCRLRELILRELGFHDIFKKVKDEENAKAMSLFEGVVQRNDEIEDGEKRAENLIRGILAGNIFDLGSAQLAEVFAKDGMSFLASCQNLLSRPWVIDDLDAFKSKWTKKSWEKAVIFVDNSGADIILGILPFARELLRRGTKVILAANDMPSINDITYLELVEIVNKLKDENGKLAGVDVSDLIVANSGNDLPVIDLSSVAPELAYMASDADLVILEGMGRGIETNLYAQMRCDSIKIGMVKHPEVAQFLGGRLYDCVFKFNEA

SEQ ID NO: 15301 - DNA, 1914 bp, Triticum aestivum
  misc_feature (1)..(1914): Ceres Seq. ID no. 15225845
tcccctcttcctccctccctcctcgccaccgctccgctccactccacacccctgttcccagacgcaaccaccgccgccgacgaccgacgatgcttcgcgccgtcctcctccgctcagcctccggcctccgccggtcgccgatggccgccccgctatccaccgccgccgcctcgtggctcgccgaggggacctcgtcgccgcccagggtgcgcctactcatcggcggcgacttcgtcgagtcgaaggccaccgagcacgtcgacgtcaccaaccccgcgacgcaggaggtggtgtcccggatcccgctcaccaccgccgacgagttcagggccgcggtggacgctgccaggaccgccttccctggctggcggaacactccggtcacggcgcggcagcgcatcatgttcaaataccaggagctcatccgggccaacatggataagctggcagagaacattacaaccgagcagggaaagacactgaaagatgcttggggtgatgtattccgtggtctagaggtggtggagcatgcttgtggaatggggtcacttcaaatgggcgaatacgtatctaatgtttctcatgggattgacacctttagtattagggagccactcggcgtatgtgctgggatttgcccattcaatttccctgccatgattcccctatggatgttccccatagctgttacttgtgggaatacttttgttctaaagccatcagaaaaggatccaggggctgctatgatgcttgcggagctagcgatggaggctggtttaccaaagggtgtgttgaacattgttcatggtacccatgatgttgtcaacaatatttgtgatgacgaggctattaaggcagtatcatttgttggttccaatacagcaggtatgcatatatattctagagcatctgcgagtgggaagcgtgttcagtgtaacatgggtgcaaagaatcatgccattatccttcctgatgctgatcgagatgccacattgaatgcccttattgctgccggttttggtgcagctgggcaaaggtgcatggcattgagcactgctgtttttgttggaggttcagaaccatgggaggatgaactagtcaaacgtgcaagcaaccttgtagttaattccggaacagctaatgatgctgaccttggtccagtgatcagtacacaggccaaggaccgcatctgcaagttagtccaaagtggcgctgacagtggtgctcgacttgtgctggatggaagggagattgtggttcctcaatttgaggatggcaactttattggtccaactgtgttggctgatgttaaaagtgatatggagtgttaccaggaggaaatttttggtccagttcttctcttgatgaaggcagagagcctagatgatgccatacaaattgtaaacagaaacaagtatggcaatggggcttccatctttaccacatctggtgtctcagcaaggaaatttcagacggacattgaagctggccaggtgggtatcaacgtgccgatcccggtacccctgccgttcttctccttcacgggtagcaaagcttccttcgccggagacttgaatttctacggcaaggcgggcgtgcagttcttcacccagatcaagaccatcacgcagcagtggaaggagtcgtctccccagcgcgtttctctctccatgcccacctcgcagaagtgaagtcacccgagctgactcatgtatgtcgaaataaacccaggcattgatgtggaatttaagcttcacaggagttgcctttcattaagggtaactcttgtgatgtctttcattgtgctgccggtaataagaaaatcccagattagacgaccgaatcacacgcacagcagagcatgtatttgtacagggaccaaattaatgtgtacatgcaatggctcgatatcac

SEQ ID NO: 15302 - protein, 562 aa, Triticum aestivum
  peptide (1)..(562): Ceres Seq. ID no. 15225846
  misc_feature (30)..(562): NCBI GI NO: 34394614 NR Description: methylmalonate semi-aldehyde dehydrogenase
  misc_feature (30)..(562): NCBI GI NO: 7431455 NR Description: probable methylmalonate-semialdehyde dehydrogenase
  misc_feature (29)..(562): NCBI GI NO: 15225601 NR Description: methylmalonate-semialdehyde dehydrogenase
  misc_feature (182)..(562): NCBI GI NO: 30144414 NR Description: methylmalonate semialdehyde dehydrogenase
  misc_feature (33)..(559): NCBI GI NO: 11095441 NR Description: aldehyde dehydrogenase 6A1 precursor
  misc_feature (42)..(558): NCBI GI NO: 39597473 NR Description: Hypothetical protein CBG03134
  misc_feature (38)..(559): NCBI GI NO: 19527258 NR Description: aldehyde dehydrogenase family 6, subfamily A1
  misc_feature (38)..(559): NCBI GI NO: 13591997 NR Description: methylmalonate semialdehyde dehydrogenase gene
  misc_feature (38)..(559): NCBI GI NO: 34867320 NR Description: hypothetical protein XP_346778 [Rattus norvegicus]
  misc_feature (60)..(558): NCBI GI NO: 17533151 NR Description: ALDH6A3, ALdehyde deHydrogenase (56.5 kD) (alh-8)
PSSSLPPRHRSAPLHTPVPRRNHRRRRPTMLRAVLLRSASGLRRSPMAAPLSTAAASWLAEGTSSPPRVRLLIGGDFVESKATEHVDVTNPATQEVVSRIPLTTADEFRAAVDAARTAFPGWRNTPVTARQRIMFKYQELIRANMDKLAENITTEQGKTLKDAWGDVFRGLEVVEHACGMGSLQMGEYVSNVSHGIDTFSIREPLGVCAGICPFNFPAMIPLWMFPIAVTCGNTFVLKPSEKDPGAAMMLAELAMEAGLPKGVLNIVHGTHDVVNNICDDEAIKAVSFVGSNTAGMHIYSRASASGKRVQCNMGAKNHAIILPDADRDATLNALIAAGFGAAGQRCMALSTAVFVGGSEPWEDELVKRASNLVVNSGTANDADLGPVISTQAKDRICKLVQSGADSGARLVLDGREIVVPQFEDGNFIGPTVLADVKSDMECYQEEIFGPVLLLMKAESLDDAIQIVNRNKYGNGASIFTTSGVSARKFQTDIEAGQVGINVPIPVPLPFFSFTGSKASFAGDLNFYGKAGVQFFTQIKTITQQWKESSPQRVSLSMPTSQK

SEQ ID NO: 15303 - protein, 533 aa, Triticum aestivum
  peptide (1)..(533): Ceres Seq. ID no. 15225847
  misc_feature (1)..(533): NCBI GI NO: 34394614 NR Description: methylmalonate semi-aldehyde dehydrogenase
  misc_feature (1)..(533): NCBI GI NO: 7431455 NR Description: probable methylmalonate-semialdehyde dehydrogenase
  misc_feature (1)..(533): NCBI GI NO: 15225601 NR Description: methylmalonate-semialdehyde dehydrogenase
  misc_feature (153)..(533): NCBI GI NO: 30144414 NR Description: methylmalonate semialdehyde dehydrogenase
  misc_feature (4)..(530): NCBI GI NO: 11095441 NR Description: aldehyde dehydrogenase 6A1 precursor
  misc_feature (13)..(529): NCBI GI NO: 39597473 NR Description: Hypothetical protein CBG03134
  misc_feature (9)..(530): NCBI GI NO: 19527258 NR Description: aldehyde dehydrogenase family 6, subfamily A1
  misc_feature (9)..(530): NCBI GI NO: 13591997 NR Description: methylmalonate semialdehyde dehydrogenase gene
  misc_feature (9)..(530): NCBI GI NO: 34867320 NR Description: hypothetical protein XP_346778 [Rattus norvegicus]
  misc_feature (31)..(529): NCBI GI NO: 17533151 NR Description: ALDH6A3, ALdehyde deHydrogenase (56.5 kD) (alh-8)
MLRAVLLRSASGLRRSPMAAPLSTAAASWLAEGTSSPPRVRLLIGGDFVESKATEHVDVTNPATQEVVSRIPLTTADEFRAAVDAARTAFPGWRNTPVTARQRIMFKYQELIRANMDKLAENITTEQGKTLKDAWGDVFRGLEVVEHACGMGSLQMGEYVSNVSHGIDTFSIREPLGVCAGICPFNFPAMIPLWMFPIAVTCGNTFVLKPSEKDPGAAMMLAELAMEAGLPKGVLNIVHGTHDVVNNICDDEAIKAVSFVGSNTAGMHIYSRASASGKRVQCNMGAKNHAIILPDADRDATLNALIAAGFGAAGQRCMALSTAVFVGGSEPWEDELVKRASNLVVNSGTANDADLGPVISTQAKDRICKLVQSGADSGARLVLDGREIVVPQFEDGNFIGPTVLADVKSDMECYQEEIFGPVLLLMKAESLDDAIQIVNRNKYGNGASIFTTSGVSARKFQTDIEAGQVGINVPIPVPLPFFSFTGSKASFAGDLNFYGKAGVQFFTQIKTITQQWKESSPQRVSLSMPTSQK

SEQ ID NO: 15304 - protein, 516 aa, Triticum aestivum
  peptide (1)..(516): Ceres Seq. ID no. 15225848
  misc_feature (1)..(516): NCBI GI NO: 34394614 NR Description: methylmalonate semi-aldehyde dehydrogenase
  misc_feature (1)..(516): NCBI GI NO: 7431455 NR Description: probable methylmalonate-semialdehyde dehydrogenase
  misc_feature (1)..(516): NCBI GI NO: 15225601 NR Description: methylmalonate-semialdehyde dehydrogenase
  misc_feature (136)..(516): NCBI GI NO: 30144414 NR Description: methylmalonate semialdehyde dehydrogenase
  misc_feature (1)..(513): NCBI GI NO: 11095441 NR Description: aldehyde dehydrogenase 6A1 precursor
  misc_feature (1)..(512): NCBI GI NO: 39597473 NR Description: Hypothetical protein CBG03134
  misc_feature (1)..(513): NCBI GI NO: 19527258 NR Description: aldehyde dehydrogenase family 6, subfamily A1
  misc_feature (1)..(513): NCBI GI NO: 13591997 NR Description: methylmalonate semialdehyde dehydrogenase gene
  misc_feature (1)..(513): NCBI GI NO: 34867320 NR Description: hypothetical protein XP_346778 [Rattus norvegicus]
  misc_feature (14)..(512): NCBI GI NO: 17533151 NR Description: ALDH6A3, ALdehyde deHydrogenase (56.5 kD) (alh-8)
MAAPLSTAAASWLAEGTSSPPRVRLLIGGDFVESKATEHVDVTNPATQEVVSRIPLTTADEFRAAVDAARTAFPGWRNTPVTARQRIMFKYQELIRANMDKLAENITTEQGKTLKDAWGDVFRGLEVVEHACGMGSLQMGEYVSNVSHGIDTFSIREPLGVCAGICPFNFPAMIPLWMFPIAVTCGNTFVLKPSEKDPGAAMMLAELAMEAGLPKGVLNIVHGTHDVVNNICDDEAIKAVSFVGSNTAGMHIYSRASASGKRVQCNMGAKNHAIILPDADRDATLNALIAAGFGAAGQRCMALSTAVFVGGSEPWEDELVKRASNLVVNSGTANDADLGPVISTQAKDRICKLVQSGADSGARLVLDGREIVVPQFEDGNFIGPTVLADVKSDMECYQEEIFGPVLLLMKAESLDDAIQIVNRNKYGNGASIFTTSGVSARKFQTDIEAGQVGINVPIPVPLPFFSFTGSKASFAGDLNFYGKAGVQFFTQIKTITQQWKESSPQRVSLSMPTSQK

SEQ ID NO: 15305 - DNA, 1319 bp, Triticum aestivum
  misc_feature (1)..(1319): Ceres Seq. ID no. 13597701
ccaccactcctggcatagatctccacctcccggtgagtgaccatggcggaggccgcaggagcgactcctctcctcgctggcctcccggacgagatcaccgtctcggagatcctcgctcgcctgccccccaaacccctcctccgctgccgcgccgtcagccccgcgtggcgccgcgccacctccacccgcgatttcctcctgtcccaccacgcccgccagcccgccctgcccctcctctgcagccacagcgacgtagccgacggcggccagtccctggacgtcacgctcttcgaccaccgtgcaggagtcgccgccgccgaccagttccagcgcgtcgcgcgactgaaaacaccccccttggaaggggggattgacgggagtgaaagtttcactcccctcttctatccggtggcctcctgcgacggcctcctcctcctctccatcgagtgtgacctctgcatctgcaacccggcgactcggcagtatgctcccctcgagcagctcgatggcttcatgaccgtggggttgtaccctcaccctcttaccggcgagtaccggctgttgctgtaccatgaaacagatcaacgtgccatctatgttttctcaattggctccaaccagccgccgaggcgcatcgggcgccctgatccgttggctggtgacgggcttctgttccgtggtagcctgcattggcacactggcaaccggataatggtattcgacaccgccactgagtcgttccggcagatccgtgccccggttgcccatgaggactatggacgactgtttgagatggatgacatgcttggcatcttctttcttaatgatgaaaagacgaccgttgatatttgggtgatgcaggactaccaaggcgaggtctgggctttcaagtgtcgggttgaattgccggttgccgagatcagggaccggtgtcaaaattctagccatattgaggaagtgatggttgttaatggtgatggtgagttgctcgtgttggtcggttttgaggactggctgtttcaggttgatattgatggcaagttgattgccagtttccatgccagaggcctcccttcctataatattgtgcacaagcaaactcttgttcaacataccttctttccgacactcgagggttatgttatgaatgattcgcctttcatttgaccagatgattatgttgtcaacgcttaggaatattgagtgttgtggtgtttcttattggcctagctctgcatgtccacatgagctgttgtatgtatcaactagatccattattaagcttctttgttcttggttgatgaatataaaaaagtatg

SEQ ID NO: 15306 - protein, 374 aa, Triticum aestivum
  peptide (1)..(374): Ceres Seq. ID no. 13597702
  misc_feature (13)..(56): Pfam Name: Pfam Description:  F-box domain
  misc_feature (1)..(374): NCBI GI NO: 38346536 NR Description: OSJNBa0040D17.11
  misc_feature (1)..(240): NCBI GI NO: 38346045 NR Description: OSJNBa0059D20.17
  misc_feature (213)..(374): NCBI GI NO: 38346045 NR Description: OSJNBa0059D20.17
  misc_feature (1)..(374): NCBI GI NO: 38346527 NR Description: OSJNBa0040D17.2
  misc_feature (171)..(360): NCBI GI NO: 37533944 NR Description: hypothetical protein
  misc_feature (115)..(194): NCBI GI NO: 37533944 NR Description: hypothetical protein
  misc_feature (1)..(80): NCBI GI NO: 37533944 NR Description: hypothetical protein
  misc_feature (1)..(360): NCBI GI NO: 38344215 NR Description: OSJNBb0026E15.3
  misc_feature (198)..(360): NCBI GI NO: 37530720 NR Description: unknown protein
  misc_feature (121)..(198): NCBI GI NO: 37530720 NR Description: unknown protein
MAEAAGATPLLAGLPDEITVSEILARLPPKPLLRCRAVSPAWRRATSTRDFLLSHHARQPALPLLCSHSDVADGGQSLDVTLFDHRAGVAAADQFQRVARLKTPPLEGGIDGSESFTPLFYPVASCDGLLLLSIECDLCICNPATRQYAPLEQLDGFMTVGLYPHPLTGEYRLLLYHETDQRAIYVFSIGSNQPPRRIGRPDPLAGDGLLFRGSLHWHTGNRIMVFDTATESFRQIRAPVAHEDYGRLFEMDDMLGIFFLNDEKTTVDIWVMQDYQGEVWAFKCRVELPVAEIRDRCQNSSHIEEVMVVNGDGELLVLVGFEDWLFQVDIDGKLIASFHARGLPSYNIVHKQTLVQHTFFPTLEGYVMNDSPFI

SEQ ID NO: 15307 - protein, 217 aa, Triticum aestivum
  peptide (1)..(217): Ceres Seq. ID no. 13597703
  misc_feature (1)..(217): NCBI GI NO: 38346536 NR Description: OSJNBa0040D17.11
  misc_feature (1)..(83): NCBI GI NO: 38346045 NR Description: OSJNBa0059D20.17
  misc_feature (56)..(217): NCBI GI NO: 38346045 NR Description: OSJNBa0059D20.17
  misc_feature (1)..(217): NCBI GI NO: 38346527 NR Description: OSJNBa0040D17.2
  misc_feature (14)..(203): NCBI GI NO: 37533944 NR Description: hypothetical protein
  misc_feature (1)..(37): NCBI GI NO: 37533944 NR Description: hypothetical protein
  misc_feature (1)..(203): NCBI GI NO: 38344215 NR Description: OSJNBb0026E15.3
  misc_feature (41)..(203): NCBI GI NO: 37530720 NR Description: unknown protein
  misc_feature (1)..(41): NCBI GI NO: 37530720 NR Description: unknown protein
  misc_feature (5)..(217): NCBI GI NO: 38346044 NR Description: OSJNBa0059D20.16
MTVGLYPHPLTGEYRLLLYHETDQRAIYVFSIGSNQPPRRIGRPDPLAGDGLLFRGSLHWHTGNRIMVFDTATESFRQIRAPVAHEDYGRLFEMDDMLGIFFLNDEKTTVDIWVMQDYQGEVWAFKCRVELPVAEIRDRCQNSSHIEEVMVVNGDGELLVLVGFEDWLFQVDIDGKLIASFHARGLPSYNIVHKQTLVQHTFFPTLEGYVMNDSPFI

SEQ ID NO: 15308 - DNA, 1415 bp, Triticum aestivum
  misc_feature (1)..(1415): Ceres Seq. ID no. 13597476
agaacatcctaatcgaaaaatatggcggcgccagagtacaagcacgagacagaaaccccagcaccctccggcgagcagccgccagagccagtagccgccgccgccgccgccgccggccgggagctgcagccatgggagcagcacgctgcggtgatcaatctcccgcgctacgactaccgcgcgtcgggctccctgctcctgcgctcgcactccggcttcctcatcacctgccccatcaaacgagagaaaagtgcaacgaaggaagccatttcaattcttggagagtatattagcgacgcaagcagccacagttctgaaaacttggaaccatgtgttacggaagtggcatcaaagaaaaggaaaatattttctgaggcatccgaaattgaacattcagaagatacaaatgggaagggtgatgcaccagaatctactggcagcattgaagtagaaacaaattcacttcactccgatacaagtggaaattctgacaggacttcaaatctctcattgattaagctatcaatgagtggtttgcttttcttctctttccctactggaggcgttcatgttgttcagatgcttaccgaagtctttcgttcactgaaatctgggaagcttaaatctccacagtggtgtcatcgcatattccctattcaggaaacttgtgttctatcagaaacagaactgcatgccactgtgtcaaagttgttcctggacttcatcaggaataaggaagatcaagatgagcctatcaagttcgcagttgggtacagtaggagaggcattgatgaaacggtgaagacgcagaagaatgacaataacagctcaattcaacaaggtttaatggacaggcaacaatgtttcaaggttgttgctgctgctgtcaagtcagttgctaaggacgcaattgtggatctcaagtctcctgaggtggcagtactagtggaggtgctccccatttctggggtgccagttggatcttcggtggccggggtgtctgttctcccagctgaactcgtctcggctaagcctcgtctttgtgtcaaggctttggtgtctgatacaaaaacaaaaaagaagtgatgcgccagttcggctgcaaccagtcagagcacctgtaacggcaacatatggaggaaacgatcttgttgggcatgctcgtcagccatgccgcagcttgagcattccacaaacaaagaaacggtatcgcagctgtcttgcctggctctgagtatgccaatttgtaagctgcagtgctcgtcccgttctttgaggttagcttcttatcgtttttctagcgtgctccagcgtcaaagcttaactgacctgttgctggatgtgattgtgttatactgtttctctagactttatgtagtattattattatgggcaattcagtgaactactaaagt

SEQ ID NO: 15309 - protein, 354 aa, Triticum aestivum
  peptide (1)..(354): Ceres Seq. ID no. 15222108
  misc_feature (35)..(353): NCBI GI NO: 14334964 NR Description: unknown protein [Arabidopsis thaliana]
  misc_feature (35)..(353): NCBI GI NO: 24030215 NR Description: unknown protein [Arabidopsis thaliana]
  misc_feature (35)..(256): NCBI GI NO: 15220918 NR Description: hypothetical protein [Arabidopsis thaliana]
  misc_feature (35)..(256): NCBI GI NO: 25372975 NR Description: hypothetical protein
MAAPEYKHETETPAPSGEQPPEPVAAAAAAAGRELQPWEQHAAVINLPRYDYRASGSLLLRSHSGFLITCPIKREKSATKEAISILGEYISDASSHSSENLEPCVTEVASKKRKIFSEASEIEHSEDTNGKGDAPESTGSIEVETNSLHSDTSGNSDRTSNLSLIKLSMSGLLFFSFPTGGVHVVQMLTEVFRSLKSGKLKSPQWCHRIFPIQETCVLSETELHATVSKLFLDFIRNKEDQDEPIKFAVGYSRRGIDETVKTQKNDNNSSIQQGLMDRQQCFKVVAAAVKSVAKDAIVDLKSPEVAVLVEVLPISGVPVGSSVAGVSVLPAELVSAKPRLCVKALVSDTKTKKK

SEQ ID NO: 15310 - protein, 186 aa, Triticum aestivum
  peptide (1)..(186): Ceres Seq. ID no. 15222109
  misc_feature (1)..(185): NCBI GI NO: 14334964 NR Description: unknown protein [Arabidopsis thaliana]
  misc_feature (1)..(185): NCBI GI NO: 24030215 NR Description: unknown protein [Arabidopsis thaliana]
  misc_feature (1)..(88): NCBI GI NO: 15220918 NR Description: hypothetical protein [Arabidopsis thaliana]
  misc_feature (1)..(88): NCBI GI NO: 25372975 NR Description: hypothetical protein
MSGLLFFSFPTGGVHVVQMLTEVFRSLKSGKLKSPQWCHRIFPIQETCVLSETELHATVSKLFLDFIRNKEDQDEPIKFAVGYSRRGIDETVKTQKNDNNSSIQQGLMDRQQCFKVVAAAVKSVAKDAIVDLKSPEVAVLVEVLPISGVPVGSSVAGVSVLPAELVSAKPRLCVKALVSDTKTKKK

SEQ ID NO: 15311 - DNA, 1342 bp, Triticum aestivum
  misc_feature (1)..(1342): Ceres Seq. ID no. 12599421
acacacaccttcttctcccccaaaaacgcacactgcaccaccgcacacagatctaaccgaaacccacccccaccggcggcgagccgccgacgagccagccatccaagatgcagtacaacaacctgggacggtcgggcctccgcgtcagccagctctcctacggcgcgtgggtgaccttcggcaaccagctcgacgtcaaggaggcgaaatccctcctccaggcctgccgggacgcgggggtcaacttcttcgacaacgcggaggtgtacgccaacgggcgcgccgaggagatcatggggcaggcgatccgggacctggggtggcgccgcgccgacgtggtcatctccaccaagctcttctggggcggccaggggcccaacgacaagggcctctcccgcaagcacgtcgtcgagggcctgaaagcctcgctcaagcggctcgacatggagtacgtcgacgtggtctactgccaccggcccgacgccaccacgcccatcgaggagacggtgcgggccatgaactgggtgatcgaccaggggtgggccttctactggggcacgtcggagtggaccgcgcagcagatcaccgaggcctggggcgtggcgaaccggcttgacctcgtcgggcccatcgtcgagcagcccgagtacaacctcttctcccgccacaaggttgagtctgagtttgtacctctttacaacacttatggcattgggttgactacatggagtcctctcgcttcaggggttctcactgggaagtatagcaaagggaatatacccgctgaaagccggtttgccctagataactacaagaacctggcaaacaggtctctggttgacgacacgcttagaaaagtgaacgggctcaagccaatcgctttggagcttggcgtctcgatggcgcagctgggtatcgcctggtgcgcgtcgaaccccaacgtgtcgtctgtgatcactggagccaccaaagagagccagatcgtcgagaacatgaaggccctggaggtcgtcccgctgctgaccccagaggtcctggagaagatcgaggcggtcgtccagagcaagccgaagcgcctcgagtcgtacagatgaagcggtcggtcggtcggcttcgtcagctgtgcagcgtgtgcccgcccgccccggtgggattttttcagtacccggttctccgaaaaaccatataccgaacgtcctgtgtggtcggcgtgcccagcgtgcgaaacattttgtcgagtggacctgatgatgacggtggtcgtcacagacaatgcttttatgccgcttgtatgtttgctgctgtcgctgtatgtatgggtctgttgcaaaatctgagcggg

SEQ ID NO: 15312 - protein, 328 aa, Triticum aestivum
  peptide (1)..(328): Ceres Seq. ID no. 12599422
  misc_feature (1)..(328): NCBI GI NO: 2832783 NR Description: potassium channel beta subunit [Egeria densa]
  misc_feature (1)..(328): NCBI GI NO: 15219795 NR Description: putative K+ channel, beta subunit
  misc_feature (1)..(328): NCBI GI NO: 7447934 NR Description: probable potassium channel beta chain KB1 - potato
  misc_feature (1)..(328): NCBI GI NO: 1063415 NR Description: K+ channel protein
  misc_feature (1)..(328): NCBI GI NO: 7447935 NR Description: probable potassium channel beta chain - rice
  misc_feature (1)..(322): NCBI GI NO: 23394348 NR Description: K+ channel protein [Phytophthora infestans]
  misc_feature (1)..(317): NCBI GI NO: 22987410 NR Description: hypothetical protein [Burkholderia fungorum]
  misc_feature (1)..(328): NCBI GI NO: 5019764 NR Description: potassium channel subunit Kv beta 1.1
  misc_feature (1)..(328): NCBI GI NO: 8393643 NR Description: potassium voltage gated channel
  misc_feature (1)..(328): NCBI GI NO: 1695763 NR Description: voltage gated potassium channels, beta subunit
MQYNNLGRSGLRVSQLSYGAWVTFGNQLDVKEAKSLLQACRDAGVNFFDNAEVYANGRAEEIMGQAIRDLGWRRADVVISTKLFWGGQGPNDKGLSRKHVVEGLKASLKRLDMEYVDVVYCHRPDATTPIEETVRAMNWVIDQGWAFYWGTSEWTAQQITEAWGVANRLDLVGPIVEQPEYNLFSRHKVESEFVPLYNTYGIGLTTWSPLASGVLTGKYSKGNIPAESRFALDNYKNLANRSLVDDTLRKVNGLKPIALELGVSMAQLGIAWCASNPNVSSVITGATKESQIVENMKALEVVPLLTPEVLEKIEAVVQSKPKRLESYR

SEQ ID NO: 15313 - protein, 266 aa, Triticum aestivum
  peptide (1)..(266): Ceres Seq. ID no. 12599423
  misc_feature (1)..(266): NCBI GI NO: 2832783 NR Description: potassium channel beta subunit [Egeria densa]
  misc_feature (1)..(266): NCBI GI NO: 15219795 NR Description: putative K+ channel, beta subunit
  misc_feature (1)..(266): NCBI GI NO: 7447934 NR Description: probable potassium channel beta chain KB1 - potato
  misc_feature (1)..(266): NCBI GI NO: 1063415 NR Description: K+ channel protein
  misc_feature (1)..(266): NCBI GI NO: 7447935 NR Description: probable potassium channel beta chain - rice
  misc_feature (1)..(260): NCBI GI NO: 23394348 NR Description: K+ channel protein [Phytophthora infestans]
  misc_feature (1)..(255): NCBI GI NO: 22987410 NR Description: hypothetical protein [Burkholderia fungorum]
  misc_feature (1)..(266): NCBI GI NO: 5019764 NR Description: potassium channel subunit Kv beta 1.1
  misc_feature (1)..(266): NCBI GI NO: 8393643 NR Description: potassium voltage gated channel
  misc_feature (1)..(266): NCBI GI NO: 1695763 NR Description: voltage gated potassium channels, beta subunit
MGQAIRDLGWRRADVVISTKLFWGGQGPNDKGLSRKHVVEGLKASLKRLDMEYVDVVYCHRPDATTPIEETVRAMNWVIDQGWAFYWGTSEWTAQQITEAWGVANRLDLVGPIVEQPEYNLFSRHKVESEFVPLYNTYGIGLTTWSPLASGVLTGKYSKGNIPAESRFALDNYKNLANRSLVDDTLRKVNGLKPIALELGVSMAQLGIAWCASNPNVSSVITGATKESQIVENMKALEVVPLLTPEVLEKIEAVVQSKPKRLESYR

SEQ ID NO: 15314 - protein, 216 aa, Triticum aestivum
  peptide (1)..(216): Ceres Seq. ID no. 12599424
  misc_feature (1)..(216): NCBI GI NO: 2832783 NR Description: potassium channel beta subunit [Egeria densa]
  misc_feature (1)..(216): NCBI GI NO: 15219795 NR Description: putative K+ channel, beta subunit
  misc_feature (1)..(216): NCBI GI NO: 7447934 NR Description: probable potassium channel beta chain KB1 - potato
  misc_feature (1)..(216): NCBI GI NO: 1063415 NR Description: K+ channel protein
  misc_feature (1)..(216): NCBI GI NO: 7447935 NR Description: probable potassium channel beta chain - rice
  misc_feature (1)..(210): NCBI GI NO: 23394348 NR Description: K+ channel protein [Phytophthora infestans]
  misc_feature (1)..(205): NCBI GI NO: 22987410 NR Description: hypothetical protein [Burkholderia fungorum]
  misc_feature (1)..(216): NCBI GI NO: 5019764 NR Description: potassium channel subunit Kv beta 1.1
  misc_feature (1)..(216): NCBI GI NO: 8393643 NR Description: potassium voltage gated channel
  misc_feature (1)..(216): NCBI GI NO: 1695763 NR Description: voltage gated potassium channels, beta subunit
MEYVDVVYCHRPDATTPIEETVRAMNWVIDQGWAFYWGTSEWTAQQITEAWGVANRLDLVGPIVEQPEYNLFSRHKVESEFVPLYNTYGIGLTTWSPLASGVLTGKYSKGNIPAESRFALDNYKNLANRSLVDDTLRKVNGLKPIALELGVSMAQLGIAWCASNPNVSSVITGATKESQIVENMKALEVVPLLTPEVLEKIEAVVQSKPKRLESYR

SEQ ID NO: 15315 - DNA, 1698 bp, Triticum aestivum
  misc_feature (1)..(1698): Ceres Seq. ID no. 12625831
acgactgggtcgagctcggtcaagtctcgtctctccctcctgttcctactggactagatcagccgatggcgacggcgcgggccgagagcgggccggcgagatagcgcacgcttccgcactctcctcccctccccgcccctcgccgcagtccatggacgctctcgcccccacccccacccgccgccgccgcctcctcgccggcgcggccgccgccaccgcctgctacggcctctaccgcctctacctccaccaccgccgccgcatcgccgcggcgctctccctcgccgacgcgctctcgcaggccggctccgacctcgccgacttcctccgctccgactccgaccaggtgccccgcagcctgcgccagctctccaagctcgccgcctccgaccacgtctcctccgccgcctccgccctctccgagtcgctcgcctcgggggccctccgcgccttctcctcccaccgggccgcccggggcccggatccttcctccccgccgctgcaagaccggatcttggaccgcctcctctcccccgccggcgccgggttcgcctccgccgtcctcgggagcttcgccaggaacctcgtgctctcctgccgtgatcccgcggcccggccccgcgcccctggccagccggactggctcgccgcgctgtgcagcgacaggggcaaggaggccgccgcggagctcgtccgggtgttcgtcagcaccgccgtcgccgcctacctcgacaggaccgcggccgtgcgcacctccgaccaggtgctcgccggcgtcagtaaccccaagcacgacgccaagctcaaggacctgctcgtgtccgtctgcaacggggccgtcgagacctttgtcaggacctcgcggcaggtcacaaaggaggcctccatttctcgagctgaagcagcagtggcggtgcgagacgtctgcaattcaggtcctagctgtgtaatggagagagtatcgaccacgttggccatgccaagcaaccggaggtttgtgctggatgtcacgggcagggtcaccgccgagatggtccggtcattcctcgagttctccactcagcgggtgtccgctggtgcacgaaagagcattgtcgttgcccgggatgagatcgccgaaaggggtctcgtcgcggtcaagtacctgagcgccaagtctatggccatcttcaccttatgcctcacaatgtgcatgcacatttcggttggaattaggttcccgttgccggcctaggcatagcctggtgtgggcttcaaggtgacattgttccagttatcctgattgtagttggaaagtaaagtatgtagattgcaaattgattgtttgctactgctagcctttttctgtgttgttgactagcatttggaagcagaaatctgttggatttgtagttgttggtttgttgtttgtgatagtctgatagggagtatataggtcacgaatggataattttgcaattttagtgtaaggtttcatatgtattatggtgttgtatcctagtgtcttctccatcttttctgaaggaagtaggggtcagtatcttattgatgctgactagtgatgttcctcagcactctgtgtgtggataagctatttcgggcaacaatagcatgaaacttgtccacttatgttttccattccctttttgccatgatttgtggaaaagcaaatatgaattgatcagagatttgtgcctg

SEQ ID NO: 15316 - protein, 410 aa, Triticum aestivum
  peptide (1)..(410): Ceres Seq. ID no. 12625832
  misc_feature (51)..(409): NCBI GI NO: 37530342 NR Description: hypothetical protein
  misc_feature (60)..(410): NCBI GI NO: 40539064 NR Description: expressed protein
  misc_feature (51)..(403): NCBI GI NO: 22093613 NR Description: hypothetical protein~similar to Arabidopsisthaliana chromosome 1
  misc_feature (57)..(400): NCBI GI NO: 14475940 NR Description: unknown protein [Arabidopsis thaliana]
  misc_feature (57)..(400): NCBI GI NO: 18406365 NR Description: expressed protein; protein id: At1g59510
  misc_feature (57)..(400): NCBI GI NO: 21553547 NR Description: unknown [Arabidopsis thaliana]
  misc_feature (88)..(400): NCBI GI NO: 15229610 NR Description: putative protein; protein id: At3g49790.1
  misc_feature (60)..(365): NCBI GI NO: 18391117 NR Description: expressed protein; protein id: At1g10150
  misc_feature (60)..(365): NCBI GI NO: 21554418 NR Description: unknown [Arabidopsis thaliana]
  misc_feature (212)..(403): NCBI GI NO: 21554418 NR Description: unknown [Arabidopsis thaliana]
RLGRARSSLVSPSCSYWTRSADGDGAGRERAGEIAHASALSSPPRPSPQSMDALAPTPTRRRRLLAGAAAATACYGLYRLYLHHRRRIAAALSLADALSQAGSDLADFLRSDSDQVPRSLRQLSKLAASDHVSSAASALSESLASGALRAFSSHRAARGPDPSSPPLQDRILDRLLSPAGAGFASAVLGSFARNLVLSCRDPAARPRAPGQPDWLAALCSDRGKEAAAELVRVFVSTAVAAYLDRTAAVRTSDQVLAGVSNPKHDAKLKDLLVSVCNGAVETFVRTSRQVTKEASISRAEAAVAVRDVCNSGPSCVMERVSTTLAMPSNRRFVLDVTGRVTAEMVRSFLEFSTQRVSAGARKSIVVARDEIAERGLVAVKYLSAKSMAIFTLCLTMCMHISVGIRFPLPA

SEQ ID NO: 15317 - protein, 360 aa, Triticum aestivum
  peptide (1)..(360): Ceres Seq. ID no. 12625833
  misc_feature (1)..(359): NCBI GI NO: 37530342 NR Description: hypothetical protein
  misc_feature (10)..(360): NCBI GI NO: 40539064 NR Description: expressed protein
  misc_feature (1)..(353): NCBI GI NO: 22093613 NR Description: hypothetical protein~similar to Arabidopsisthaliana chromosome 1
  misc_feature (7)..(350): NCBI GI NO: 14475940 NR Description: unknown protein [Arabidopsis thaliana]
  misc_feature (7)..(350): NCBI GI NO: 18406365 NR Description: expressed protein; protein id: At1g59510
  misc_feature (7)..(350): NCBI GI NO: 21553547 NR Description: unknown [Arabidopsis thaliana]
  misc_feature (38)..(350): NCBI GI NO: 15229610 NR Description: putative protein; protein id: At3g49790.1
  misc_feature (10)..(315): NCBI GI NO: 18391117 NR Description: expressed protein; protein id: At1g10150
  misc_feature (10)..(315): NCBI GI NO: 21554418 NR Description: unknown [Arabidopsis thaliana]
  misc_feature (162)..(353): NCBI GI NO: 21554418 NR Description: unknown [Arabidopsis thaliana]
MDALAPTPTRRRRLLAGAAAATACYGLYRLYLHHRRRIAAALSLADALSQAGSDLADFLRSDSDQVPRSLRQLSKLAASDHVSSAASALSESLASGALRAFSSHRAARGPDPSSPPLQDRILDRLLSPAGAGFASAVLGSFARNLVLSCRDPAARPRAPGQPDWLAALCSDRGKEAAAELVRVFVSTAVAAYLDRTAAVRTSDQVLAGVSNPKHDAKLKDLLVSVCNGAVETFVRTSRQVTKEASISRAEAAVAVRDVCNSGPSCVMERVSTTLAMPSNRRFVLDVTGRVTAEMVRSFLEFSTQRVSAGARKSIVVARDEIAERGLVAVKYLSAKSMAIFTLCLTMCMHISVGIRFPLPA

SEQ ID NO: 15318 - DNA, 716 bp, Triticum aestivum
  misc_feature (1)..(716): Ceres Seq. ID no. 13597600
agccacaacgggacagatcccccgcataaattcctccacccgtcgcgccgcccccattcgcccacgcccacgcgcgcgcacgcggcctccccctcctcctcccccattcgctccctccctccgccggccggggattcgggtttggggggagatggggtacgtcgggagccacggcgtggcgacgctgcgcaagtacaagtacagcggcgtcgaccactccattgtcgccaagtacatcctccagcccttctggtcgcgattcgtcaacgtcttcccgctctggttcccaccaaacatgatcacgctgacaggtttcatgtttctgctgacatcggcattccttggctttttgtattcacctcatcttgatacagcgccccctagatgggttcatctcgcgcatggaatccttctcttcctttaccagacttttgatgctgtggatggtaaacaagcaagacgtaccaactcatcaagtcctttaggcgaactttttgatcacggatgcgacgcgcttgcatgtacttttgagtccctggcttttgggagcacagctatgtgtggaaatgctaccttttggttttgggtcatttcggctgtccccttctactttgcaacctgggaacactattttacaaacacacttgttcttcctatagtcaatgggccaactgaaggccttatgctgatttatgtgtgccatatcttcacctttt

SEQ ID NO: 15319 - protein, 238 aa, Triticum aestivum
  peptide (1)..(238): Ceres Seq. ID no. 13597601
  misc_feature (136)..(237): Pfam Name: Pfam Description:  CDP-alcohol phosphatidyltransferase
  misc_feature (51)..(237): NCBI GI NO: 7488701 NR Description: probable ethanolaminephosphotransferase (EC2
  misc_feature (51)..(237): NCBI GI NO: 3927806 NR Description: aminoalcoholphosphotransferase
  misc_feature (51)..(237): NCBI GI NO: 7488522 NR Description: ethanolaminephosphotransferase homolog - turnip
  misc_feature (51)..(237): NCBI GI NO: 15222885 NR Description: aminoalcoholphosphotransferase
  misc_feature (51)..(237): NCBI GI NO: 30313359 NR Description: aminoalcoholphosphotransferase
  misc_feature (51)..(237): NCBI GI NO: 15229490 NR Description: aminoalcoholphosphotransferase, putative
  misc_feature (51)..(237): NCBI GI NO: 18390098 NR Description: aminoalcoholphosphotransferase [Sorghum bicolor]
  misc_feature (51)..(237): NCBI GI NO: 5917787 NR Description: aminoalcoholphosphotransferase [Brassica rapa]
  misc_feature (51)..(225): NCBI GI NO: 27762264 NR Description: aminoalcoholphosphotransferase [Brassica napus]
  misc_feature (64)..(237): NCBI GI NO: 2425056 NR Description: LipB [Dictyostelium discoideum]
ATTGQIPRINSSTRRAAPIRPRPRARTRPPPPPPPFAPSLRRPGIRVWGEMGYVGSHGVATLRKYKYSGVDHSIVAKYILQPFWSRFVNVFPLWFPPNMITLTGFMFLLTSAFLGFLYSPHLDTAPPRWVHLAHGILLFLYQTFDAVDGKQARRTNSSSPLGELFDHGCDALACTFESLAFGSTAMCGNATFWFWVISAVPFYFATWEHYFTNTLVLPIVNGPTEGLMLIYVCHIFTF

SEQ ID NO: 15320 - protein, 188 aa, Triticum aestivum
  peptide (1)..(188): Ceres Seq. ID no. 13597602
  misc_feature (86)..(187): Pfam Name: Pfam Description:  CDP-alcohol phosphatidyltransferase
  misc_feature (1)..(187): NCBI GI NO: 7488701 NR Description: probable ethanolaminephosphotransferase (EC2
  misc_feature (1)..(187): NCBI GI NO: 3927806 NR Description: aminoalcoholphosphotransferase
  misc_feature (1)..(187): NCBI GI NO: 7488522 NR Description: ethanolaminephosphotransferase homolog - turnip
  misc_feature (1)..(187): NCBI GI NO: 15222885 NR Description: aminoalcoholphosphotransferase
  misc_feature (1)..(187): NCBI GI NO: 30313359 NR Description: aminoalcoholphosphotransferase
  misc_feature (1)..(187): NCBI GI NO: 15229490 NR Description: aminoalcoholphosphotransferase, putative
  misc_feature (1)..(187): NCBI GI NO: 18390098 NR Description: aminoalcoholphosphotransferase [Sorghum bicolor]
  misc_feature (1)..(187): NCBI GI NO: 5917787 NR Description: aminoalcoholphosphotransferase [Brassica rapa]
  misc_feature (1)..(175): NCBI GI NO: 27762264 NR Description: aminoalcoholphosphotransferase [Brassica napus]
  misc_feature (14)..(187): NCBI GI NO: 2425056 NR Description: LipB [Dictyostelium discoideum]
MGYVGSHGVATLRKYKYSGVDHSIVAKYILQPFWSRFVNVFPLWFPPNMITLTGFMFLLTSAFLGFLYSPHLDTAPPRWVHLAHGILLFLYQTFDAVDGKQARRTNSSSPLGELFDHGCDALACTFESLAFGSTAMCGNATFWFWVISAVPFYFATWEHYFTNTLVLPIVNGPTEGLMLIYVCHIFTF

SEQ ID NO: 15321 - protein, 140 aa, Triticum aestivum
  peptide (1)..(140): Ceres Seq. ID no. 13597603
  misc_feature (38)..(139): Pfam Name: Pfam Description:  CDP-alcohol phosphatidyltransferase
  misc_feature (1)..(139): NCBI GI NO: 7488701 NR Description: probable ethanolaminephosphotransferase (EC2
  misc_feature (1)..(139): NCBI GI NO: 3927806 NR Description: aminoalcoholphosphotransferase
  misc_feature (1)..(139): NCBI GI NO: 7488522 NR Description: ethanolaminephosphotransferase homolog - turnip
  misc_feature (1)..(139): NCBI GI NO: 15222885 NR Description: aminoalcoholphosphotransferase
  misc_feature (1)..(139): NCBI GI NO: 30313359 NR Description: aminoalcoholphosphotransferase
  misc_feature (1)..(139): NCBI GI NO: 15229490 NR Description: aminoalcoholphosphotransferase, putative
  misc_feature (1)..(139): NCBI GI NO: 18390098 NR Description: aminoalcoholphosphotransferase [Sorghum bicolor]
  misc_feature (1)..(139): NCBI GI NO: 5917787 NR Description: aminoalcoholphosphotransferase [Brassica rapa]
  misc_feature (1)..(127): NCBI GI NO: 27762264 NR Description: aminoalcoholphosphotransferase [Brassica napus]
  misc_feature (1)..(139): NCBI GI NO: 2425056 NR Description: LipB [Dictyostelium discoideum]
MITLTGFMFLLTSAFLGFLYSPHLDTAPPRWVHLAHGILLFLYQTFDAVDGKQARRTNSSSPLGELFDHGCDALACTFESLAFGSTAMCGNATFWFWVISAVPFYFATWEHYFTNTLVLPIVNGPTEGLMLIYVCHIFTF

SEQ ID NO: 15322 - DNA, 1548 bp, Triticum aestivum
  misc_feature (1)..(1548): Ceres Seq. ID no. 12460981
aacatcctaatcgaaaagtcgtcgcgttccatttcaaaaacgccacctttcgccccctgcatttccaccaaggcctacatgtctccgaccaccgccgcgtcccccgcgccggcgccggcaaccgacgcgcccccgaagccttcgccaggcgcgaagcgcagcctgatgggatccctcatcgacgccaccgcgctgctccgggcggcctccttcaaggaggactcgtacgtggccgcggcgctcccggcctcggacctccgcgcgctcgccgacctcagggcgctcctcgccacccacccggaccaaatctccatctggggcgtgccgctcaacccgcccagcgacgcccccgccgacgagcgcacggacgtggtgctcctcaagttcctccgcgccagggacttccgcgtccgcgacgcgcacgccatgctgctccgctgcgccgcctggcgggccgagttccgcgccgacgccgtgctggacgaggacctcgggttcaaggacctggagggcatcgtcgcctacatgcacggctgggaccgcgatggccacccggtctgctacaacgcctacggcgtgttcaaggaccgggacatgtacgaccgggtgttcggcgacggtgaccgcctcagccggttcctccggtggcgcgtccagatcatggagcgcggcgtgcgcgcgctccagctccgccccggcggcgtcaacgccatcatacaggtgaccgacctcaaggacatgccgaagcgagagctccgcgccgcgtccaaccagatactctccctcttccaggacaactaccccgagatggtcgcccgcaaggtgttcgtgaacgtaccgtggtacttctccgtgctgttctcgatgatctcgcccttcctcacggagcgcaccaagagcaagttcgtcatcgcgcgcgagggcaacgtcgcggagacgctcttcaagttcatccggccggagctggtgccggtgcagtacggcgggctgagccgcgccagcgagctggagaacgggccgcccaagccggcgtccgagttcaccatcaagggcggcgagaaggtcttcctagagatcgacggcatcgaggccggtgcaacaataacgtgggacctggtcgtcggcggctgggagctcgagtacggcgcggagtacgtgccggcgtcggagggcggctacacgctgtgcgtggagaggaccaagaaggtcccggccgccgccgacgagcccgtgcacaacgccttcacggccaaggagcccggcaagatggtgctctccatcgacaactccggctcacggaagcggaaggtcgccgcctaccgctacttcgtgcgcaagccgtcggcgtaggctgctcggctgctgtggccggcggcttgccggccggcttgtgctttgctttgctcgtctcggagaggaggttaatttaggtctatttaattagtgctataatgtgatatgcatgtattatgccatatgtagaatatattgtatgagccgtgagatcctacttgtcatcatcgttatataacgagttaagttttttcg

SEQ ID NO: 15323 - protein, 449 aa, Triticum aestivum
  peptide (1)..(449): Ceres Seq. ID no. 12460982
  misc_feature (175)..(335): Pfam Name: Pfam Description:  CRAL/TRIO domain
  misc_feature (52)..(446): NCBI GI NO: 15230555 NR Description: putative protein; protein id: At3g51670
  misc_feature (29)..(448): NCBI GI NO: 34907288 NR Description: contains ESTsAU093915
  misc_feature (73)..(441): NCBI GI NO: 8894548 NR Description: hypothetical protein [Cicer arietinum]
  misc_feature (70)..(449): NCBI GI NO: 30680992 NR Description: expressed protein [Arabidopsis thaliana]
  misc_feature (70)..(447): NCBI GI NO: 15081614 NR Description: At1g72160/T9N14_8 [Arabidopsis thaliana]
  misc_feature (70)..(447): NCBI GI NO: 15218383 NR Description: cytosolic factor, putative; protein id:At1g72160
  misc_feature (70)..(359): NCBI GI NO: 25407487 NR Description: hypothetical protein AT4g09160
  misc_feature (367)..(449): NCBI GI NO: 25407487 NR Description: hypothetical protein AT4g09160
  misc_feature (103)..(449): NCBI GI NO: 18397616 NR Description: expressed protein; protein id: At1g30690
  misc_feature (103)..(449): NCBI GI NO: 14334978 NR Description: unknown protein [Arabidopsis thaliana]
NILIEKSSRSISKTPPFAPCISTKAYMSPTTAASPAPAPATDAPPKPSPGAKRSLMGSLIDATALLRAASFKEDSYVAAALPASDLRALADLRALLATHPDQISIWGVPLNPPSDAPADERTDVVLLKFLRARDFRVRDAHAMLLRCAAWRAEFRADAVLDEDLGFKDLEGIVAYMHGWDRDGHPVCYNAYGVFKDRDMYDRVFGDGDRLSRFLRWRVQIMERGVRALQLRPGGVNAIIQVTDLKDMPKRELRAASNQILSLFQDNYPEMVARKVFVNVPWYFSVLFSMISPFLTERTKSKFVIAREGNVAETLFKFIRPELVPVQYGGLSRASELENGPPKPASEFTIKGGEKVFLEIDGIEAGATITWDLVVGGWELEYGAEYVPASEGGYTLCVERTKKVPAAADEPVHNAFTAKEPGKMVLSIDNSGSRKRKVAAYRYFVRKPSA

SEQ ID NO: 15324 - protein, 423 aa, Triticum aestivum
  peptide (1)..(423): Ceres Seq. ID no. 12460983
  misc_feature (149)..(309): Pfam Name: Pfam Description:  CRAL/TRIO domain
  misc_feature (26)..(420): NCBI GI NO: 15230555 NR Description: putative protein; protein id: At3g51670
  misc_feature (3)..(422): NCBI GI NO: 34907288 NR Description: contains ESTsAU093915
  misc_feature (47)..(415): NCBI GI NO: 8894548 NR Description: hypothetical protein [Cicer arietinum]
  misc_feature (44)..(423): NCBI GI NO: 30680992 NR Description: expressed protein [Arabidopsis thaliana]
  misc_feature (44)..(421): NCBI GI NO: 15081614 NR Description: At1g72160/T9N14_8 [Arabidopsis thaliana]
  misc_feature (44)..(421): NCBI GI NO: 15218383 NR Description: cytosolic factor, putative; protein id:At1g72160
  misc_feature (44)..(333): NCBI GI NO: 25407487 NR Description: hypothetical protein AT4g09160
  misc_feature (341)..(423): NCBI GI NO: 25407487 NR Description: hypothetical protein AT4g09160
  misc_feature (77)..(423): NCBI GI NO: 18397616 NR Description: expressed protein; protein id: At1g30690
  misc_feature (77)..(423): NCBI GI NO: 14334978 NR Description: unknown protein [Arabidopsis thaliana]
MSPTTAASPAPAPATDAPPKPSPGAKRSLMGSLIDATALLRAASFKEDSYVAAALPASDLRALADLRALLATHPDQISIWGVPLNPPSDAPADERTDVVLLKFLRARDFRVRDAHAMLLRCAAWRAEFRADAVLDEDLGFKDLEGIVAYMHGWDRDGHPVCYNAYGVFKDRDMYDRVFGDGDRLSRFLRWRVQIMERGVRALQLRPGGVNAIIQVTDLKDMPKRELRAASNQILSLFQDNYPEMVARKVFVNVPWYFSVLFSMISPFLTERTKSKFVIAREGNVAETLFKFIRPELVPVQYGGLSRASELENGPPKPASEFTIKGGEKVFLEIDGIEAGATITWDLVVGGWELEYGAEYVPASEGGYTLCVERTKKVPAAADEPVHNAFTAKEPGKMVLSIDNSGSRKRKVAAYRYFVRKPSA

SEQ ID NO: 15325 - protein, 394 aa, Triticum aestivum
  peptide (1)..(394): Ceres Seq. ID no. 12460984
  misc_feature (120)..(280): Pfam Name: Pfam Description:  CRAL/TRIO domain
  misc_feature (1)..(391): NCBI GI NO: 15230555 NR Description: putative protein; protein id: At3g51670
  misc_feature (1)..(393): NCBI GI NO: 34907288 NR Description: contains ESTsAU093915
  misc_feature (18)..(386): NCBI GI NO: 8894548 NR Description: hypothetical protein [Cicer arietinum]
  misc_feature (15)..(394): NCBI GI NO: 30680992 NR Description: expressed protein [Arabidopsis thaliana]
  misc_feature (15)..(392): NCBI GI NO: 15081614 NR Description: At1g72160/T9N14_8 [Arabidopsis thaliana]
  misc_feature (15)..(392): NCBI GI NO: 15218383 NR Description: cytosolic factor, putative; protein id:At1g72160
  misc_feature (15)..(304): NCBI GI NO: 25407487 NR Description: hypothetical protein AT4g09160
  misc_feature (312)..(394): NCBI GI NO: 25407487 NR Description: hypothetical protein AT4g09160
  misc_feature (48)..(394): NCBI GI NO: 18397616 NR Description: expressed protein; protein id: At1g30690
  misc_feature (48)..(394): NCBI GI NO: 14334978 NR Description: unknown protein [Arabidopsis thaliana]
MGSLIDATALLRAASFKEDSYVAAALPASDLRALADLRALLATHPDQISIWGVPLNPPSDAPADERTDVVLLKFLRARDFRVRDAHAMLLRCAAWRAEFRADAVLDEDLGFKDLEGIVAYMHGWDRDGHPVCYNAYGVFKDRDMYDRVFGDGDRLSRFLRWRVQIMERGVRALQLRPGGVNAIIQVTDLKDMPKRELRAASNQILSLFQDNYPEMVARKVFVNVPWYFSVLFSMISPFLTERTKSKFVIAREGNVAETLFKFIRPELVPVQYGGLSRASELENGPPKPASEFTIKGGEKVFLEIDGIEAGATITWDLVVGGWELEYGAEYVPASEGGYTLCVERTKKVPAAADEPVHNAFTAKEPGKMVLSIDNSGSRKRKVAAYRYFVRKPSA

SEQ ID NO: 15326 - DNA, 1601 bp, Triticum aestivum
  misc_feature (1)..(1601): Ceres Seq. ID no. 15226213
acctcctctcggacgcctctccaccgcccgaaaaagtgagagacgaccaccgccgctcgccgacgaccagtaggcggcgccgatccggagccgccggttgaggggacgccaccgtacgtgcgcgcatgacagggaaccggcgccaccgccggcgccggagagcgcgaccgcagcaggccgccgaaccctcgccgccgccggcaccagccagcctcagctccagggaagttgctgttgcagcaaggccctctaagaaaatctgtgatgcctctggatctatttcctcatcctcatcgggatctcatgcctgggaaagccttctagacagcctgctccaccaaatcatttcgctcattagctcatttcatgacttccttgctttccgtggcatctgtcactcatggcacgccgcagcctcttccttcccatctgtatataccttcagcttcccacctctccacctcaaaccagatgtaagccaggagagttacaactcagatcggaaatcgcagcttgttgatcctgctaagaaaagtttatcccatcgttgttcagcacctggaattactccacatcccatgcgctatctgggctgctcatatggttatcttatcttctctgataggagacactgccatctcgtcgatgtgtacactggcacaaaggtgaagccaccaaaattccaatctgagagcaacactttgatctaccttggcatccttacggctccactagattcgcccaattcacgtctcatccttttctcgagaatctccatgctccagtggcaggttggaacaaattcttggacagagcaccctcaggttggtgaactcatccatcagattgtgctcttcaaaggccagatgtttgccatggactttgttcaaaggctacataccatacacatatcacctgagctcagcatgcaggaagtagcagttatgtgggaacagagcatgctcgtaggccttcattctaagccatggttggtggtctgtggtgacatgcttctcttggtagatctctcggtaagcatggaccaactgtttggctttcctggcacctttcaagtcttccgcctcgacttctcagttgaaccagctaagtgggtgaagatggataagttggacaattgggctctcttcctcaccaatgataggagaaaccctacattttcttgcatgaaccccgaaagatggggaggaaagagtaactatatttatgttccaacaaaatcagaagattttgatgagccatggactgcaatagaggttggacagccggtgcccagcttgactcaccgtatgtcattcagttccgcagccactgcccattgcagtccactaaatagcctctgggtgcttcccagtttggtttacggggttgaccagtgattggtcatccttgcttgttgcagttgcaaggcttttcttagtctttcacaatgccagtcctgtcgattcctgcttttgtattattcagttagccactaggttctgtaactcccatggtttcttgacttggcaaatgtattgtgtacaagaatgttgatctatattgtctccaggaagtgattgtcctgcactgggtctatgggg

SEQ ID NO: 15327 - protein, 423 aa, Triticum aestivum
  peptide (1)..(423): Ceres Seq. ID no. 15226214
  misc_feature (62)..(108): Pfam Name: Pfam Description:  F-box domain
  misc_feature (63)..(423): NCBI GI NO: 34897862 NR Description: hypothetical protein
  misc_feature (34)..(423): NCBI GI NO: 34897916 NR Description: hypothetical protein
  misc_feature (41)..(419): NCBI GI NO: 34897864 NR Description: hypothetical protein
  misc_feature (30)..(385): NCBI GI NO: 34897914 NR Description: hypothetical protein
  misc_feature (46)..(361): NCBI GI NO: 24413941 NR Description: putative selenium-binding protein
  misc_feature (152)..(361): NCBI GI NO: 34897928 NR Description: Similar to Arabidopsis thaliana DNA chromosome 4
MTGNRRHRRRRRARPQQAAEPSPPPAPASLSSREVAVAARPSKKICDASGSISSSSSGSHAWESLLDSLLHQIISLISSFHDFLAFRGICHSWHAAASSFPSVYTFSFPPLHLKPDVSQESYNSDRKSQLVDPAKKSLSHRCSAPGITPHPMRYLGCSYGYLIFSDRRHCHLVDVYTGTKVKPPKFQSESNTLIYLGILTAPLDSPNSRLILFSRISMLQWQVGTNSWTEHPQVGELIHQIVLFKGQMFAMDFVQRLHTIHISPELSMQEVAVMWEQSMLVGLHSKPWLVVCGDMLLLVDLSVSMDQLFGFPGTFQVFRLDFSVEPAKWVKMDKLDNWALFLTNDRRNPTFSCMNPERWGGKSNYIYVPTKSEDFDEPWTAIEVGQPVPSLTHRMSFSSAATAHCSPLNSLWVLPSLVYGVDQ

SEQ ID NO: 15328 - protein, 272 aa, Triticum aestivum
  peptide (1)..(272): Ceres Seq. ID no. 15226215
  misc_feature (1)..(272): NCBI GI NO: 34897862 NR Description: hypothetical protein
  misc_feature (1)..(272): NCBI GI NO: 34897916 NR Description: hypothetical protein
  misc_feature (1)..(268): NCBI GI NO: 34897864 NR Description: hypothetical protein
  misc_feature (1)..(234): NCBI GI NO: 34897914 NR Description: hypothetical protein
  misc_feature (1)..(210): NCBI GI NO: 24413941 NR Description: putative selenium-binding protein
  misc_feature (1)..(210): NCBI GI NO: 34897928 NR Description: Similar to Arabidopsis thaliana DNA chromosome 4
MRYLGCSYGYLIFSDRRHCHLVDVYTGTKVKPPKFQSESNTLIYLGILTAPLDSPNSRLILFSRISMLQWQVGTNSWTEHPQVGELIHQIVLFKGQMFAMDFVQRLHTIHISPELSMQEVAVMWEQSMLVGLHSKPWLVVCGDMLLLVDLSVSMDQLFGFPGTFQVFRLDFSVEPAKWVKMDKLDNWALFLTNDRRNPTFSCMNPERWGGKSNYIYVPTKSEDFDEPWTAIEVGQPVPSLTHRMSFSSAATAHCSPLNSLWVLPSLVYGVDQ

SEQ ID NO: 15329 - DNA, 1222 bp, Triticum aestivum
  misc_feature (1)..(1222): Ceres Seq. ID no. 12618205
aaaaaaactaaggcaacgcaacaagacggaatagacccgcaaccgctgcgccctcttccggtcgattcacgttcactgcgagggggaggaggaggaggacggccagcccctgcgcgagacgagcctctacaagggcttctgcggtggctaatttcgggaggtagaagagggaggaggagccatgaacggtggtagcaagcaaacactgatatacagcttcgtggccaagggctccgtggtgctggccgagcacacggccttctctggcaacttcagcaccatcgccgtgcagtgcctccagaagctgccctccaacagcacaaggtccacctactcctgcgatggccacaccttcaacttcctcgtcgaccgtgattttgtgtttcttgtggtggccgaagaggcgctgggaaggagcgtgccgtttgtgttcctagagagggttagggaagacttcatgcagcggtatgggtccagtatcgatgaggagggacaacacccgcttgctgatgacgcggatgaggacgatttcctgtttgaggaccggtttagcatcgcctacaatcttgaccgggaattcgggccaaggttgaaggatcacatgcagtattgtattaatcatccagaggaaattagcaagctctctaaggtgaaatcacatctttcagaggttaaagggatcatgatggacaacatcgagaagatattagatcgtggcgagaagattgaacttttggtgggaaagaccgaaaccttacagtcgcaggccgacagcttccataggcatggcagagagctcaggcgcaagatgtggcttcagaacctgaggtttaagctgatggtcggtggtggcatcgcgtttttgatcctcatcctctggctaatggtttgctggggcttcaagtgctagagagttcagagtcttcattcgccctttttttccttgtcatttgatgttctgtttacggtgtcatgtgcatataatgaccaccaaattatgcttcgctatgttccgaacaaaagttatgtggtgtgagacccttaattcctcatagaccatccttatgttccataagaccatagggatctggagtactcgtgtaagctttatgagagagggggacgtcagtcgattatctgtacattctgaactgcaagcttattgcctggaccttgttttgctcagatcctcttgacgatgatccatgttgcacctagcgcc

SEQ ID NO: 15330 - protein, 242 aa, Triticum aestivum
  peptide (1)..(242): Ceres Seq. ID no. 12618206
  misc_feature (150)..(237): Pfam Name: Pfam Description:  Synaptobrevin
  misc_feature (5)..(242): NCBI GI NO: 15232475 NR Description: synaptobrevin -like protein; protein id:At3g54300
  misc_feature (126)..(242): NCBI GI NO: 27805753 NR Description: Vesicle-associated membrane protein 725
  misc_feature (126)..(242): NCBI GI NO: 30685375 NR Description: synaptobrevin -related [Arabidopsis thaliana]
  misc_feature (6)..(97): NCBI GI NO: 27805753 NR Description: Vesicle-associated membrane protein 725
  misc_feature (6)..(97): NCBI GI NO: 30685375 NR Description: synaptobrevin -related [Arabidopsis thaliana]
  misc_feature (126)..(242): NCBI GI NO: 29150380 NR Description: synaptobrevin-like protein
  misc_feature (6)..(96): NCBI GI NO: 29150380 NR Description: synaptobrevin-like protein
  misc_feature (126)..(242): NCBI GI NO: 15220315 NR Description: synaptobrevin 7B, putative; protein id: At1g04760
  misc_feature (6)..(97): NCBI GI NO: 15220315 NR Description: synaptobrevin 7B, putative; protein id: At1g04760
  misc_feature (126)..(242): NCBI GI NO: 15220943 NR Description: synaptobrevin 7B, putative; protein id: At1g04750
MNGGSKQTLIYSFVAKGSVVLAEHTAFSGNFSTIAVQCLQKLPSNSTRSTYSCDGHTFNFLVDRDFVFLVVAEEALGRSVPFVFLERVREDFMQRYGSSIDEEGQHPLADDADEDDFLFEDRFSIAYNLDREFGPRLKDHMQYCINHPEEISKLSKVKSHLSEVKGIMMDNIEKILDRGEKIELLVGKTETLQSQADSFHRHGRELRRKMWLQNLRFKLMVGGGIAFLILILWLMVCWGFKC

SEQ ID NO: 15331 - protein, 150 aa, Triticum aestivum
  peptide (1)..(150): Ceres Seq. ID no. 12618207
  misc_feature (58)..(145): Pfam Name: Pfam Description:  Synaptobrevin
  misc_feature (1)..(150): NCBI GI NO: 15232475 NR Description: synaptobrevin -like protein; protein id:At3g54300
  misc_feature (34)..(150): NCBI GI NO: 27805753 NR Description: Vesicle-associated membrane protein 725
  misc_feature (34)..(150): NCBI GI NO: 30685375 NR Description: synaptobrevin -related [Arabidopsis thaliana]
  misc_feature (34)..(150): NCBI GI NO: 29150380 NR Description: synaptobrevin-like protein
  misc_feature (34)..(150): NCBI GI NO: 15220315 NR Description: synaptobrevin 7B, putative; protein id: At1g04760
  misc_feature (34)..(150): NCBI GI NO: 15220943 NR Description: synaptobrevin 7B, putative; protein id: At1g04750
  misc_feature (34)..(150): NCBI GI NO: 15225796 NR Description: putative synaptobrevin; protein id: At2g33120
  misc_feature (34)..(150): NCBI GI NO: 600710 NR Description: formerly called HAT24
  misc_feature (32)..(124): NCBI GI NO: 33347409 NR Description: synptobrevin-related protein [Pyrus pyrifolia]
  misc_feature (32)..(150): NCBI GI NO: 27805752 NR Description: Vesicle-associated membrane protein 724
MQRYGSSIDEEGQHPLADDADEDDFLFEDRFSIAYNLDREFGPRLKDHMQYCINHPEEISKLSKVKSHLSEVKGIMMDNIEKILDRGEKIELLVGKTETLQSQADSFHRHGRELRRKMWLQNLRFKLMVGGGIAFLILILWLMVCWGFKC

SEQ ID NO: 15332 - DNA, 1475 bp, Triticum aestivum
  misc_feature (1)..(1475): Ceres Seq. ID no. 14301622
attcttttgttgctgccaccgcaccgctggtcatcgatcacgacttgcgtggcgaccaaagcagcagccaccaacatctgtgcataaatgcacacacgtccgtacttgagttgcctctcagcagccagagaaatagagccctgtgctagagctattgccaggagaagagagctcagctcggtagtgatcatcggcgatatggcgacgaggaggaagacggcgtgcgtcaccggcggcagcgggtacatcgcgtcggcgctggtgaagatgctgctggagaagggatacgccgtcaagaccaccgtcagaaaccccgatgacgcggagaagaacgcgcatctcaaggccttggcagcgctcggctccttggaggtcttccgcgccgatctgaacgaggagggcagcttcgaccacgccgtcgccggctgcgactacgccttcctcgtcgccgctccggtgagcctcatgccagagaaccctgagaaagacgtgatcgagccggccgtccacgggaccctgaacgtgatgaagtcgtgcgtgagagcggggacggtgaagcgagtggtcctcacatcgtcggtggcgggggtgtccagccggccgctggaaggcgacggccatgtccttgacgaggaatcctggtccgacgtggagttcctcagatcaacaaagaccggtccctgggcgtactccgtctcgaaggtgcttgtggagaaggcggcgatggcgttcgcggaggacaagggcatcagcctggtcaccgtgtgcccggccgtcacggtgggcgaggcgccggcggcgaacgacctcaccagcgtcagcatcatcctctccctgctgtccggggatgatgcgtatgccggcgccctggagcacatcgagagggcgacgggctcgatcccgattctgcacatcgaggacctctgccgagcggagatgttcgtggccgaggaggaggccgcgtcggggcggtacatcgtctgcggcctcaaccccaccgccgtcgagattgcccgcttcttggctgccaactacccgcagtacaaggtcaatacagataggttcagagatctccctgagaagccgagagtctgcatttcgtcggcgaagctcgtcaaggaagggtttgagtacaagtacaagaacctggacggaatatatggcagcgtcgtcgagtatggaagggccttgggaatccttccctactaagaagtatgatcgatcttagaatcagacgatgcgcttggaagcaaaataagccttttagtctcctgaagtacacaaatgatgaaatgtgggtgttcagttcatatgaaaaatgtattataaaatgtactgtagtacttgtatggaaagtgatagttgtgtctgatgagagcatgctcagtcatggtgaaaaaagccatagtcgtgcacgtagataaaccgccattaaaatctcccccaacgcagaagaagccttcttgttttcctcc

SEQ ID NO: 15333 - protein, 373 aa, Triticum aestivum
  peptide (1)..(373): Ceres Seq. ID no. 14301623
  misc_feature (47)..(226): Pfam Name: Pfam Description:  NAD dependent epimerase/dehydratase family
  misc_feature (39)..(373): NCBI GI NO: 39546249 NR Description: OSJNBa0089N06.19
  misc_feature (42)..(372): NCBI GI NO: 39546252 NR Description: OSJNBa0089N06.22
  misc_feature (77)..(348): NCBI GI NO: 39546254 NR Description: OSJNBa0089N06.24
  misc_feature (39)..(61): NCBI GI NO: 39546254 NR Description: OSJNBa0089N06.24
  misc_feature (42)..(371): NCBI GI NO: 32454782 NR Description: TPA: putative anthocyanidin reductase
  misc_feature (35)..(370): NCBI GI NO: 27966032 NR Description: anthocyanidin reductase [Medicago truncatula]
  misc_feature (43)..(371): NCBI GI NO: 32454758 NR Description: TPA: putative anthocyanidin reductase
  misc_feature (38)..(373): NCBI GI NO: 29423733 NR Description: dihydroflavonol 4-reductase [Brassica oleracea]
  misc_feature (44)..(373): NCBI GI NO: 1944199 NR Description: dihydroflavonol 4-reductase [Perilla frutescens]
  misc_feature (47)..(373): NCBI GI NO: 28932723 NR Description: dihydroflavonol 4-reductase [Lophopyrum ponticum]
MHTRPYLSCLSAAREIEPCARAIARRRELSSVVIIGDMATRRKTACVTGGSGYIASALVKMLLEKGYAVKTTVRNPDDAEKNAHLKALAALGSLEVFRADLNEEGSFDHAVAGCDYAFLVAAPVSLMPENPEKDVIEPAVHGTLNVMKSCVRAGTVKRVVLTSSVAGVSSRPLEGDGHVLDEESWSDVEFLRSTKTGPWAYSVSKVLVEKAAMAFAEDKGISLVTVCPAVTVGEAPAANDLTSVSIILSLLSGDDAYAGALEHIERATGSIPILHIEDLCRAEMFVAEEEAASGRYIVCGLNPTAVEIARFLAANYPQYKVNTDRFRDLPEKPRVCISSAKLVKEGFEYKYKNLDGIYGSVVEYGRALGILPY

SEQ ID NO: 15334 - protein, 336 aa, Triticum aestivum
  peptide (1)..(336): Ceres Seq. ID no. 14301624
  misc_feature (10)..(189): Pfam Name: Pfam Description:  NAD dependent epimerase/dehydratase family
  misc_feature (2)..(336): NCBI GI NO: 39546249 NR Description: OSJNBa0089N06.19
  misc_feature (5)..(335): NCBI GI NO: 39546252 NR Description: OSJNBa0089N06.22
  misc_feature (40)..(311): NCBI GI NO: 39546254 NR Description: OSJNBa0089N06.24
  misc_feature (2)..(24): NCBI GI NO: 39546254 NR Description: OSJNBa0089N06.24
  misc_feature (5)..(334): NCBI GI NO: 32454782 NR Description: TPA: putative anthocyanidin reductase
  misc_feature (1)..(333): NCBI GI NO: 27966032 NR Description: anthocyanidin reductase [Medicago truncatula]
  misc_feature (6)..(334): NCBI GI NO: 32454758 NR Description: TPA: putative anthocyanidin reductase
  misc_feature (1)..(336): NCBI GI NO: 29423733 NR Description: dihydroflavonol 4-reductase [Brassica oleracea]
  misc_feature (7)..(336): NCBI GI NO: 1944199 NR Description: dihydroflavonol 4-reductase [Perilla frutescens]
  misc_feature (10)..(336): NCBI GI NO: 28932723 NR Description: dihydroflavonol 4-reductase [Lophopyrum ponticum]
MATRRKTACVTGGSGYIASALVKMLLEKGYAVKTTVRNPDDAEKNAHLKALAALGSLEVFRADLNEEGSFDHAVAGCDYAFLVAAPVSLMPENPEKDVIEPAVHGTLNVMKSCVRAGTVKRVVLTSSVAGVSSRPLEGDGHVLDEESWSDVEFLRSTKTGPWAYSVSKVLVEKAAMAFAEDKGISLVTVCPAVTVGEAPAANDLTSVSIILSLLSGDDAYAGALEHIERATGSIPILHIEDLCRAEMFVAEEEAASGRYIVCGLNPTAVEIARFLAANYPQYKVNTDRFRDLPEKPRVCISSAKLVKEGFEYKYKNLDGIYGSVVEYGRALGILPY

SEQ ID NO: 15335 - protein, 313 aa, Triticum aestivum
  peptide (1)..(313): Ceres Seq. ID no. 14301625
  misc_feature (1)..(166): Pfam Name: Pfam Description:  NAD dependent epimerase/dehydratase family
  misc_feature (1)..(313): NCBI GI NO: 39546249 NR Description: OSJNBa0089N06.19
  misc_feature (1)..(312): NCBI GI NO: 39546252 NR Description: OSJNBa0089N06.22
  misc_feature (17)..(288): NCBI GI NO: 39546254 NR Description: OSJNBa0089N06.24
  misc_feature (1)..(311): NCBI GI NO: 32454782 NR Description: TPA: putative anthocyanidin reductase
  misc_feature (1)..(310): NCBI GI NO: 27966032 NR Description: anthocyanidin reductase [Medicago truncatula]
  misc_feature (1)..(311): NCBI GI NO: 32454758 NR Description: TPA: putative anthocyanidin reductase
  misc_feature (1)..(313): NCBI GI NO: 29423733 NR Description: dihydroflavonol 4-reductase [Brassica oleracea]
  misc_feature (1)..(313): NCBI GI NO: 1944199 NR Description: dihydroflavonol 4-reductase [Perilla frutescens]
  misc_feature (1)..(313): NCBI GI NO: 28932723 NR Description: dihydroflavonol 4-reductase [Lophopyrum ponticum]
  misc_feature (1)..(291): NCBI GI NO: 13537528 NR Description: dihydroflavonol 4-reductase
MLLEKGYAVKTTVRNPDDAEKNAHLKALAALGSLEVFRADLNEEGSFDHAVAGCDYAFLVAAPVSLMPENPEKDVIEPAVHGTLNVMKSCVRAGTVKRVVLTSSVAGVSSRPLEGDGHVLDEESWSDVEFLRSTKTGPWAYSVSKVLVEKAAMAFAEDKGISLVTVCPAVTVGEAPAANDLTSVSIILSLLSGDDAYAGALEHIERATGSIPILHIEDLCRAEMFVAEEEAASGRYIVCGLNPTAVEIARFLAANYPQYKVNTDRFRDLPEKPRVCISSAKLVKEGFEYKYKNLDGIYGSVVEYGRALGILPY

SEQ ID NO: 15336 - DNA, 1187 bp, Triticum aestivum
  misc_feature (1)..(1187): Ceres Seq. ID no. 13597477
  misc_feature (491)..(491): n is a, c, t, g, unknown, or other
atagaggaaaactttcgaggactatgacgatggggcgcaacttggcggcggtgctcgtcgtgcttgcctgcctcgtttccctcgcgtcggcgcagcaggtcaagacgacggacacgcggtggagctaccgtctgccgctgcccgacggcgtcagcggcgccgagagcctcgcgttcgccggcaaggacggggtctacaccggcgtctccgacgggcgcgttctcaggtggggcgggagcgccgccggctggaccaccttcgcttacaatgccaactacaggaaaattcctctgtgctcggattctggggtgccgtcggaacaaaaggagagcatatgcgggcggccgctgggtgtccggttcaacaggaagaccggcgagctctacatcgccgacgcctacttggggctcatgaaggtcggcccggaaggcggcgaagcccaggtgctagcgacggaggcgaacggcatccccttccacttcctcaacggnctcgacgttgatcaggcgaccggcgatgtctacttcaccgacagcagcgccaactacccccggaggttcaacacggagatcatcatgaacgccgacgcgaccggccgcctgctcaagtacgacgcacgcacgaagctcgtcacggtgctcaaggcggagctgccgtacccgaacggcgtcgcgctcagccgcgacaggacgcacctggtggtggcgcacacggtgccgtgccaggcgttccggtactggctcaaggggcccaaggccgggcagtacgagctcttcgccgacctgccggggtacccggacaacgtgaggcgcgacgggcagggcggtttctgggtggcgctcaaccaggagaaggcgcggctcaacgcgacggcggctccggtgaagcacttggtcggcgtccgtctcggcgccgacggcgtggaggtcgaggagctgacggccgccaggggcgtgacgctcagcgaggtggcggagcagaacggcaacaagctgtggctgggctccgtcgagcttgattatataggcctcttcgtttgatcgattatgtgccagcgcctttatggatttgtacgggttcgttagtggttgtctcattgagttagtagacagagttaaaggtcatggcttcgtacggtttcaggactacatgcaacgtttttctacagatgtaattatgcgagtatt

SEQ ID NO: 15337 - protein, 345 aa, Triticum aestivum
  peptide (1)..(345): Ceres Seq. ID no. 13597478
  misc_feature (51)..(302): Pfam Name: Pfam Description:  Strictosidine synthase
  misc_feature (1)..(343): NCBI GI NO: 40253286 NR Description: putative male fertility protein
  misc_feature (6)..(343): NCBI GI NO: 34395247 NR Description: putative strictosidine synthase
  misc_feature (6)..(336): NCBI GI NO: 34393255 NR Description: putative male fertility protein
  misc_feature (104)..(343): NCBI GI NO: 34395249 NR Description: putative strictosidine synthase
  misc_feature (104)..(343): NCBI GI NO: 34395252 NR Description: putative strictosidine synthase-related
  misc_feature (49)..(302): NCBI GI NO: 11280567 NR Description: hypothetical protein F24I3
  misc_feature (49)..(302): NCBI GI NO: 30694556 NR Description: strictosidine synthase-related
  misc_feature (24)..(281): NCBI GI NO: 40538997 NR Description: putative  strictosidine synthase
  misc_feature (43)..(281): NCBI GI NO: 14028757 NR Description: male fertility protein [Zea mays]
  misc_feature (43)..(281): NCBI GI NO: 34902140 NR Description: putative male fertility protein
  misc_feature (163)..(163): Xaa is any aa, unknown or other
RGKLSRTMTMGRNLAAVLVVLACLVSLASAQQVKTTDTRWSYRLPLPDGVSGAESLAFAGKDGVYTGVSDGRVLRWGGSAAGWTTFAYNANYRKIPLCSDSGVPSEQKESICGRPLGVRFNRKTGELYIADAYLGLMKVGPEGGEAQVLATEANGIPFHFLNXLDVDQATGDVYFTDSSANYPRRFNTEIIMNADATGRLLKYDARTKLVTVLKAELPYPNGVALSRDRTHLVVAHTVPCQAFRYWLKGPKAGQYELFADLPGYPDNVRRDGQGGFWVALNQEKARLNATAAPVKHLVGVRLGADGVEVEELTAARGVTLSEVAEQNGNKLWLGSVELDYIGLFV

SEQ ID NO: 15338 - protein, 338 aa, Triticum aestivum
  peptide (1)..(338): Ceres Seq. ID no. 13597479
  misc_feature (44)..(295): Pfam Name: Pfam Description:  Strictosidine synthase
  misc_feature (1)..(336): NCBI GI NO: 40253286 NR Description: putative male fertility protein
  misc_feature (1)..(336): NCBI GI NO: 34395247 NR Description: putative strictosidine synthase
  misc_feature (1)..(329): NCBI GI NO: 34393255 NR Description: putative male fertility protein
  misc_feature (97)..(336): NCBI GI NO: 34395249 NR Description: putative strictosidine synthase
  misc_feature (97)..(336): NCBI GI NO: 34395252 NR Description: putative strictosidine synthase-related
  misc_feature (42)..(295): NCBI GI NO: 11280567 NR Description: hypothetical protein F24I3
  misc_feature (42)..(295): NCBI GI NO: 30694556 NR Description: strictosidine synthase-related
  misc_feature (17)..(274): NCBI GI NO: 40538997 NR Description: putative  strictosidine synthase
  misc_feature (36)..(274): NCBI GI NO: 14028757 NR Description: male fertility protein [Zea mays]
  misc_feature (36)..(274): NCBI GI NO: 34902140 NR Description: putative male fertility protein
  misc_feature (156)..(156): Xaa is any aa, unknown or other
MTMGRNLAAVLVVLACLVSLASAQQVKTTDTRWSYRLPLPDGVSGAESLAFAGKDGVYTGVSDGRVLRWGGSAAGWTTFAYNANYRKIPLCSDSGVPSEQKESICGRPLGVRFNRKTGELYIADAYLGLMKVGPEGGEAQVLATEANGIPFHFLNXLDVDQATGDVYFTDSSANYPRRFNTEIIMNADATGRLLKYDARTKLVTVLKAELPYPNGVALSRDRTHLVVAHTVPCQAFRYWLKGPKAGQYELFADLPGYPDNVRRDGQGGFWVALNQEKARLNATAAPVKHLVGVRLGADGVEVEELTAARGVTLSEVAEQNGNKLWLGSVELDYIGLFV

SEQ ID NO: 15339 - protein, 336 aa, Triticum aestivum
  peptide (1)..(336): Ceres Seq. ID no. 13597480
  misc_feature (42)..(293): Pfam Name: Pfam Description:  Strictosidine synthase
  misc_feature (1)..(334): NCBI GI NO: 40253286 NR Description: putative male fertility protein
  misc_feature (1)..(334): NCBI GI NO: 34395247 NR Description: putative strictosidine synthase
  misc_feature (1)..(327): NCBI GI NO: 34393255 NR Description: putative male fertility protein
  misc_feature (95)..(334): NCBI GI NO: 34395249 NR Description: putative strictosidine synthase
  misc_feature (95)..(334): NCBI GI NO: 34395252 NR Description: putative strictosidine synthase-related
  misc_feature (40)..(293): NCBI GI NO: 11280567 NR Description: hypothetical protein F24I3
  misc_feature (40)..(293): NCBI GI NO: 30694556 NR Description: strictosidine synthase-related
  misc_feature (15)..(272): NCBI GI NO: 40538997 NR Description: putative  strictosidine synthase
  misc_feature (34)..(272): NCBI GI NO: 14028757 NR Description: male fertility protein [Zea mays]
  misc_feature (34)..(272): NCBI GI NO: 34902140 NR Description: putative male fertility protein
  misc_feature (154)..(154): Xaa is any aa, unknown or other
MGRNLAAVLVVLACLVSLASAQQVKTTDTRWSYRLPLPDGVSGAESLAFAGKDGVYTGVSDGRVLRWGGSAAGWTTFAYNANYRKIPLCSDSGVPSEQKESICGRPLGVRFNRKTGELYIADAYLGLMKVGPEGGEAQVLATEANGIPFHFLNXLDVDQATGDVYFTDSSANYPRRFNTEIIMNADATGRLLKYDARTKLVTVLKAELPYPNGVALSRDRTHLVVAHTVPCQAFRYWLKGPKAGQYELFADLPGYPDNVRRDGQGGFWVALNQEKARLNATAAPVKHLVGVRLGADGVEVEELTAARGVTLSEVAEQNGNKLWLGSVELDYIGLFV

SEQ ID NO: 15340 - DNA, 582 bp, Triticum aestivum
  misc_feature (1)..(582): Ceres Seq. ID no. 13662788
cctaatcgaaaaccgtctcgtctcccccaaccaggcgaaaaccagcatcgcgaacggcaccagaccaaacccccgaatccgagccaaggagcaagggcaaaaccccatctgcggcggcggcggcggcggcggcggcggcgatggagtcggtggaggcgctcgtggcgcacatccagggtctctccgggagcccggacgagctggcgcagctccacggcctcctcaagcaggccgacggcgacgccctgcgcgtccactccgccggcctcctgcccttcctctcccacctccaccccggcgcccactccctcggctacctctacctcctggattctttcgtgtcgtcgtctgctaatctgagggcgcacgccggcggggaccttcttgtgaccgtggccgatttcctcacctcttgctcggccgaccagatacgcatggcgcccgacaaatttttgaatgtctgtagggtgctcaagaacgaggtcatgcagctcaatgcgccgatccgagggattgctccgcttcgggctgctgtccgcaagatccagacatcgtcagagcagcttaccccactccacgctg

SEQ ID NO: 15341 - protein, 147 aa, Triticum aestivum
  peptide (1)..(147): Ceres Seq. ID no. 13662789
  misc_feature (1)..(146): NCBI GI NO: 16930463 NR Description: AT5g14250/F18O22_40 [Arabidopsis thaliana]
  misc_feature (1)..(146): NCBI GI NO: 18417330 NR Description: COP9 complex subunit 3, FUS11
  misc_feature (1)..(146): NCBI GI NO: 11290078 NR Description: hypothetical protein F18O22
  misc_feature (20)..(146): NCBI GI NO: 29468345 NR Description: CSN3 [Nicotiana benthamiana]
  misc_feature (3)..(146): NCBI GI NO: 28279587 NR Description: Similar to COP9 constitutive photomorphogenichomolog subunit 3
  misc_feature (3)..(146): NCBI GI NO: 39795809 NR Description: Unknown (protein for MGC:77615) [Danio rerio]
  misc_feature (3)..(146): NCBI GI NO: 26339632 NR Description: unnamed protein product [Mus musculus]
  misc_feature (3)..(146): NCBI GI NO: 27696965 NR Description: Similar to COP9
  misc_feature (3)..(146): NCBI GI NO: 23238222 NR Description: COP9 constitutive photomorphogenic homolog subunit3
  misc_feature (3)..(146): NCBI GI NO: 6753488 NR Description: COP9
MESVEALVAHIQGLSGSPDELAQLHGLLKQADGDALRVHSAGLLPFLSHLHPGAHSLGYLYLLDSFVSSSANLRAHAGGDLLVTVADFLTSCSADQIRMAPDKFLNVCRVLKNEVMQLNAPIRGIAPLRAAVRKIQTSSEQLTPLHA

SEQ ID NO: 15342 - protein, 119 aa, Triticum aestivum
  peptide (1)..(119): Ceres Seq. ID no. 13662790
PNRKPSRLPQPGENQHRERHQTKPPNPSQGARAKPHLRRRRRRRRRRWSRWRRSWRTSRVSPGARTSWRSSTASSSRPTATPCASTPPASCPSSPTSTPAPTPSATSTSWILSCRRLLI

SEQ ID NO: 15343 - protein, 117 aa, Triticum aestivum
  peptide (1)..(117): Ceres Seq. ID no. 13662791
  misc_feature (33)..(109): Pfam Name: Pfam Description:  Jun-like transcription factor
  misc_feature (24)..(117): NCBI GI NO: 2624970 NR Description: proline-rich protein 9-1 [Mus musculus]
  misc_feature (3)..(103): NCBI GI NO: 26337967 NR Description: unnamed protein product [Mus musculus]
  misc_feature (37)..(109): NCBI GI NO: 14715185 NR Description: autotransporter subtilisin-like protease
LIENRLVSPNQAKTSIANGTRPNPRIRAKEQGQNPICGGGGGGGGGDGVGGGARGAHPGSLREPGRAGAAPRPPQAGRRRRPARPLRRPPALPLPPPPRRPLPRLPLPPGFFRVVVC

SEQ ID NO: 15344 - DNA, 958 bp, Triticum aestivum
  misc_feature (1)..(958): Ceres Seq. ID no. 13598557
aaccatttcacctcacaacacttctcatcttggagctcagcagcacagcatccaagcttcttcttcggcaagatgaacaggaagccaggcgactgggactgcaggtcgtgccagcacctcaacttcagtcgccgggacctatgccagcgctgcggcgagccacgcagtgccgctgaccgtggcagcgtcggtggcgctcttggtggtgactacgccaactttggcggccgtggcgggggtggttcctcctttggtaccggctttggtgccggctctgacgtccgcccgggcgactggtactgcacctgcggggcgcacaacttcgccagccgctccagctgcttcaagtgtgctgccttcaaggaggaagctgccgtcaatggtggcgctggtggctttgatggtgacatgtcacgctcaaggggcttcggcttcggcgctgtcggtggcatgggtggcggcatgggagccggcgcggccggtggtcgtgccagccgccctggctggaagtctggcgactggatttgcaccaggtctggatgcaacgagcacaacttcgccagcaggcaggagtgcttcaggtgcaacgcaccgagggactccggtagcgccacgccatacgaaaatttcttgcactgaggtgtaggaaggccgcggcgatgagcagaagcagcaaagggtgtccgtgtcccgcagtcgacatcatcatcataagaagaagaagaagaaagtagaatgcaaagaaatcctcctcgagtgcatgcttactagttttgtctcttcccgttttagatttggttgtcatttcccatttgggaccgtccgtctgtccgtctgatcgatgatgactagctatgtttaccgttttattatttccgttcctttcatcaagtttgcagttcgagttatgtaacccaaagacgtatgctttgcttcagaagtattattgactagtagt

SEQ ID NO: 15345 - protein, 212 aa, Triticum aestivum
  peptide (1)..(212): Ceres Seq. ID no. 13598558
  misc_feature (170)..(200): Pfam Name: Pfam Description:  Zn-finger in Ran binding protein and others
  misc_feature (25)..(203): NCBI GI NO: 28849863 NR Description: zinc finger transcription factor ZFP30
  misc_feature (25)..(207): NCBI GI NO: 15239445 NR Description: expressed protein [Arabidopsis thaliana]
  misc_feature (55)..(207): NCBI GI NO: 15232662 NR Description: zinc finger protein -related
  misc_feature (55)..(207): NCBI GI NO: 21595771 NR Description: putative zinc finger protein
  misc_feature (28)..(146): NCBI GI NO: 15232662 NR Description: zinc finger protein -related
  misc_feature (28)..(146): NCBI GI NO: 21595771 NR Description: putative zinc finger protein
  misc_feature (132)..(203): NCBI GI NO: 5679336 NR Description: putative zinc finger protein [Oryza sativa]
  misc_feature (25)..(79): NCBI GI NO: 5679336 NR Description: putative zinc finger protein [Oryza sativa]
  misc_feature (132)..(203): NCBI GI NO: 5803246 NR Description: ESTs AU077984
  misc_feature (25)..(79): NCBI GI NO: 5803246 NR Description: ESTs AU077984
NHFTSQHFSSWSSAAQHPSFFFGKMNRKPGDWDCRSCQHLNFSRRDLCQRCGEPRSAADRGSVGGALGGDYANFGGRGGGGSSFGTGFGAGSDVRPGDWYCTCGAHNFASRSSCFKCAAFKEEAAVNGGAGGFDGDMSRSRGFGFGAVGGMGGGMGAGAAGGRASRPGWKSGDWICTRSGCNEHNFASRQECFRCNAPRDSGSATPYENFLH

SEQ ID NO: 15346 - protein, 188 aa, Triticum aestivum
  peptide (1)..(188): Ceres Seq. ID no. 13598559
  misc_feature (146)..(176): Pfam Name: Pfam Description:  Zn-finger in Ran binding protein and others
  misc_feature (1)..(179): NCBI GI NO: 28849863 NR Description: zinc finger transcription factor ZFP30
  misc_feature (1)..(183): NCBI GI NO: 15239445 NR Description: expressed protein [Arabidopsis thaliana]
  misc_feature (31)..(183): NCBI GI NO: 15232662 NR Description: zinc finger protein -related
  misc_feature (31)..(183): NCBI GI NO: 21595771 NR Description: putative zinc finger protein
  misc_feature (4)..(122): NCBI GI NO: 15232662 NR Description: zinc finger protein -related
  misc_feature (4)..(122): NCBI GI NO: 21595771 NR Description: putative zinc finger protein
  misc_feature (108)..(179): NCBI GI NO: 5679336 NR Description: putative zinc finger protein [Oryza sativa]
  misc_feature (1)..(55): NCBI GI NO: 5679336 NR Description: putative zinc finger protein [Oryza sativa]
  misc_feature (108)..(179): NCBI GI NO: 5803246 NR Description: ESTs AU077984
  misc_feature (1)..(55): NCBI GI NO: 5803246 NR Description: ESTs AU077984
MNRKPGDWDCRSCQHLNFSRRDLCQRCGEPRSAADRGSVGGALGGDYANFGGRGGGGSSFGTGFGAGSDVRPGDWYCTCGAHNFASRSSCFKCAAFKEEAAVNGGAGGFDGDMSRSRGFGFGAVGGMGGGMGAGAAGGRASRPGWKSGDWICTRSGCNEHNFASRQECFRCNAPRDSGSATPYENFLH

SEQ ID NO: 15347 - DNA, 1180 bp, Triticum aestivum
  misc_feature (1)..(1180): Ceres Seq. ID no. 13597481
aaattgtacacagccgctggtgacacacaactggtaacgtgcggcagccaggggaactatgacggggcagccgccgaggctcgtgttccggttcacccaggcggaggtcgccaagatggaggaggtcctccgtgagctcgacgccatgcccaagcgtcctgtcatccagggcctaatcgatcacttcaacgcctccccggaccgctcaggcgacggcaaggtccccgtccagtacaatcaggtgaggaattggttccataaccggaggtccgcgcaatcccagcggtccaggaagatgatgctaccccctgttaacgaggaacaccacccagtggccggatcctactcagggaatatttcttcggatggtggtcatgtccagtttgaagcaaagtcggctagaaatggagcatggtacaatgttgctgcctttctgtcccacaggttcattgacacgagggacccggaagtactagttcgattttgttggcttggacctgaggaggatgaatggattgatgtttgtaaaggtgtgagactgcgttctcttcaatgtgttgctgtgcttcctggggatctcattctttgttttaaggaaggcaaagagcaggcctgctattttgatgcacatgttcttcaagttcaaagacgcaggcatgacataagggggtgccgctgcaggtttcttgtttgttatgatcatgatcactctgaggagtttgttccactgagcaaggtatgtcgtcgaccaatgcaccagacaaccgaaaagccacacaaaatgatgagtgtcaacactgacaaggtgaccgggggagcggttcccattccaccagatcaaggagggccatctgacaaggcggttgctcccttactagacacacctactagcacctgcagctattcagtggcagatgttgagatgggggatgcggaggctgccccaaacagtgaagctgcaaatgaagcacatgtcgacaagatgaatctgggagtgtagttctttcgcttcccagtgcatttcgttgtgaactttctagcgaataatgtttgcctcagaacttccaaaagaggaaggatggttacccagtaactgtaatgtgcccatgttgactggattgcttgtgtggtgcaaaaattgttggattggttatctatatctatatagctatgtcgtcgg

SEQ ID NO: 15348 - protein, 313 aa, Triticum aestivum
  peptide (1)..(313): Ceres Seq. ID no. 15222110
  misc_feature (102)..(300): NCBI GI NO: 22331151 NR Description: expressed protein [Arabidopsis thaliana]
  misc_feature (3)..(79): NCBI GI NO: 22331151 NR Description: expressed protein [Arabidopsis thaliana]
  misc_feature (102)..(300): NCBI GI NO: 11994101 NR Description: gb|AAD39678
  misc_feature (101)..(231): NCBI GI NO: 25402795 NR Description: protein F9L1.16 [imported] - Arabidopsis thaliana
  misc_feature (101)..(231): NCBI GI NO: 30684244 NR Description: expressed protein [Arabidopsis thaliana]
  misc_feature (101)..(219): NCBI GI NO: 30684237 NR Description: expressed protein [Arabidopsis thaliana]
MTGQPPRLVFRFTQAEVAKMEEVLRELDAMPKRPVIQGLIDHFNASPDRSGDGKVPVQYNQVRNWFHNRRSAQSQRSRKMMLPPVNEEHHPVAGSYSGNISSDGGHVQFEAKSARNGAWYNVAAFLSHRFIDTRDPEVLVRFCWLGPEEDEWIDVCKGVRLRSLQCVAVLPGDLILCFKEGKEQACYFDAHVLQVQRRRHDIRGCRCRFLVCYDHDHSEEFVPLSKVCRRPMHQTTEKPHKMMSVNTDKVTGGAVPIPPDQGGPSDKAVAPLLDTPTSTCSYSVADVEMGDAEAAPNSEAANEAHVDKMNLGV

SEQ ID NO: 15349 - protein, 294 aa, Triticum aestivum
  peptide (1)..(294): Ceres Seq. ID no. 15222111
  misc_feature (83)..(281): NCBI GI NO: 22331151 NR Description: expressed protein [Arabidopsis thaliana]
  misc_feature (1)..(60): NCBI GI NO: 22331151 NR Description: expressed protein [Arabidopsis thaliana]
  misc_feature (83)..(281): NCBI GI NO: 11994101 NR Description: gb|AAD39678
  misc_feature (82)..(212): NCBI GI NO: 25402795 NR Description: protein F9L1.16 [imported] - Arabidopsis thaliana
  misc_feature (82)..(212): NCBI GI NO: 30684244 NR Description: expressed protein [Arabidopsis thaliana]
  misc_feature (82)..(200): NCBI GI NO: 30684237 NR Description: expressed protein [Arabidopsis thaliana]
MEEVLRELDAMPKRPVIQGLIDHFNASPDRSGDGKVPVQYNQVRNWFHNRRSAQSQRSRKMMLPPVNEEHHPVAGSYSGNISSDGGHVQFEAKSARNGAWYNVAAFLSHRFIDTRDPEVLVRFCWLGPEEDEWIDVCKGVRLRSLQCVAVLPGDLILCFKEGKEQACYFDAHVLQVQRRRHDIRGCRCRFLVCYDHDHSEEFVPLSKVCRRPMHQTTEKPHKMMSVNTDKVTGGAVPIPPDQGGPSDKAVAPLLDTPTSTCSYSVADVEMGDAEAAPNSEAANEAHVDKMNLGV

SEQ ID NO: 15350 - protein, 284 aa, Triticum aestivum
  peptide (1)..(284): Ceres Seq. ID no. 15222112
  misc_feature (73)..(271): NCBI GI NO: 22331151 NR Description: expressed protein [Arabidopsis thaliana]
  misc_feature (1)..(50): NCBI GI NO: 22331151 NR Description: expressed protein [Arabidopsis thaliana]
  misc_feature (73)..(271): NCBI GI NO: 11994101 NR Description: gb|AAD39678
  misc_feature (72)..(202): NCBI GI NO: 25402795 NR Description: protein F9L1.16 [imported] - Arabidopsis thaliana
  misc_feature (72)..(202): NCBI GI NO: 30684244 NR Description: expressed protein [Arabidopsis thaliana]
  misc_feature (72)..(190): NCBI GI NO: 30684237 NR Description: expressed protein [Arabidopsis thaliana]
MPKRPVIQGLIDHFNASPDRSGDGKVPVQYNQVRNWFHNRRSAQSQRSRKMMLPPVNEEHHPVAGSYSGNISSDGGHVQFEAKSARNGAWYNVAAFLSHRFIDTRDPEVLVRFCWLGPEEDEWIDVCKGVRLRSLQCVAVLPGDLILCFKEGKEQACYFDAHVLQVQRRRHDIRGCRCRFLVCYDHDHSEEFVPLSKVCRRPMHQTTEKPHKMMSVNTDKVTGGAVPIPPDQGGPSDKAVAPLLDTPTSTCSYSVADVEMGDAEAAPNSEAANEAHVDKMNLGV

SEQ ID NO: 15351 - DNA, 1075 bp, Triticum aestivum
  misc_feature (1)..(1075): Ceres Seq. ID no. 13597604
gaaaagctttaaaagggacgggcaggcgactcaccccaccctctccctccccagcccaaaaaatttcctcgcccctccccgaagaatcccaccaccacaaccactgccacgaagaaccaatccgccccctcgcctcccccagggccgccggttcccccccgagaagggtaaatgggatcagaagggccttcaatcgtgactgtacatgttactggatttaagaagttccatggtgttgctgagaacccgacagagaaacttgtgaccaacattaaatcgttcattgaaaagagagggttgccgaaaaatcttgtacttggaagctgcgaaattctcgaaacagccgggcagggggcgcttggaacattatataaagttctagaatctgccattgcagatagagagaacgggtcatcagctcaggggcaaataatttgggtccactttggggtaaatagtggtgcatcacggtttgctcttgagaatcaagctgtgaatgaagccaccttccgctgcccagatgagcttgggtggaaacctcagagagtgcctattgtgccatctgatggaagcatctcacggacaagagagactacactgccagtgaaggagttaaccaagtcactccgaaagacaggctacgatgtgatgccttcggatgacgcggggagattcgtgtgcaactatgtgtactaccactccctccggtttgcagagcagcacggcatcaagtctctgtttgtgcatgtgcccctcttctcgacagtcgacgaggaggtccagatccatttcgtcgcttccctcgtcgaagctcttgctagcttgaactaggaacggcaacttaaaaggtcagcggtttgacctggacgatgtaaagttggacgcagactgaataagattgtgtggtgattggcgcctattggtcagatcttgctccaaaaagggtgtatttaaggggagagaaaaagaaaaacgatgcttagagtgtgtgtgaaatgccggcttgcatgccatcagttacatgtccttaacttgcatgaaaacctggttccaataaaattgacagatcattggg

SEQ ID NO: 15352 - protein, 219 aa, Triticum aestivum
  peptide (1)..(219): Ceres Seq. ID no. 15222146
  misc_feature (11)..(214): Pfam Name: Pfam Description:  Pyroglutamyl peptidase
  misc_feature (1)..(219): NCBI GI NO: 38175741 NR Description: pyrrolidone carboxyl peptidase-like protein
  misc_feature (1)..(219): NCBI GI NO: 12039349 NR Description: putative pyrrolidone carboxyl peptidase
  misc_feature (1)..(218): NCBI GI NO: 18405940 NR Description: expressed protein [Arabidopsis thaliana]
  misc_feature (1)..(217): NCBI GI NO: 13430708 NR Description: unknown protein [Arabidopsis thaliana]
  misc_feature (85)..(217): NCBI GI NO: 8778575 NR Description: F28C11.8 [Arabidopsis thaliana]
  misc_feature (1)..(89): NCBI GI NO: 8778575 NR Description: F28C11.8 [Arabidopsis thaliana]
  misc_feature (88)..(217): NCBI GI NO: 15220753 NR Description: expressed protein [Arabidopsis thaliana]
  misc_feature (1)..(89): NCBI GI NO: 9295697 NR Description: F26F24.31 [Arabidopsis thaliana]
  misc_feature (1)..(89): NCBI GI NO: 15220751 NR Description: expressed protein [Arabidopsis thaliana]
  misc_feature (88)..(194): NCBI GI NO: 18977671 NR Description: pyroglutamyl-peptidase i
MGSEGPSIVTVHVTGFKKFHGVAENPTEKLVTNIKSFIEKRGLPKNLVLGSCEILETAGQGALGTLYKVLESAIADRENGSSAQGQIIWVHFGVNSGASRFALENQAVNEATFRCPDELGWKPQRVPIVPSDGSISRTRETTLPVKELTKSLRKTGYDVMPSDDAGRFVCNYVYYHSLRFAEQHGIKSLFVHVPLFSTVDEEVQIHFVASLVEALASLN

SEQ ID NO: 15353 - DNA, 1372 bp, Triticum aestivum
  misc_feature (1)..(1372): Ceres Seq. ID no. 15225093
ctccgtccccccgcgtccccattgccttctccgttcccccaccccgtacctcgtcggcgggcggcgacgcgacgcgacgcgacgagagcggcggcggcgccggcgggggcaggaatgcggatgttctccaaggcctgctcgctcgtcgtctcctccctcccgcgctgctcctcctccgcccccgcgattagggggcagccgtcgttgataccgagggtgagcaggaaatggctcgggaagccgctcatgtacgggatcggcacgctgctggttatgcccctgaggacgatccacggtgtgggccggatgttcggcgccgcgcggtacctctgcaacatgaccagcgtctcctcgtcgcttcaaatcgagctcgtaccctgtcttcaagataactatgcgtacatcttgcatgatgtggatactggaacagttggagttgtagacccttctgaggcggtgcctatcataaacgcattggaaaagagaaaccagaacttgacctacatattaaacacccatcatcactatgatcatactggtggcaacttggaactgaaggcgaaatatggtgcaaaggtaattggttctgagaaggataaagatcgaattcctggcattgacataactctaagcgagggtgacacatggatgtttgcgggtcatcaagttcttgtgatggaaactcctggtcatacatcaggtcatgtgagcttttatttccctggatctggagcaatattcacaggtgataccttgtttagtctatcatgtggaaagctttttgaggggactccagaacagatgtactcttcactccaaaaaattgtagctcttccagatgtgacgaaggtgtactgtggacatgaatatactctgagcaattcaaggtttgccttgagcatagaaccaggaaatgaagaacttcaggaatacgctgcaagtacagctgatctgcgcaataagaatacaccaacggtgccaacaacaattgcgagagagaagcagtgcaatcctttcttgaggacctcaagtccagagataaagaaaaggctgtccattccagatcatttcgatgatgcacgtgttcttgaagttatccgacgggcgaaggataatttttgactaaccacaaaggaaattatcataaaacggtgacccaaccatctcttcgaaaaggagaagtggacaaagaacccggcaagaccacaacagaaggaatgcagggaaggaaatgtgtatagctcgatgttccaaaaatgctttggtgaaaatttgtctagcattgtatgtagcttgcacagagtgcttgttaatctgatagcagctggtgattcttttgtcgactacaaataaaatgtgtcctgtaatcctc

SEQ ID NO: 15354 - protein, 373 aa, Triticum aestivum
  peptide (1)..(373): Ceres Seq. ID no. 15225094
  misc_feature (130)..(288): Pfam Name: Pfam Description:  Metallo-beta-lactamase superfamily
  misc_feature (39)..(373): NCBI GI NO: 16209608 NR Description: glyoxalase II [Oryza sativa]
  misc_feature (39)..(373): NCBI GI NO: 21070362 NR Description: glyoxalase II [Pennisetum glaucum]
  misc_feature (41)..(373): NCBI GI NO: 28143946 NR Description: glyoxalase II [Brassica juncea]
  misc_feature (39)..(373): NCBI GI NO: 18390616 NR Description: glyoxalase II, putative
  misc_feature (39)..(373): NCBI GI NO: 30679573 NR Description: glyoxalase II, putative
  misc_feature (66)..(373): NCBI GI NO: 25406895 NR Description: hypothetical protein
  misc_feature (39)..(373): NCBI GI NO: 15224661 NR Description: glyoxalase II, putative
  misc_feature (39)..(373): NCBI GI NO: 30684920 NR Description: glyoxalase II, putative
  misc_feature (39)..(373): NCBI GI NO: 18406237 NR Description: glyoxalase II
  misc_feature (39)..(373): NCBI GI NO: 2570340 NR Description: glyoxalase II mitochondrial isozyme
LRPPASPLPSPFPHPVPRRRAATRRDATRAAAAPAGAGMRMFSKACSLVVSSLPRCSSSAPAIRGQPSLIPRVSRKWLGKPLMYGIGTLLVMPLRTIHGVGRMFGAARYLCNMTSVSSSLQIELVPCLQDNYAYILHDVDTGTVGVVDPSEAVPIINALEKRNQNLTYILNTHHHYDHTGGNLELKAKYGAKVIGSEKDKDRIPGIDITLSEGDTWMFAGHQVLVMETPGHTSGHVSFYFPGSGAIFTGDTLFSLSCGKLFEGTPEQMYSSLQKIVALPDVTKVYCGHEYTLSNSRFALSIEPGNEELQEYAASTADLRNKNTPTVPTTIAREKQCNPFLRTSSPEIKKRLSIPDHFDDARVLEVIRRAKDNF

SEQ ID NO: 15355 - protein, 335 aa, Triticum aestivum
  peptide (1)..(335): Ceres Seq. ID no. 15225095
  misc_feature (92)..(250): Pfam Name: Pfam Description:  Metallo-beta-lactamase superfamily
  misc_feature (1)..(335): NCBI GI NO: 16209608 NR Description: glyoxalase II [Oryza sativa]
  misc_feature (1)..(335): NCBI GI NO: 21070362 NR Description: glyoxalase II [Pennisetum glaucum]
  misc_feature (3)..(335): NCBI GI NO: 28143946 NR Description: glyoxalase II [Brassica juncea]
  misc_feature (1)..(335): NCBI GI NO: 18390616 NR Description: glyoxalase II, putative
  misc_feature (1)..(335): NCBI GI NO: 30679573 NR Description: glyoxalase II, putative
  misc_feature (28)..(335): NCBI GI NO: 25406895 NR Description: hypothetical protein
  misc_feature (1)..(335): NCBI GI NO: 15224661 NR Description: glyoxalase II, putative
  misc_feature (1)..(335): NCBI GI NO: 30684920 NR Description: glyoxalase II, putative
  misc_feature (1)..(335): NCBI GI NO: 18406237 NR Description: glyoxalase II
  misc_feature (1)..(335): NCBI GI NO: 2570340 NR Description: glyoxalase II mitochondrial isozyme
MRMFSKACSLVVSSLPRCSSSAPAIRGQPSLIPRVSRKWLGKPLMYGIGTLLVMPLRTIHGVGRMFGAARYLCNMTSVSSSLQIELVPCLQDNYAYILHDVDTGTVGVVDPSEAVPIINALEKRNQNLTYILNTHHHYDHTGGNLELKAKYGAKVIGSEKDKDRIPGIDITLSEGDTWMFAGHQVLVMETPGHTSGHVSFYFPGSGAIFTGDTLFSLSCGKLFEGTPEQMYSSLQKIVALPDVTKVYCGHEYTLSNSRFALSIEPGNEELQEYAASTADLRNKNTPTVPTTIAREKQCNPFLRTSSPEIKKRLSIPDHFDDARVLEVIRRAKDNF

SEQ ID NO: 15356 - protein, 333 aa, Triticum aestivum
  peptide (1)..(333): Ceres Seq. ID no. 15225096
  misc_feature (90)..(248): Pfam Name: Pfam Description:  Metallo-beta-lactamase superfamily
  misc_feature (1)..(333): NCBI GI NO: 16209608 NR Description: glyoxalase II [Oryza sativa]
  misc_feature (1)..(333): NCBI GI NO: 21070362 NR Description: glyoxalase II [Pennisetum glaucum]
  misc_feature (1)..(333): NCBI GI NO: 28143946 NR Description: glyoxalase II [Brassica juncea]
  misc_feature (1)..(333): NCBI GI NO: 18390616 NR Description: glyoxalase II, putative
  misc_feature (1)..(333): NCBI GI NO: 30679573 NR Description: glyoxalase II, putative
  misc_feature (26)..(333): NCBI GI NO: 25406895 NR Description: hypothetical protein
  misc_feature (1)..(333): NCBI GI NO: 15224661 NR Description: glyoxalase II, putative
  misc_feature (1)..(333): NCBI GI NO: 30684920 NR Description: glyoxalase II, putative
  misc_feature (1)..(333): NCBI GI NO: 18406237 NR Description: glyoxalase II
  misc_feature (1)..(333): NCBI GI NO: 2570340 NR Description: glyoxalase II mitochondrial isozyme
MFSKACSLVVSSLPRCSSSAPAIRGQPSLIPRVSRKWLGKPLMYGIGTLLVMPLRTIHGVGRMFGAARYLCNMTSVSSSLQIELVPCLQDNYAYILHDVDTGTVGVVDPSEAVPIINALEKRNQNLTYILNTHHHYDHTGGNLELKAKYGAKVIGSEKDKDRIPGIDITLSEGDTWMFAGHQVLVMETPGHTSGHVSFYFPGSGAIFTGDTLFSLSCGKLFEGTPEQMYSSLQKIVALPDVTKVYCGHEYTLSNSRFALSIEPGNEELQEYAASTADLRNKNTPTVPTTIAREKQCNPFLRTSSPEIKKRLSIPDHFDDARVLEVIRRAKDNF

SEQ ID NO: 15357 - DNA, 1582 bp, Triticum aestivum
  misc_feature (1)..(1582): Ceres Seq. ID no. 14303165
atttcgagacaattatgctgtgctggtccgtcgcactcgcacggaagaaaaggcccggagcgcagagacggccaaatgagttgctcataattccgtctcgctgctggttcgtttagcgccattctcccaggctgctacgaaactcagggccgcgtccgcgtcaatggcttcttgctgctgcccaatcattgcctggttcgtctctttcctcctcgtcttccccgtcctcgtctcctccgcgacggcgggcaatggcagcacattcggggaggagcagctcgggctccggcggatgaaggcccggctcgccagggtcagggaagcctctgtcaagacgatccagagccccgacggcgacgtcatagactgcgtgccctctcacctgcagcccgcgttcgatcatcccaggctgagaggccagaaaccagaggacgaacctgcggcgcggccagggaatgccggcgccgtggcagacgacgaggaggaggtcttgccgcagacgtggaggagctccggcgagtggtgccccaaggggacgataccggttaggcgggcgacggagggcgacctgctcagggccagctccgtccggaggttcgggatgaagccccggagtgccgcggcacggcgggactccaccagcaacggccatgagcacgcggtggggtacgtgagcggcgggcagttctacggcgccaaggcgagcctgaacgtgtggccggcgcacgtgtcgtcgccggcggagttcagcctgtcccagatctgggtcatctccggctccttcggcaacgacctcaacaccatcgaggccggctggcaggtcagccctgagctgtacggggacaacagccccaggttcttcacctactggaccaacgacgcgtaccaggagacggggtgctacaacctgcactgcgcggggttcgtgcagaccaacggccgggtggtgatcggcgccgccatcacgccggtgtcggcctacggcggccggcagttcgacatcacgctcatgatctggaaggaccccaagaagggcaactggtggctgcagctgggcccgtcgggcgcgctcgtgggctactggccgtcctccctcttcacccacctgggcgcgcgcggccgcggcggcgccgacatggtgcagttcggcggcgaggcggtcaacacgcggccgtccgggtcgcacacgcccacgcagatgggcagcggccggttccccggcgaagggtacggccgcgcggcctacttccggaacgtgcaggtcgtggactgggacaacaacctcatcccggcggccgggctacggctcctcgccgaccacccggggtgctacgacatcgccggcggccagggcggcgcgtggggcagctacttctactacggcgggcctggcaggaacgtccggtgcccctagaaccgatactgcttactcaggccacagatgctaattccagcaaaattaatataccacaaaagtctttagttataatttctttgcatgcatgcttgtttatgatcatagatagagtttttttgcactcgaatttatttgaaaggagggacattgactcgcattgcacgc

SEQ ID NO: 15358 - protein, 416 aa, Triticum aestivum
  peptide (1)..(416): Ceres Seq. ID no. 14303166
  misc_feature (175)..(375): Pfam Name: Pfam Description:  Arabidopsis proteins of unknown function
  misc_feature (165)..(416): NCBI GI NO: 15528706 NR Description: P0583G08.7
  misc_feature (22)..(164): NCBI GI NO: 15528706 NR Description: P0583G08.7
  misc_feature (1)..(416): NCBI GI NO: 21389708 NR Description: putative carboxyl-terminal proteinase
  misc_feature (1)..(416): NCBI GI NO: 15240622 NR Description: expressed protein [Arabidopsis thaliana]
  misc_feature (12)..(416): NCBI GI NO: 30688348 NR Description: expressed protein [Arabidopsis thaliana]
  misc_feature (24)..(416): NCBI GI NO: 25345697 NR Description: unknown protein F5A18.27
  misc_feature (24)..(416): NCBI GI NO: 30698726 NR Description: expressed protein [Arabidopsis thaliana]
  misc_feature (24)..(416): NCBI GI NO: 28416687 NR Description: At1g70550 [Arabidopsis thaliana]
  misc_feature (3)..(416): NCBI GI NO: 15220207 NR Description: expressed protein [Arabidopsis thaliana]
  misc_feature (118)..(416): NCBI GI NO: 6573746 NR Description: F20B24.18 [Arabidopsis thaliana]
MASCCCPIIAWFVSFLLVFPVLVSSATAGNGSTFGEEQLGLRRMKARLARVREASVKTIQSPDGDVIDCVPSHLQPAFDHPRLRGQKPEDEPAARPGNAGAVADDEEEVLPQTWRSSGEWCPKGTIPVRRATEGDLLRASSVRRFGMKPRSAAARRDSTSNGHEHAVGYVSGGQFYGAKASLNVWPAHVSSPAEFSLSQIWVISGSFGNDLNTIEAGWQVSPELYGDNSPRFFTYWTNDAYQETGCYNLHCAGFVQTNGRVVIGAAITPVSAYGGRQFDITLMIWKDPKKGNWWLQLGPSGALVGYWPSSLFTHLGARGRGGADMVQFGGEAVNTRPSGSHTPTQMGSGRFPGEGYGRAAYFRNVQVVDWDNNLIPAAGLRLLADHPGCYDIAGGQGGAWGSYFYYGGPGRNVRCP

SEQ ID NO: 15359 - protein, 373 aa, Triticum aestivum
  peptide (1)..(373): Ceres Seq. ID no. 14303167
  misc_feature (132)..(332): Pfam Name: Pfam Description:  Arabidopsis proteins of unknown function
  misc_feature (122)..(373): NCBI GI NO: 15528706 NR Description: P0583G08.7
  misc_feature (1)..(121): NCBI GI NO: 15528706 NR Description: P0583G08.7
  misc_feature (1)..(373): NCBI GI NO: 21389708 NR Description: putative carboxyl-terminal proteinase
  misc_feature (1)..(373): NCBI GI NO: 15240622 NR Description: expressed protein [Arabidopsis thaliana]
  misc_feature (1)..(373): NCBI GI NO: 30688348 NR Description: expressed protein [Arabidopsis thaliana]
  misc_feature (1)..(373): NCBI GI NO: 25345697 NR Description: unknown protein F5A18.27
  misc_feature (1)..(373): NCBI GI NO: 30698726 NR Description: expressed protein [Arabidopsis thaliana]
  misc_feature (1)..(373): NCBI GI NO: 28416687 NR Description: At1g70550 [Arabidopsis thaliana]
  misc_feature (1)..(373): NCBI GI NO: 15220207 NR Description: expressed protein [Arabidopsis thaliana]
  misc_feature (75)..(373): NCBI GI NO: 6573746 NR Description: F20B24.18 [Arabidopsis thaliana]
MKARLARVREASVKTIQSPDGDVIDCVPSHLQPAFDHPRLRGQKPEDEPAARPGNAGAVADDEEEVLPQTWRSSGEWCPKGTIPVRRATEGDLLRASSVRRFGMKPRSAAARRDSTSNGHEHAVGYVSGGQFYGAKASLNVWPAHVSSPAEFSLSQIWVISGSFGNDLNTIEAGWQVSPELYGDNSPRFFTYWTNDAYQETGCYNLHCAGFVQTNGRVVIGAAITPVSAYGGRQFDITLMIWKDPKKGNWWLQLGPSGALVGYWPSSLFTHLGARGRGGADMVQFGGEAVNTRPSGSHTPTQMGSGRFPGEGYGRAAYFRNVQVVDWDNNLIPAAGLRLLADHPGCYDIAGGQGGAWGSYFYYGGPGRNVRCP

SEQ ID NO: 15360 - protein, 270 aa, Triticum aestivum
  peptide (1)..(270): Ceres Seq. ID no. 14303168
  misc_feature (29)..(229): Pfam Name: Pfam Description:  Arabidopsis proteins of unknown function
  misc_feature (19)..(270): NCBI GI NO: 15528706 NR Description: P0583G08.7
  misc_feature (1)..(18): NCBI GI NO: 15528706 NR Description: P0583G08.7
  misc_feature (1)..(270): NCBI GI NO: 21389708 NR Description: putative carboxyl-terminal proteinase
  misc_feature (1)..(270): NCBI GI NO: 15240622 NR Description: expressed protein [Arabidopsis thaliana]
  misc_feature (1)..(270): NCBI GI NO: 30688348 NR Description: expressed protein [Arabidopsis thaliana]
  misc_feature (1)..(270): NCBI GI NO: 25345697 NR Description: unknown protein F5A18.27
  misc_feature (1)..(270): NCBI GI NO: 30698726 NR Description: expressed protein [Arabidopsis thaliana]
  misc_feature (1)..(270): NCBI GI NO: 28416687 NR Description: At1g70550 [Arabidopsis thaliana]
  misc_feature (1)..(270): NCBI GI NO: 15220207 NR Description: expressed protein [Arabidopsis thaliana]
  misc_feature (1)..(270): NCBI GI NO: 6573746 NR Description: F20B24.18 [Arabidopsis thaliana]
MKPRSAAARRDSTSNGHEHAVGYVSGGQFYGAKASLNVWPAHVSSPAEFSLSQIWVISGSFGNDLNTIEAGWQVSPELYGDNSPRFFTYWTNDAYQETGCYNLHCAGFVQTNGRVVIGAAITPVSAYGGRQFDITLMIWKDPKKGNWWLQLGPSGALVGYWPSSLFTHLGARGRGGADMVQFGGEAVNTRPSGSHTPTQMGSGRFPGEGYGRAAYFRNVQVVDWDNNLIPAAGLRLLADHPGCYDIAGGQGGAWGSYFYYGGPGRNVRCP

SEQ ID NO: 15361 - DNA, 1157 bp, Triticum aestivum
  misc_feature (1)..(1157): Ceres Seq. ID no. 12617447
tccctaaaatcttccccaaaacccccattgctccgcgatgagacccgcagcaacagcggtagcagccaccgccgccgcgctccgagccgcgttcctcgcccctcccgctgccgccttccgcctcctccctccccgccgtgtcttcctcctccccctgcaccgcctctcctcctcctcgtccccggtcgcccctccttgcgccgcttcctccgactcccagccgccgccgttgcctgccttcatggacgcgcagttcgagtccttccgggcgcagctcgatggctcctccgccctccgcgaccgcatccgcgccgtcgtctccgaggtcgagtcagcctcccgggccgcctccgctgcgctcctcctcatccaccagcccgtccccctatctgatgtgctcggcaaggcgaaggcgcaggtggaggtgatcaaggggctgtactctcagctcgcggagatcctcaaagagtgccccggtcagtactacaggtaccatggggactggaagagtgagacacagtctgtggtgtcgatgctagcgttcacgcactggctcgagactggtggcctgctcacgcacgccgaggcccaggaaaagctaggattgggttctggggagtttggcctggacgttgaagactacctgactggattgtgcttcatgtccaatgattttcctagatatgtagtgaatcgggtcacggcgggtgactacgactgcccacggaaggtgctaagctttttgactgatctgcatgcttcatttaggatgctgaatctgcgcaatgacttcttgcgtaagaaatttgatgggatgaagtatgatttgagaagggtggaggaagtattttatgatgtgaagatacgcggacttgtccctggggagtcaaagcaggaggttgctcagtcatagacggtgagcggtgccgtaccatttacttgcaatcgacagctgtcatgtgttgtcgtcgttaccgatgatgtttatgttggaccgatggttcctagaaaaagctcatgctgtgaggatctctttttttgactgtagcatcgctttaagttcggcactttttcggacccacctagaggttggaaaatgacatgagaattattctgttgcaaaaaaaaaaaaaaaaaagcttatcgataccgtcgac

SEQ ID NO: 15362 - protein, 291 aa, Triticum aestivum
  peptide (1)..(291): Ceres Seq. ID no. 12617448
  misc_feature (84)..(279): Pfam Name: Pfam Description:  Translin family
  misc_feature (1)..(289): NCBI GI NO: 37534782 NR Description: translin-like protein
  misc_feature (69)..(282): NCBI GI NO: 18404301 NR Description: translin-like protein; protein id: At2g37020
  misc_feature (69)..(219): NCBI GI NO: 25408524 NR Description: translin-like protein
  misc_feature (73)..(287): NCBI GI NO: 20129859 NR Description: CG11761-PA [Drosophila melanogaster]
  misc_feature (197)..(282): NCBI GI NO: 25408524 NR Description: translin-like protein
  misc_feature (73)..(287): NCBI GI NO: 7648677 NR Description: translin [Xenopus laevis]
  misc_feature (69)..(279): NCBI GI NO: 6136058 NR Description: Translin
  misc_feature (73)..(278): NCBI GI NO: 6755899 NR Description: translin; testis/brain-RNA-binding protein
  misc_feature (73)..(278): NCBI GI NO: 21730459 NR Description: Chain A
  misc_feature (73)..(278): NCBI GI NO: 4759270 NR Description: translin
MRPAATAVAATAAALRAAFLAPPAAAFRLLPPRRVFLLPLHRLSSSSSPVAPPCAASSDSQPPPLPAFMDAQFESFRAQLDGSSALRDRIRAVVSEVESASRAASAALLLIHQPVPLSDVLGKAKAQVEVIKGLYSQLAEILKECPGQYYRYHGDWKSETQSVVSMLAFTHWLETGGLLTHAEAQEKLGLGSGEFGLDVEDYLTGLCFMSNDFPRYVVNRVTAGDYDCPRKVLSFLTDLHASFRMLNLRNDFLRKKFDGMKYDLRRVEEVFYDVKIRGLVPGESKQEVAQS

SEQ ID NO: 15363 - protein, 223 aa, Triticum aestivum
  peptide (1)..(223): Ceres Seq. ID no. 12617449
  misc_feature (16)..(211): Pfam Name: Pfam Description:  Translin family
  misc_feature (1)..(221): NCBI GI NO: 37534782 NR Description: translin-like protein
  misc_feature (1)..(214): NCBI GI NO: 18404301 NR Description: translin-like protein; protein id: At2g37020
  misc_feature (1)..(151): NCBI GI NO: 25408524 NR Description: translin-like protein
  misc_feature (5)..(219): NCBI GI NO: 20129859 NR Description: CG11761-PA [Drosophila melanogaster]
  misc_feature (129)..(214): NCBI GI NO: 25408524 NR Description: translin-like protein
  misc_feature (5)..(219): NCBI GI NO: 7648677 NR Description: translin [Xenopus laevis]
  misc_feature (1)..(211): NCBI GI NO: 6136058 NR Description: Translin
  misc_feature (5)..(210): NCBI GI NO: 6755899 NR Description: translin; testis/brain-RNA-binding protein
  misc_feature (5)..(210): NCBI GI NO: 21730459 NR Description: Chain A
  misc_feature (5)..(210): NCBI GI NO: 4759270 NR Description: translin
MDAQFESFRAQLDGSSALRDRIRAVVSEVESASRAASAALLLIHQPVPLSDVLGKAKAQVEVIKGLYSQLAEILKECPGQYYRYHGDWKSETQSVVSMLAFTHWLETGGLLTHAEAQEKLGLGSGEFGLDVEDYLTGLCFMSNDFPRYVVNRVTAGDYDCPRKVLSFLTDLHASFRMLNLRNDFLRKKFDGMKYDLRRVEEVFYDVKIRGLVPGESKQEVAQS

SEQ ID NO: 15364 - DNA, 1583 bp, Triticum aestivum
  misc_feature (1)..(1583): Ceres Seq. ID no. 13655915
gtgtgcttgccagcagtttgttgctcttcctcctccgccgccgctggaatggcactgccaaacatggccggcgacgccctcagggtagtcgacctcccgggccgcggccgcgcgctcctcgccgcccgcgacatcctcgagggcgaggtgctcctgtcggagtcgcccatcctcctctacccgtcctcgctcgcctccctctcctcctactgctccgcctgcttccgctcgctcccaccgccgccccacaccccctgcccttcctgccgcgccgccgccttctgctcccctgcctgcgccgccgcctcccacccgcgcctcctctgcgccgcgctctccagcggcctcgccgccgcccccgaggcgcaacaggagcccctcctcttcctcctctcggcctactcgctccaggagccctctctcagcgccatcctctctctctcctcggcaccctctccgacccagcagcaagacgccgcgggcctccacgccgcggtggcgtcggtggcgccgccgcacacgctgcccgcgggcttctcgctggacctcacggtggctctcctctccaaggaccggaccaacagcttctcgatcctggagccataccgccccgacgtgccgctggaggtccgcaaggcgcggtgctgcgcggtgtaccctcgcgcgtcactgctcaaccacgactgcctgcccaatgcttgccacttcgattatgccgacaggccggggccagggaacacggacatcgtcgtgcgctctctccatggtataacagaggggaaggaggtttgcatcagctatttcgcggccaattggaggtatgctgacaggcaacgcaggctgctggaggattatgggttccggtgtgagtgtgatcggtgtcagattgagagcaagtggaagtttgatgatgataatgatggtgctgatggggatgacaccatggaagaggagcatggcaaggaggtcgctgaagatggcggtgatgaggggatggagcaggaggaagggagtgacgacgatgacgacgatttcccgcatgccttcttctttgtgaggtatctgtgtgatcgtgaggactgctatggcatgcttgcgccgctgccacccttaccgaacggtgagctgtcccatgtatttgagtgcaatgcctgtgggcaactgaagaaggaggaagacgaggatgagcctgatgctggtgattgcagcatggaccagtaggatgtttgctgctgttttttgggagcacttggtggatggtgatgaaatggatgcaccggtcggcttccgtactttggggctgtttgccttgaagaactggtctaatgcacctgaagtcaggaagacgtatgttgtactgcatgatttcgttcactgaatgtgatttgtaggcaaccttgcctggacctgtacaattattattacgcctatatctatcttggccatgtgaacctggtgtggcgttaggaactgacagtgcaaagtccactcgtcagcgtatggattattgcccctctgtttatcttgcctttgacctgcatcattgcccgttcgttcaggttataaaaatcatctttctttgt

SEQ ID NO: 15365 - protein, 406 aa, Triticum aestivum
  peptide (1)..(406): Ceres Seq. ID no. 13655916
  misc_feature (27)..(275): Pfam Name: Pfam Description:  SET domain
  misc_feature (22)..(404): NCBI GI NO: 40253403 NR Description: SET-domain transcriptional regulator-like protein
  misc_feature (98)..(404): NCBI GI NO: 40253402 NR Description: SET-domain transcriptional regulator-like protein
  misc_feature (27)..(392): NCBI GI NO: 30680748 NR Description: SET-domain transcriptional regulator family
  misc_feature (27)..(329): NCBI GI NO: 18399103 NR Description: SET-domain transcriptional regulator family
  misc_feature (22)..(139): NCBI GI NO: 40253402 NR Description: SET-domain transcriptional regulator-like protein
  misc_feature (22)..(299): NCBI GI NO: 22450579 NR Description: unknown protein,3'-partial
  misc_feature (303)..(344): NCBI GI NO: 4154097 NR Description: unknown [Human herpesvirus 8]
  misc_feature (303)..(344): NCBI GI NO: 4154097 NR Description: unknown [Human herpesvirus 8]
  misc_feature (218)..(294): NCBI GI NO: 7486993 NR Description: probable SET-domain transcription regulator
  misc_feature (27)..(99): NCBI GI NO: 7486993 NR Description: probable SET-domain transcription regulator
VCLPAVCCSSSSAAAGMALPNMAGDALRVVDLPGRGRALLAARDILEGEVLLSESPILLYPSSLASLSSYCSACFRSLPPPPHTPCPSCRAAAFCSPACAAASHPRLLCAALSSGLAAAPEAQQEPLLFLLSAYSLQEPSLSAILSLSSAPSPTQQQDAAGLHAAVASVAPPHTLPAGFSLDLTVALLSKDRTNSFSILEPYRPDVPLEVRKARCCAVYPRASLLNHDCLPNACHFDYADRPGPGNTDIVVRSLHGITEGKEVCISYFAANWRYADRQRRLLEDYGFRCECDRCQIESKWKFDDDNDGADGDDTMEEEHGKEVAEDGGDEGMEQEEGSDDDDDDFPHAFFFVRYLCDREDCYGMLAPLPPLPNGELSHVFECNACGQLKKEEDEDEPDAGDCSMDQ

SEQ ID NO: 15366 - protein, 390 aa, Triticum aestivum
  peptide (1)..(390): Ceres Seq. ID no. 13655917
  misc_feature (11)..(259): Pfam Name: Pfam Description:  SET domain
  misc_feature (6)..(388): NCBI GI NO: 40253403 NR Description: SET-domain transcriptional regulator-like protein
  misc_feature (82)..(388): NCBI GI NO: 40253402 NR Description: SET-domain transcriptional regulator-like protein
  misc_feature (11)..(376): NCBI GI NO: 30680748 NR Description: SET-domain transcriptional regulator family
  misc_feature (11)..(313): NCBI GI NO: 18399103 NR Description: SET-domain transcriptional regulator family
  misc_feature (6)..(123): NCBI GI NO: 40253402 NR Description: SET-domain transcriptional regulator-like protein
  misc_feature (6)..(283): NCBI GI NO: 22450579 NR Description: unknown protein,3'-partial
  misc_feature (287)..(328): NCBI GI NO: 4154097 NR Description: unknown [Human herpesvirus 8]
  misc_feature (287)..(328): NCBI GI NO: 4154097 NR Description: unknown [Human herpesvirus 8]
  misc_feature (202)..(278): NCBI GI NO: 7486993 NR Description: probable SET-domain transcription regulator
  misc_feature (11)..(83): NCBI GI NO: 7486993 NR Description: probable SET-domain transcription regulator
MALPNMAGDALRVVDLPGRGRALLAARDILEGEVLLSESPILLYPSSLASLSSYCSACFRSLPPPPHTPCPSCRAAAFCSPACAAASHPRLLCAALSSGLAAAPEAQQEPLLFLLSAYSLQEPSLSAILSLSSAPSPTQQQDAAGLHAAVASVAPPHTLPAGFSLDLTVALLSKDRTNSFSILEPYRPDVPLEVRKARCCAVYPRASLLNHDCLPNACHFDYADRPGPGNTDIVVRSLHGITEGKEVCISYFAANWRYADRQRRLLEDYGFRCECDRCQIESKWKFDDDNDGADGDDTMEEEHGKEVAEDGGDEGMEQEEGSDDDDDDFPHAFFFVRYLCDREDCYGMLAPLPPLPNGELSHVFECNACGQLKKEEDEDEPDAGDCSMDQ

SEQ ID NO: 15367 - protein, 385 aa, Triticum aestivum
  peptide (1)..(385): Ceres Seq. ID no. 13655918
  misc_feature (6)..(254): Pfam Name: Pfam Description:  SET domain
  misc_feature (1)..(383): NCBI GI NO: 40253403 NR Description: SET-domain transcriptional regulator-like protein
  misc_feature (77)..(383): NCBI GI NO: 40253402 NR Description: SET-domain transcriptional regulator-like protein
  misc_feature (6)..(371): NCBI GI NO: 30680748 NR Description: SET-domain transcriptional regulator family
  misc_feature (6)..(308): NCBI GI NO: 18399103 NR Description: SET-domain transcriptional regulator family
  misc_feature (1)..(118): NCBI GI NO: 40253402 NR Description: SET-domain transcriptional regulator-like protein
  misc_feature (1)..(278): NCBI GI NO: 22450579 NR Description: unknown protein,3'-partial
  misc_feature (282)..(323): NCBI GI NO: 4154097 NR Description: unknown [Human herpesvirus 8]
  misc_feature (282)..(323): NCBI GI NO: 4154097 NR Description: unknown [Human herpesvirus 8]
  misc_feature (197)..(273): NCBI GI NO: 7486993 NR Description: probable SET-domain transcription regulator
  misc_feature (6)..(78): NCBI GI NO: 7486993 NR Description: probable SET-domain transcription regulator
MAGDALRVVDLPGRGRALLAARDILEGEVLLSESPILLYPSSLASLSSYCSACFRSLPPPPHTPCPSCRAAAFCSPACAAASHPRLLCAALSSGLAAAPEAQQEPLLFLLSAYSLQEPSLSAILSLSSAPSPTQQQDAAGLHAAVASVAPPHTLPAGFSLDLTVALLSKDRTNSFSILEPYRPDVPLEVRKARCCAVYPRASLLNHDCLPNACHFDYADRPGPGNTDIVVRSLHGITEGKEVCISYFAANWRYADRQRRLLEDYGFRCECDRCQIESKWKFDDDNDGADGDDTMEEEHGKEVAEDGGDEGMEQEEGSDDDDDDFPHAFFFVRYLCDREDCYGMLAPLPPLPNGELSHVFECNACGQLKKEEDEDEPDAGDCSMDQ

SEQ ID NO: 15368 - DNA, 1277 bp, Triticum aestivum
  misc_feature (1)..(1277): Ceres Seq. ID no. 13585433
aacatcctaatcgaaaagaaagaaaaaaaaaactcctactagggaatctgctccgggcgcacgccggccggatcgccggcctcccgccgtcggcgcaccccaggaagagagatcggctcggctcatctgaggatttgcggagggcggccatggagggggcggaagctcctctccccgtccccacggagaagctctccatggatccaaatcgggatggggggaatcgaggtggtgtggtgctggtggccaccggcagcttcaatccccccacctacatgcacctgcgcatgttcgagcttgcaaaggacgagctgcagcagcgagggtactgtgttttgggtggatacatgtcgccggtgaacgacgcctacaagaagaaggacctcttgccggctgctcaccgggttcgcctctgcgaattggcgtgccgaagctcatctttcgtgatggttgatccctgggaggcaatgcagaaaggttatcagcgcaccttgaccgttctatctcgagttaagaactctctatgcaaggatggcttagctgatcaaggtggtgtcaaggtaatgcttttgtgtggttctgaccttctcgagtcattcagcacgccaggggtttggattccagatcaggtcagggccatatgtaaagactttggtgttgtctgtattcgtagggaaggaaaagatgttcaaaagctaatatccagcagcgagacactgcaagaatgcagggataacatcatttcggttgatgagattgtgccaaatcagatcagttcatccagagtaagagaatgtataagaaaacatctctcgataaagtatcttacttgcgacgaagtaatcgggtacattagagagcacagactgtacatggaaactggagagagtgataccagatcatgacaatgttgcaagcctttcggaacgaccgtcgagcatggactgtgccgccttgggcttcaatgttatgataaaatctgaactatcagcgacaagctgcgattatcatgaatgggtccgactgcctttgaagcatcatgaatggatgcaaatgtatggagaccagtaggctatacacaatacttgctactagaaggttcttgaatcttccttacattgttgtcaatgtatcggtctttcgaccaacagaatatatcgctaataaagcatttatatgacatgaaactctttgtcacagtaatattctgccatttgtttcatcctctatatgtaccaagatattattcagtaagtaatttgatgtgctacaaattc

SEQ ID NO: 15369 - protein, 300 aa, Triticum aestivum
  peptide (1)..(300): Ceres Seq. ID no. 13585434
  misc_feature (137)..(292): NCBI GI NO: 22327861 NR Description: nicotinamide-nucleotide adenylyltransferase
  misc_feature (45)..(295): NCBI GI NO: 6323360 NR Description: NAD(+) salvage pathway; Nma1p
  misc_feature (45)..(295): NCBI GI NO: 6321447 NR Description: NAD(+) salvage pathway; Nma2p
  misc_feature (186)..(300): NCBI GI NO: 20070321 NR Description: nicotinamide nucleotide adenylyltransferase 1
  misc_feature (78)..(174): NCBI GI NO: 20070321 NR Description: nicotinamide nucleotide adenylyltransferase 1
  misc_feature (186)..(300): NCBI GI NO: 18652051 NR Description: nicotinamide mononucleotide adenylyl transferase
  misc_feature (78)..(174): NCBI GI NO: 18652051 NR Description: nicotinamide mononucleotide adenylyl transferase
  misc_feature (186)..(300): NCBI GI NO: 21730493 NR Description: Chain A
  misc_feature (78)..(174): NCBI GI NO: 21730493 NR Description: Chain A
  misc_feature (186)..(300): NCBI GI NO: 10438792 NR Description: unnamed protein product [Homo sapiens]
HPNRKERKKKLLLGNLLRAHAGRIAGLPPSAHPRKRDRLGSSEDLRRAAMEGAEAPLPVPTEKLSMDPNRDGGNRGGVVLVATGSFNPPTYMHLRMFELAKDELQQRGYCVLGGYMSPVNDAYKKKDLLPAAHRVRLCELACRSSSFVMVDPWEAMQKGYQRTLTVLSRVKNSLCKDGLADQGGVKVMLLCGSDLLESFSTPGVWIPDQVRAICKDFGVVCIRREGKDVQKLISSSETLQECRDNIISVDEIVPNQISSSRVRECIRKHLSIKYLTCDEVIGYIREHRLYMETGESDTRS

SEQ ID NO: 15370 - protein, 251 aa, Triticum aestivum
  peptide (1)..(251): Ceres Seq. ID no. 13585435
  misc_feature (88)..(243): NCBI GI NO: 22327861 NR Description: nicotinamide-nucleotide adenylyltransferase
  misc_feature (1)..(246): NCBI GI NO: 6323360 NR Description: NAD(+) salvage pathway; Nma1p
  misc_feature (1)..(246): NCBI GI NO: 6321447 NR Description: NAD(+) salvage pathway; Nma2p
  misc_feature (137)..(251): NCBI GI NO: 20070321 NR Description: nicotinamide nucleotide adenylyltransferase 1
  misc_feature (29)..(125): NCBI GI NO: 20070321 NR Description: nicotinamide nucleotide adenylyltransferase 1
  misc_feature (137)..(251): NCBI GI NO: 18652051 NR Description: nicotinamide mononucleotide adenylyl transferase
  misc_feature (29)..(125): NCBI GI NO: 18652051 NR Description: nicotinamide mononucleotide adenylyl transferase
  misc_feature (137)..(251): NCBI GI NO: 21730493 NR Description: Chain A
  misc_feature (29)..(125): NCBI GI NO: 21730493 NR Description: Chain A
  misc_feature (137)..(251): NCBI GI NO: 10438792 NR Description: unnamed protein product [Homo sapiens]
MEGAEAPLPVPTEKLSMDPNRDGGNRGGVVLVATGSFNPPTYMHLRMFELAKDELQQRGYCVLGGYMSPVNDAYKKKDLLPAAHRVRLCELACRSSSFVMVDPWEAMQKGYQRTLTVLSRVKNSLCKDGLADQGGVKVMLLCGSDLLESFSTPGVWIPDQVRAICKDFGVVCIRREGKDVQKLISSSETLQECRDNIISVDEIVPNQISSSRVRECIRKHLSIKYLTCDEVIGYIREHRLYMETGESDTRS

SEQ ID NO: 15371 - protein, 235 aa, Triticum aestivum
  peptide (1)..(235): Ceres Seq. ID no. 13585436
  misc_feature (72)..(227): NCBI GI NO: 22327861 NR Description: nicotinamide-nucleotide adenylyltransferase
  misc_feature (1)..(230): NCBI GI NO: 6323360 NR Description: NAD(+) salvage pathway; Nma1p
  misc_feature (1)..(230): NCBI GI NO: 6321447 NR Description: NAD(+) salvage pathway; Nma2p
  misc_feature (121)..(235): NCBI GI NO: 20070321 NR Description: nicotinamide nucleotide adenylyltransferase 1
  misc_feature (13)..(109): NCBI GI NO: 20070321 NR Description: nicotinamide nucleotide adenylyltransferase 1
  misc_feature (121)..(235): NCBI GI NO: 18652051 NR Description: nicotinamide mononucleotide adenylyl transferase
  misc_feature (13)..(109): NCBI GI NO: 18652051 NR Description: nicotinamide mononucleotide adenylyl transferase
  misc_feature (121)..(235): NCBI GI NO: 21730493 NR Description: Chain A
  misc_feature (13)..(109): NCBI GI NO: 21730493 NR Description: Chain A
  misc_feature (121)..(235): NCBI GI NO: 10438792 NR Description: unnamed protein product [Homo sapiens]
MDPNRDGGNRGGVVLVATGSFNPPTYMHLRMFELAKDELQQRGYCVLGGYMSPVNDAYKKKDLLPAAHRVRLCELACRSSSFVMVDPWEAMQKGYQRTLTVLSRVKNSLCKDGLADQGGVKVMLLCGSDLLESFSTPGVWIPDQVRAICKDFGVVCIRREGKDVQKLISSSETLQECRDNIISVDEIVPNQISSSRVRECIRKHLSIKYLTCDEVIGYIREHRLYMETGESDTRS

SEQ ID NO: 15372 - DNA, 1706 bp, Triticum aestivum
  misc_feature (1)..(1706): Ceres Seq. ID no. 12521308
cccgagaagcagccacccaccccgacctccaccttgacggcgcccgccgccggcgtcgccgttcccaaatcgacgcgaccgaggaggccgtcgaaatggccggccgccgccgcagccgatcccgaatccacaccagcgacgacgacgacggggcgacccgtcccagccgccgccgccgccgcgcggaggtggctgtccctctgccggacggcggcgataccctgtcggagtcgctgcaggacgacagcagacctcctcctgcgccatcggagtcgctgccgttgccgttggacatgctttggaagatcctcctccttctgccaccgcagccgtcctcccgcctccgcgcatccgccgtctcccggcgctggcgaggcgtcgccaccgaccccaactttaaaagccagttccgtgtccaccgcaggaactgcaagccgccacccattctcggattatttgtgcgccgatggaagatggagttcaggcagggcttcctccacccttccgaccgtgtccctgccgagcgcttctccatcccgtcccgctacgacatccgtgggtgccgacatggtcgtgtgctcgctgtacaccgtgagtatgcaaagcttcttgtgtttgccccactctctggcgaggtgtgcaccctgtccgttcccgatgagttcaggccaccgtcttgcttccacctcaatggggcggtgctctgtgatgccaacgaccacgggccatgttcatggcatgtgccaccagagccccttcaaggtggtattgctttcaaggtattctatggaagatcgattcattacctctgtttactcgtcaaggtccaaaaaatggagtgtcgtcgtttcaaaagaggctccatgctccgttgattctgacgttccggcgatcctggttaataatcgactctactggctgctttcgtctaaagcccgtggtctccttgagtttgatttggataggcagagcctaactgtgatcgagtggcctactagtatgattgattccggaagccatgggatgatcaaaacagaggaaggcgcagttggcttggtcaggttttcattcccgagcctagaaatatggcagaggaagatcaatcagggtgttgccacgtggttggatccaaggatagttgatatgcataacgttcttgggatcccccctcagattggtaggagaagatggccatgcagtttgagaggctatgaggaggaaaaccatgtgatcattctgtatgttgatgatagtgcctacatggttgatcttaagtcaatgcaatccacaaaacttgatggaagccgttcgatgaatcgctgtcaccctttcaccagtttctatccaccagacatggccatataagaagcgccgatataggaacatggacacgaggatacgggcacagatacaaaagcattttccagaaacagccatacggcgacacggcgagtatatacataaataaataaagtacaacatgtattgttgtgaggacaagagtatatttgtaagatgtaaggtcaaagtactgcccatttgttttccgctttcagttccacgtttgtatatggctgagcttaatgcagctgattctgcaagtatatgtgagtgaaaaattcaggaaagggaaaatataatacagcatgtaatatggacataattatatttgtaagatgtgggatcaagtcttgattctgtcatgg

SEQ ID NO: 15373 - protein, 454 aa, Triticum aestivum
  peptide (1)..(454): Ceres Seq. ID no. 12521309
  misc_feature (252)..(448): NCBI GI NO: 37530914 NR Description: unknown protein
  misc_feature (242)..(448): NCBI GI NO: 37530912 NR Description: hypothetical protein
  misc_feature (271)..(447): NCBI GI NO: 37530924 NR Description: unknown protein
  misc_feature (217)..(448): NCBI GI NO: 37530900 NR Description: hypothetical protein
  misc_feature (248)..(451): NCBI GI NO: 37531024 NR Description: hypothetical protein
  misc_feature (263)..(453): NCBI GI NO: 37530898 NR Description: hypothetical protein
  misc_feature (217)..(447): NCBI GI NO: 37531214 NR Description: unknown protein
  misc_feature (237)..(282): NCBI GI NO: 37531854 NR Description: hypothetical protein
PEKQPPTPTSTLTAPAAGVAVPKSTRPRRPSKWPAAAAADPESTPATTTTGRPVPAAAAAARRWLSLCRTAAIPCRSRCRTTADLLLRHRSRCRCRWTCFGRSSSFCHRSRPPASAHPPSPGAGEASPPTPTLKASSVSTAGTASRHPFSDYLCADGRWSSGRASSTLPTVSLPSASPSRPATTSVGADMVVCSLYTVSMQSFLCLPHSLARCAPCPFPMSSGHRLASTSMGRCSVMPTTTGHVHGMCHQSPFKVVLLSRYSMEDRFITSVYSSRSKKWSVVVSKEAPCSVDSDVPAILVNNRLYWLLSSKARGLLEFDLDRQSLTVIEWPTSMIDSGSHGMIKTEEGAVGLVRFSFPSLEIWQRKINQGVATWLDPRIVDMHNVLGIPPQIGRRRWPCSLRGYEEENHVIILYVDDSAYMVDLKSMQSTKLDGSRSMNRCHPFTSFYPPDMAI

SEQ ID NO: 15374 - protein, 290 aa, Triticum aestivum
  peptide (1)..(290): Ceres Seq. ID no. 12521310
  misc_feature (87)..(242): NCBI GI NO: 37530914 NR Description: unknown protein
  misc_feature (165)..(239): NCBI GI NO: 37530912 NR Description: hypothetical protein
  misc_feature (83)..(220): NCBI GI NO: 37530924 NR Description: unknown protein
  misc_feature (94)..(220): NCBI GI NO: 37531024 NR Description: hypothetical protein
  misc_feature (84)..(218): NCBI GI NO: 37531214 NR Description: unknown protein
  misc_feature (86)..(249): NCBI GI NO: 37531854 NR Description: hypothetical protein
  misc_feature (86)..(283): NCBI GI NO: 37530900 NR Description: hypothetical protein
  misc_feature (85)..(237): NCBI GI NO: 37530982 NR Description: unknown protein
  misc_feature (74)..(247): NCBI GI NO: 37530944 NR Description: hypothetical protein
  misc_feature (94)..(244): NCBI GI NO: 37530976 NR Description: unknown protein
REAATHPDLHLDGARRRRRRSQIDATEEAVEMAGRRRSRSRIHTSDDDDGATRPSRRRRRAEVAVPLPDGGDTLSESLQDDSRPPPAPSESLPLPLDMLWKILLLLPPQPSSRLRASAVSRRWRGVATDPNFKSQFRVHRRNCKPPPILGLFVRRWKMEFRQGFLHPSDRVPAERFSIPSRYDIRGCRHGRVLAVHREYAKLLVFAPLSGEVCTLSVPDEFRPPSCFHLNGAVLCDANDHGPCSWHVPPEPLQGGIAFKVFYGRSIHYLCLLVKVQKMECRRFKRGSMLR

SEQ ID NO: 15375 - protein, 265 aa, Triticum aestivum
  peptide (1)..(265): Ceres Seq. ID no. 12521311
  misc_feature (63)..(259): NCBI GI NO: 37530914 NR Description: unknown protein
  misc_feature (53)..(259): NCBI GI NO: 37530912 NR Description: hypothetical protein
  misc_feature (82)..(258): NCBI GI NO: 37530924 NR Description: unknown protein
  misc_feature (28)..(259): NCBI GI NO: 37530900 NR Description: hypothetical protein
  misc_feature (59)..(262): NCBI GI NO: 37531024 NR Description: hypothetical protein
  misc_feature (74)..(264): NCBI GI NO: 37530898 NR Description: hypothetical protein
  misc_feature (28)..(258): NCBI GI NO: 37531214 NR Description: unknown protein
  misc_feature (48)..(93): NCBI GI NO: 37531854 NR Description: hypothetical protein
MVVCSLYTVSMQSFLCLPHSLARCAPCPFPMSSGHRLASTSMGRCSVMPTTTGHVHGMCHQSPFKVVLLSRYSMEDRFITSVYSSRSKKWSVVVSKEAPCSVDSDVPAILVNNRLYWLLSSKARGLLEFDLDRQSLTVIEWPTSMIDSGSHGMIKTEEGAVGLVRFSFPSLEIWQRKINQGVATWLDPRIVDMHNVLGIPPQIGRRRWPCSLRGYEEENHVIILYVDDSAYMVDLKSMQSTKLDGSRSMNRCHPFTSFYPPDMAI

SEQ ID NO: 15376 - DNA, 1528 bp, Triticum aestivum
  misc_feature (1)..(1528): Ceres Seq. ID no. 13598547
ctcgcgccgctggcccggcaatttccccactattccctccacaaccgaaaggtcccccccctcccctcaaaaaaaaaaaaaamcccaccccagcgccatggccgccgcctcctccgccgccgccgcctcctccgccgccgccgcccccgccgacacgtacgacatcccgtgggtggagaagtaccgccccagccgcgtcgccgatgtcgtcggcaacgccgacgccgtcagccgcctcgaggtcatcgcccgcgacggcaacatgcccaacctcatcctctccgggcctccggggaccgggaagacgacgagcatcctggcgctcgcccacgagatgctcgggcccagctaccgcgagggagtgctcgagctcaacgcctcggacgacagggggcttgatgtggtgcggaacaagatcaagatgttcgcgcagaagaaggtcacactgccacccggacggcacaagatcgtcatactggacgaagctgacagcatgacaacaggagcacagcaagcactgagaagaaccatggagatttattccaacaccacaagatttgctcttgcatgcaatacttcatctaaaatcattgaacccatccaaagtcgctgcgctattgtccggttctcgaggctttcagatcaggagatccttggccgccttatggtcgtggtggcagctgagaaggtcccttatgtgccagaaggtcttgaagccatcatttttactgctgatggtgacatgaggcaagctttgaacaatttgcaagctacagtcagcgggttccgttttgttaatcaagaaaatgtgttcaaggtatgcgatcaaccacatcccttgcatgtcaagagtatggtgaaaaatgtactcgatgggaagtttgatgaggcctgctctggcctaaagcaactctatgatttgggctactctcctactgacatcatcactaccctcttccgtgtcatcaagaactatgacatggctgaatatctgaagctggaactgctgaaggaaacgggatttgcgcacatgaggatctgtgatggcgttgggtcattccttcagctttctggccttctggccaaatttgctctggtgagagaaacagcaaaggcctaacgctgtgcagctgctctgacaccagttaacagtgttgtcatgcatagcctattttatcgctcctctgtcgtggtatctcagtgtgtaagatagttctttgctgaagtgaactatttatgcttgtttagcatcggagatgtagttgtagcctgtagtgactagtgaggagactgagtcctcgtagttcgagtactgctgtatttcggaactaatctgggtatttttcgggtcttttgtagtctattgagctgtcgtaccaccatcatgaaggaaccgtcagttatccaagtcaactgcatatcaattatggattggcagaaaatggattcatcatttccttgcatttttattttaggtctgaawttttacagtccaactgtctgaatttatgaacasagwtwamgcggg

SEQ ID NO: 15377 - protein, 372 aa, Triticum aestivum
  peptide (1)..(372): Ceres Seq. ID no. 15222366
  misc_feature (90)..(261): Pfam Name: AAA Pfam Description: ATPase family associated with various cellular activities
  misc_feature (40)..(372): NCBI GI NO: 15991286 NR Description: replication factor C 40kDa subunit
  misc_feature (41)..(372): NCBI GI NO: 38344372 NR Description: OSJNBb0032E06.6
  misc_feature (42)..(372): NCBI GI NO: 15221697 NR Description: replication factor -related [Arabidopsis thaliana]
  misc_feature (34)..(370): NCBI GI NO: 1703053 NR Description: Activator 1 40 kDa subunit
  misc_feature (37)..(362): NCBI GI NO: 11177922 NR Description: replication factor C
  misc_feature (35)..(362): NCBI GI NO: 34871892 NR Description: replication factor C 2 (40kD) [Rattus norvegicus]
  misc_feature (37)..(362): NCBI GI NO: 12847419 NR Description: unnamed protein product [Mus musculus]
  misc_feature (34)..(362): NCBI GI NO: 539678 NR Description: replication factor C - human
  misc_feature (22)..(362): NCBI GI NO: 28950096 NR Description: probable REPLICATION FACTOR C (40 KDA SUBUNIT)
  misc_feature (163)..(362): NCBI GI NO: 30584413 NR Description: Homo sapiens replication factor C
  misc_feature (28)..(28): Xaa is any aa, unknown or other
SRRWPGNFPTIPSTTERSPPSPQKKKKXHPSAMAAASSAAAASSAAAAPADTYDIPWVEKYRPSRVADVVGNADAVSRLEVIARDGNMPNLILSGPPGTGKTTSILALAHEMLGPSYREGVLELNASDDRGLDVVRNKIKMFAQKKVTLPPGRHKIVILDEADSMTTGAQQALRRTMEIYSNTTRFALACNTSSKIIEPIQSRCAIVRFSRLSDQEILGRLMVVVAAEKVPYVPEGLEAIIFTADGDMRQALNNLQATVSGFRFVNQENVFKVCDQPHPLHVKSMVKNVLDGKFDEACSGLKQLYDLGYSPTDIITTLFRVIKNYDMAEYLKLELLKETGFAHMRICDGVGSFLQLSGLLAKFALVRETAKA

SEQ ID NO: 15378 - protein, 340 aa, Triticum aestivum
  peptide (1)..(340): Ceres Seq. ID no. 15222367
  misc_feature (58)..(229): Pfam Name: AAA Pfam Description: ATPase family associated with various cellular activities
  misc_feature (8)..(340): NCBI GI NO: 15991286 NR Description: replication factor C 40kDa subunit
  misc_feature (9)..(340): NCBI GI NO: 38344372 NR Description: OSJNBb0032E06.6
  misc_feature (10)..(340): NCBI GI NO: 15221697 NR Description: replication factor -related [Arabidopsis thaliana]
  misc_feature (2)..(338): NCBI GI NO: 1703053 NR Description: Activator 1 40 kDa subunit
  misc_feature (5)..(330): NCBI GI NO: 11177922 NR Description: replication factor C
  misc_feature (3)..(330): NCBI GI NO: 34871892 NR Description: replication factor C 2 (40kD) [Rattus norvegicus]
  misc_feature (5)..(330): NCBI GI NO: 12847419 NR Description: unnamed protein product [Mus musculus]
  misc_feature (2)..(330): NCBI GI NO: 539678 NR Description: replication factor C - human
  misc_feature (1)..(330): NCBI GI NO: 28950096 NR Description: probable REPLICATION FACTOR C (40 KDA SUBUNIT)
  misc_feature (131)..(330): NCBI GI NO: 30584413 NR Description: Homo sapiens replication factor C
MAAASSAAAASSAAAAPADTYDIPWVEKYRPSRVADVVGNADAVSRLEVIARDGNMPNLILSGPPGTGKTTSILALAHEMLGPSYREGVLELNASDDRGLDVVRNKIKMFAQKKVTLPPGRHKIVILDEADSMTTGAQQALRRTMEIYSNTTRFALACNTSSKIIEPIQSRCAIVRFSRLSDQEILGRLMVVVAAEKVPYVPEGLEAIIFTADGDMRQALNNLQATVSGFRFVNQENVFKVCDQPHPLHVKSMVKNVLDGKFDEACSGLKQLYDLGYSPTDIITTLFRVIKNYDMAEYLKLELLKETGFAHMRICDGVGSFLQLSGLLAKFALVRETAKA

SEQ ID NO: 15379 - protein, 285 aa, Triticum aestivum
  peptide (1)..(285): Ceres Seq. ID no. 15222368
  misc_feature (3)..(174): Pfam Name: AAA Pfam Description: ATPase family associated with various cellular activities
  misc_feature (1)..(285): NCBI GI NO: 15991286 NR Description: replication factor C 40kDa subunit
  misc_feature (1)..(285): NCBI GI NO: 38344372 NR Description: OSJNBb0032E06.6
  misc_feature (1)..(285): NCBI GI NO: 15221697 NR Description: replication factor -related [Arabidopsis thaliana]
  misc_feature (1)..(283): NCBI GI NO: 1703053 NR Description: Activator 1 40 kDa subunit
  misc_feature (1)..(275): NCBI GI NO: 11177922 NR Description: replication factor C
  misc_feature (1)..(275): NCBI GI NO: 34871892 NR Description: replication factor C 2 (40kD) [Rattus norvegicus]
  misc_feature (1)..(275): NCBI GI NO: 12847419 NR Description: unnamed protein product [Mus musculus]
  misc_feature (1)..(275): NCBI GI NO: 539678 NR Description: replication factor C - human
  misc_feature (1)..(275): NCBI GI NO: 28950096 NR Description: probable REPLICATION FACTOR C (40 KDA SUBUNIT)
  misc_feature (76)..(275): NCBI GI NO: 30584413 NR Description: Homo sapiens replication factor C
MPNLILSGPPGTGKTTSILALAHEMLGPSYREGVLELNASDDRGLDVVRNKIKMFAQKKVTLPPGRHKIVILDEADSMTTGAQQALRRTMEIYSNTTRFALACNTSSKIIEPIQSRCAIVRFSRLSDQEILGRLMVVVAAEKVPYVPEGLEAIIFTADGDMRQALNNLQATVSGFRFVNQENVFKVCDQPHPLHVKSMVKNVLDGKFDEACSGLKQLYDLGYSPTDIITTLFRVIKNYDMAEYLKLELLKETGFAHMRICDGVGSFLQLSGLLAKFALVRETAKA

SEQ ID NO: 15380 - DNA, 1483 bp, Triticum aestivum
  misc_feature (1)..(1483): Ceres Seq. ID no. 13598532
atttcaaaacttccagatccacctagggtttgcgcctcttccctccgcccccatcacacaagccgcatcgagggggacgacgccgacctcggaccgtcggaagcaccatggagaagtacgagaagttggagaaggtcggggagggcacctacggcaaggtgtacaaggcgcaggacaaggcgacgggccaggtggtggcgctcaagaagacccgcctggagatggacgacgaagggatcccgcccaccgcgctccgtgagatctccctcctccgcctcctctccagctccctctacgtcgtccgcctccttgccgtcgagcaggccaccaagggcgggggcgccggcggtggagggaagcccgtcctctacctcgtcttcgagttccttgacactgacctcaagaagttcgtcgacgcctaccgccgtggacccgcccctaagccgctcccaacgcaggtcgtcaagagctttttgtatcagttatgcaaaggaattgcacactgccatggccatggtgttcttcatcgggatttaaagccccaaaatctcttggttgacaaggagaagatgatactgaaaattgcagatcttgggttaagtagagcttttactgttcctatgaaaagctacacccatgagatcgtgacgctttggtatagagctcctgaagtactgcttggagcaacacattactcaaccagtgttgatatttggtccatcggatgcatctttgccgagatggtcagaaaacaggctcttttccctggtgactctgagttacagcaactgcttcacattttcaagctgttgggaactcctaccgaggaggattggcctggagtaactgctctgagggactggcacgagtttcctcagtggaaagcacaaagattgacgcgtgcagtccctacactggaaccagaaggaattgacctgttatcgaaaatgctccagttcgacccggcgaacaggatctcagccaaagctgcgctagagcatccctatttcaacagcctcgacaagtctcagttctagctgttctagctaccgtgtgatttttctcaacttggtgtgtgtgctctgctcgccaacttgttccgccatgagatcgatgctgaaaacgcacgaaaccatgtttcatctacctacaatcagcaacggcgtgttgctggtagttggctcccatgagcgcccgtctcctagacctccagcacttgatttgccttgagaattattgactgaagatacttgttcagatcatgtaggagttttatttgctctgtacggaattgtttgatgagatgggtttgcggacaatagacatttgtgtagcataataaggtagtactggtatttgttaagaaaatgttgcttcatgacaagtgaagttatttggagctgcgaagtggtgagaggcgtgtgtccgtggaaggagctaatagttagcatttgatgtggacattgaaaaaaaaaaaaaaaaa

SEQ ID NO: 15381 - protein, 309 aa, Triticum aestivum
  peptide (1)..(309): Ceres Seq. ID no. 13598533
  misc_feature (4)..(301): Pfam Name: Pfam Description:  Protein kinase domain
  misc_feature (1)..(309): NCBI GI NO: 34907628 NR Description: putative cyclin-dependent kinase B1-1
  misc_feature (1)..(309): NCBI GI NO: 27542763 NR Description: cyclin-dependent kinase-like protein
  misc_feature (1)..(309): NCBI GI NO: 9885799 NR Description: cyclin-dependent kinase B1-1 [Nicotiana tabacum]
  misc_feature (1)..(309): NCBI GI NO: 9885801 NR Description: cyclin-dependent kinase B1-2 [Nicotiana tabacum]
  misc_feature (1)..(309): NCBI GI NO: 11125683 NR Description: B1-type cyclin dependent kinase
  misc_feature (2)..(309): NCBI GI NO: 25989353 NR Description: cyclin-dependent kinase [Helianthus tuberosus]
  misc_feature (1)..(309): NCBI GI NO: 7434326 NR Description: probable cdc2-like protein kinase cdc2MsD - alfalfa
  misc_feature (1)..(309): NCBI GI NO: 15224912 NR Description: cell divsion control protein, putative
  misc_feature (1)..(309): NCBI GI NO: 15232441 NR Description: cell division control protein 2 homolog B (CDC2B)
  misc_feature (1)..(309): NCBI GI NO: 5921446 NR Description: CELL DIVISION CONTROL PROTEIN 2 HOMOLOG C
MEKYEKLEKVGEGTYGKVYKAQDKATGQVVALKKTRLEMDDEGIPPTALREISLLRLLSSSLYVVRLLAVEQATKGGGAGGGGKPVLYLVFEFLDTDLKKFVDAYRRGPAPKPLPTQVVKSFLYQLCKGIAHCHGHGVLHRDLKPQNLLVDKEKMILKIADLGLSRAFTVPMKSYTHEIVTLWYRAPEVLLGATHYSTSVDIWSIGCIFAEMVRKQALFPGDSELQQLLHIFKLLGTPTEEDWPGVTALRDWHEFPQWKAQRLTRAVPTLEPEGIDLLSKMLQFDPANRISAKAALEHPYFNSLDKSQF

SEQ ID NO: 15382 - protein, 271 aa, Triticum aestivum
  peptide (1)..(271): Ceres Seq. ID no. 13598534
  misc_feature (1)..(263): Pfam Name: Pfam Description:  Protein kinase domain
  misc_feature (1)..(271): NCBI GI NO: 34907628 NR Description: putative cyclin-dependent kinase B1-1
  misc_feature (1)..(271): NCBI GI NO: 27542763 NR Description: cyclin-dependent kinase-like protein
  misc_feature (1)..(271): NCBI GI NO: 9885799 NR Description: cyclin-dependent kinase B1-1 [Nicotiana tabacum]
  misc_feature (1)..(271): NCBI GI NO: 9885801 NR Description: cyclin-dependent kinase B1-2 [Nicotiana tabacum]
  misc_feature (1)..(271): NCBI GI NO: 11125683 NR Description: B1-type cyclin dependent kinase
  misc_feature (1)..(271): NCBI GI NO: 25989353 NR Description: cyclin-dependent kinase [Helianthus tuberosus]
  misc_feature (1)..(271): NCBI GI NO: 7434326 NR Description: probable cdc2-like protein kinase cdc2MsD - alfalfa
  misc_feature (1)..(271): NCBI GI NO: 15224912 NR Description: cell divsion control protein, putative
  misc_feature (1)..(271): NCBI GI NO: 15232441 NR Description: cell division control protein 2 homolog B (CDC2B)
  misc_feature (1)..(271): NCBI GI NO: 5921446 NR Description: CELL DIVISION CONTROL PROTEIN 2 HOMOLOG C
MDDEGIPPTALREISLLRLLSSSLYVVRLLAVEQATKGGGAGGGGKPVLYLVFEFLDTDLKKFVDAYRRGPAPKPLPTQVVKSFLYQLCKGIAHCHGHGVLHRDLKPQNLLVDKEKMILKIADLGLSRAFTVPMKSYTHEIVTLWYRAPEVLLGATHYSTSVDIWSIGCIFAEMVRKQALFPGDSELQQLLHIFKLLGTPTEEDWPGVTALRDWHEFPQWKAQRLTRAVPTLEPEGIDLLSKMLQFDPANRISAKAALEHPYFNSLDKSQF

SEQ ID NO: 15383 - protein, 178 aa, Triticum aestivum
  peptide (1)..(178): Ceres Seq. ID no. 13598535
ISKLPDPPRVCASSLRPHHTSRIEGDDADLGPSEAPWRSTRSWRRSGRAPTARCTRRRTRRRARWWRSRRPAWRWTTKGSRPPRSVRSPSSASSPAPSTSSASLPSSRPPRAGAPAVEGSPSSTSSSSSLTLTSRSSSTPTAVDPPLSRSQRRSSRAFCISYAKELHTAMAMVFFIGI

SEQ ID NO: 15384 - DNA, 1368 bp, Triticum aestivum
  misc_feature (1)..(1368): Ceres Seq. ID no. 13597643
aaaacctcccccgactcctaaaaccttaaaccctagctccggccactcccccatggcggccatccgggtcatcctccctcatccccacctccccatcccctcgtggagaccccagctcaagccctcctcatcctatccccgccgcgcggtcgccgccccagcttcgctgtctccgtcgcccctcacggcttccctgcaactcggagatgtgatcgaggcgcagcagttcgatcggcaggcgcttaatgagatctttgaggtggcgcgggagatggaggccgtggagcgcagctcccacgggttccggagccgcgtccttgaggggtacctcatggccacgctcttctacgagccctccacccgcacgcgcctctccttcgaggccgccatgcgccgtcttggcggggaggtgctcactaccgagaacgctcgcgagttctcgtccgctgccaagggcgagaccctagaagataccataagaaccgttgaaggttattctgatattatcgttctgagacattttgaaagtggagctgccagaagagcagcggctactgcagaaattccggttattaatgcaggtgatgggccagggcaacatcctactcaggctttgttggatgtatatacaataaagagagagattggtaggctagatggaatcaaacttggtttggttggagaccttgccaatgggagaactgttcgttctctggcctatttgatcgctaagtaccagaacattaagatatacttcgtatctccagatgttgtaaaaatgaaggatgatattaaggagtacttaacttcacaaggtgttgaatgggaagaaagttcagatttattggatgtggcatccaggtgtgatgtaatttatcaaacacgcattcaaaaagaaagattcggagagaggatcgatcactatgaggcagctcgtgggaaatatattgtggataagaaggttttaggtgtgctgccaaagcatgctgttatcatgcatccccttccaaggctggatgagatcacagtagatgttgatagtgatccaagggctgcatattttaggcaggctaagaatggcctctacataaggatggcactgctcaaacttctgcttgttggccattgacattctttttcctggtgcgtgagctttgcgatgtcaaaggatcagaaatgtagtcttaatcattggctccaagttcaactgttcggtgctgtgcaaggtataagaaaattggatccttgcaagaataaagcaatgattgtatgatacatgctccataggaattttctctgttattatgtggaacatccttttccccaggatggaatgcaatgttcgaaaagaaaattatattttacctg

SEQ ID NO: 15385 - protein, 375 aa, Triticum aestivum
  peptide (1)..(375): Ceres Seq. ID no. 13597644
  misc_feature (218)..(372): Pfam Name: Pfam Description:  Aspartate/ornithine carbamoyltransferase
  misc_feature (18)..(374): NCBI GI NO: 9453916 NR Description: aspartate carbamoyl transferase
  misc_feature (66)..(374): NCBI GI NO: 3914501 NR Description: Aspartate carbamoyltransferase 3
  misc_feature (62)..(374): NCBI GI NO: 21535795 NR Description: aspartate carbamoyltransferase [Solanum tuberosum]
  misc_feature (66)..(374): NCBI GI NO: 3914503 NR Description: Aspartate carbamoyltransferase 2
  misc_feature (66)..(374): NCBI GI NO: 15231112 NR Description: aspartate carbamoyltransferase precursor
  misc_feature (66)..(374): NCBI GI NO: 1076293 NR Description: aspartate carbamoyltransferase (EC 2
  misc_feature (66)..(374): NCBI GI NO: 3914502 NR Description: Aspartate carbamoyltransferase 1
  misc_feature (66)..(374): NCBI GI NO: 15215706 NR Description: AT3g20330/MQC12_8 [Arabidopsis thaliana]
  misc_feature (108)..(374): NCBI GI NO: 479713 NR Description: aspartate carbamoyltransferase (EC 2
  misc_feature (108)..(374): NCBI GI NO: 397385 NR Description: aspartate carbamoyltransferase
KPPPTPKTLNPSSGHSPMAAIRVILPHPHLPIPSWRPQLKPSSSYPRRAVAAPASLSPSPLTASLQLGDVIEAQQFDRQALNEIFEVAREMEAVERSSHGFRSRVLEGYLMATLFYEPSTRTRLSFEAAMRRLGGEVLTTENAREFSSAAKGETLEDTIRTVEGYSDIIVLRHFESGAARRAAATAEIPVINAGDGPGQHPTQALLDVYTIKREIGRLDGIKLGLVGDLANGRTVRSLAYLIAKYQNIKIYFVSPDVVKMKDDIKEYLTSQGVEWEESSDLLDVASRCDVIYQTRIQKERFGERIDHYEAARGKYIVDKKVLGVLPKHAVIMHPLPRLDEITVDVDSDPRAAYFRQAKNGLYIRMALLKLLLVGH

SEQ ID NO: 15386 - protein, 358 aa, Triticum aestivum
  peptide (1)..(358): Ceres Seq. ID no. 13597645
  misc_feature (201)..(355): Pfam Name: Pfam Description:  Aspartate/ornithine carbamoyltransferase
  misc_feature (1)..(357): NCBI GI NO: 9453916 NR Description: aspartate carbamoyl transferase
  misc_feature (49)..(357): NCBI GI NO: 3914501 NR Description: Aspartate carbamoyltransferase 3
  misc_feature (45)..(357): NCBI GI NO: 21535795 NR Description: aspartate carbamoyltransferase [Solanum tuberosum]
  misc_feature (49)..(357): NCBI GI NO: 3914503 NR Description: Aspartate carbamoyltransferase 2
  misc_feature (49)..(357): NCBI GI NO: 15231112 NR Description: aspartate carbamoyltransferase precursor
  misc_feature (49)..(357): NCBI GI NO: 1076293 NR Description: aspartate carbamoyltransferase (EC 2
  misc_feature (49)..(357): NCBI GI NO: 3914502 NR Description: Aspartate carbamoyltransferase 1
  misc_feature (49)..(357): NCBI GI NO: 15215706 NR Description: AT3g20330/MQC12_8 [Arabidopsis thaliana]
  misc_feature (91)..(357): NCBI GI NO: 479713 NR Description: aspartate carbamoyltransferase (EC 2
  misc_feature (91)..(357): NCBI GI NO: 397385 NR Description: aspartate carbamoyltransferase
MAAIRVILPHPHLPIPSWRPQLKPSSSYPRRAVAAPASLSPSPLTASLQLGDVIEAQQFDRQALNEIFEVAREMEAVERSSHGFRSRVLEGYLMATLFYEPSTRTRLSFEAAMRRLGGEVLTTENAREFSSAAKGETLEDTIRTVEGYSDIIVLRHFESGAARRAAATAEIPVINAGDGPGQHPTQALLDVYTIKREIGRLDGIKLGLVGDLANGRTVRSLAYLIAKYQNIKIYFVSPDVVKMKDDIKEYLTSQGVEWEESSDLLDVASRCDVIYQTRIQKERFGERIDHYEAARGKYIVDKKVLGVLPKHAVIMHPLPRLDEITVDVDSDPRAAYFRQAKNGLYIRMALLKLLLVGH

SEQ ID NO: 15387 - protein, 285 aa, Triticum aestivum
  peptide (1)..(285): Ceres Seq. ID no. 13597646
  misc_feature (128)..(282): Pfam Name: Pfam Description:  Aspartate/ornithine carbamoyltransferase
  misc_feature (1)..(284): NCBI GI NO: 9453916 NR Description: aspartate carbamoyl transferase
  misc_feature (1)..(284): NCBI GI NO: 3914501 NR Description: Aspartate carbamoyltransferase 3
  misc_feature (1)..(284): NCBI GI NO: 21535795 NR Description: aspartate carbamoyltransferase [Solanum tuberosum]
  misc_feature (1)..(284): NCBI GI NO: 3914503 NR Description: Aspartate carbamoyltransferase 2
  misc_feature (1)..(284): NCBI GI NO: 15231112 NR Description: aspartate carbamoyltransferase precursor
  misc_feature (1)..(284): NCBI GI NO: 1076293 NR Description: aspartate carbamoyltransferase (EC 2
  misc_feature (1)..(284): NCBI GI NO: 3914502 NR Description: Aspartate carbamoyltransferase 1
  misc_feature (1)..(284): NCBI GI NO: 15215706 NR Description: AT3g20330/MQC12_8 [Arabidopsis thaliana]
  misc_feature (18)..(284): NCBI GI NO: 479713 NR Description: aspartate carbamoyltransferase (EC 2
  misc_feature (18)..(284): NCBI GI NO: 397385 NR Description: aspartate carbamoyltransferase
MEAVERSSHGFRSRVLEGYLMATLFYEPSTRTRLSFEAAMRRLGGEVLTTENAREFSSAAKGETLEDTIRTVEGYSDIIVLRHFESGAARRAAATAEIPVINAGDGPGQHPTQALLDVYTIKREIGRLDGIKLGLVGDLANGRTVRSLAYLIAKYQNIKIYFVSPDVVKMKDDIKEYLTSQGVEWEESSDLLDVASRCDVIYQTRIQKERFGERIDHYEAARGKYIVDKKVLGVLPKHAVIMHPLPRLDEITVDVDSDPRAAYFRQAKNGLYIRMALLKLLLVGH

SEQ ID NO: 15388 - DNA, 1343 bp, Triticum aestivum
  misc_feature (1)..(1343): Ceres Seq. ID no. 13656123
  misc_feature (1190)..(1190): n is a, c, t, g, unknown, or other
  misc_feature (1192)..(1192): n is a, c, t, g, unknown, or other
  misc_feature (1191)..(1191): n is a, c, t, g, unknown, or other
ccccgtcacttgctctatcccgagttagtgacacaagaatatttccctgtgcagtcttgtgctagctgccgtgtctaccaggaatggccgacggcgtccttccggcagcgctgacagtggcgttcctgctgctccttggaacaatcggcgccgcgcacggtcagctccagatggggttctactccgactcctgccccggcgccgaggacatggtcaccgccgccgtccaggaggccgccgcctcggacgccaccatcctccccgccctcgtccgcctccagttccacgactgcttcgtcagaggatgcgacgcgtcggtgctgatcacgagcgcgggcaacgccgcggaggtgaacaacaacaagcaccagggcctccgaggcctggatgtggttgaccgcgccaaggcggagctcgaggagcagtgccccggcgttccaacwktrkygtstctmctgcgccgacatcatcgctctcgccgcacgcgacgccatagccatgacgaacgggccgtcgttcgaggtgccgacggggcggcgcgacgggctgtcgtcgaacgtacgcgacgccgacgtgctgccggacgtgagtgactccatccaggtgctccgctccaagttcgccgccagcagcctcaacgaccgcgacctcgttctcctcacagcggcgcacacgatcggcaccacggcgtgcttcttcgtcaaggatcggctctacagctacccactgccgggcagccgcacggggtcggacccgtcgatcccggcggcgttcctgtcggagctcaaggcccggtgcgcgcccggcgacttcaacacgcgcgtgccgctggaccggggcagccagggaacattcgacgactccatcctccgcaacatccgtgcgggcctcgtccccatcgcctccgacgcggcgctcgaggccagcaacgccaccggcgcgctcgtcggcgcctacctcggcgcggcgtcctccagcttcgcgcaggactttgtgggcgccatgatcaagatgggcaccatcggcgccatcaccggcgacgccggcgagatcagggacgtatgctcggcgttcaacacgaactgatcgacgcgtcattgctataaaatcatacgaatggtcgcattcaaattagcactgtaaatctcttgcggaaacatgaattcattcctckttgsmwctkkaggggnnnaaaaaaaaaaaaaaaaaaaaaaaaaaaaaaaaaaaaaaaaaaaaaaaaaaaaaaaaaaaaaaaaaaaaaaaaaaaaaaaaaaaaaaagggraaaaaaaaaaaaaaagggcttaagggaacggggsaatccscccccccccaggggggcccc

SEQ ID NO: 15389 - protein, 232 aa, Triticum aestivum
  peptide (1)..(232): Ceres Seq. ID no. 15219796
  misc_feature (24)..(190): Pfam Name: Pfam Description:  Peroxidase
  misc_feature (24)..(230): NCBI GI NO: 6979323 NR Description: putative peroxidase [Oryza sativa]
  misc_feature (24)..(230): NCBI GI NO: 19698450 NR Description: gaiacol peroxidase [Gossypium hirsutum]
  misc_feature (24)..(230): NCBI GI NO: 5002236 NR Description: peroxidase [Glycine max]
  misc_feature (24)..(230): NCBI GI NO: 15236089 NR Description: cationic peroxidase, putative
  misc_feature (24)..(230): NCBI GI NO: 26397928 NR Description: Peroxidase 43 precursor (Atperox P43)
  misc_feature (10)..(230): NCBI GI NO: 22330687 NR Description: peroxidase, putative [Arabidopsis thaliana]
  misc_feature (10)..(230): NCBI GI NO: 25453193 NR Description: Peroxidase 13 precursor (Atperox P13)
  misc_feature (24)..(230): NCBI GI NO: 1232069 NR Description: cationic peroxidase [Stylosanthes humilis]
  misc_feature (24)..(230): NCBI GI NO: 19698452 NR Description: bacterial-induced gaiacol peroxidase
  misc_feature (24)..(231): NCBI GI NO: 4204759 NR Description: peroxidase precursor [Glycine max]
  misc_feature (19)..(19): Xaa is any aa, unknown or other
  misc_feature (20)..(20): Xaa is any aa, unknown or other
  misc_feature (21)..(21): Xaa is any aa, unknown or other
  misc_feature (22)..(22): Xaa is any aa, unknown or other
  misc_feature (23)..(23): Xaa is any aa, unknown or other
MWLTAPRRSSRSSAPAFQXXXXXCADIIALAARDAIAMTNGPSFEVPTGRRDGLSSNVRDADVLPDVSDSIQVLRSKFAASSLNDRDLVLLTAAHTIGTTACFFVKDRLYSYPLPGSRTGSDPSIPAAFLSELKARCAPGDFNTRVPLDRGSQGTFDDSILRNIRAGLVPIASDAALEASNATGALVGAYLGAASSSFAQDFVGAMIKMGTIGAITGDAGEIRDVCSAFNTN

SEQ ID NO: 15390 - protein, 195 aa, Triticum aestivum
  peptide (1)..(195): Ceres Seq. ID no. 15219797
  misc_feature (1)..(153): Pfam Name: Pfam Description:  Peroxidase
  misc_feature (1)..(193): NCBI GI NO: 6979323 NR Description: putative peroxidase [Oryza sativa]
  misc_feature (1)..(193): NCBI GI NO: 19698450 NR Description: gaiacol peroxidase [Gossypium hirsutum]
  misc_feature (1)..(193): NCBI GI NO: 5002236 NR Description: peroxidase [Glycine max]
  misc_feature (1)..(193): NCBI GI NO: 15236089 NR Description: cationic peroxidase, putative
  misc_feature (1)..(193): NCBI GI NO: 26397928 NR Description: Peroxidase 43 precursor (Atperox P43)
  misc_feature (1)..(193): NCBI GI NO: 22330687 NR Description: peroxidase, putative [Arabidopsis thaliana]
  misc_feature (1)..(193): NCBI GI NO: 25453193 NR Description: Peroxidase 13 precursor (Atperox P13)
  misc_feature (1)..(193): NCBI GI NO: 1232069 NR Description: cationic peroxidase [Stylosanthes humilis]
  misc_feature (1)..(193): NCBI GI NO: 19698452 NR Description: bacterial-induced gaiacol peroxidase
  misc_feature (1)..(194): NCBI GI NO: 4204759 NR Description: peroxidase precursor [Glycine max]
MTNGPSFEVPTGRRDGLSSNVRDADVLPDVSDSIQVLRSKFAASSLNDRDLVLLTAAHTIGTTACFFVKDRLYSYPLPGSRTGSDPSIPAAFLSELKARCAPGDFNTRVPLDRGSQGTFDDSILRNIRAGLVPIASDAALEASNATGALVGAYLGAASSSFAQDFVGAMIKMGTIGAITGDAGEIRDVCSAFNTN

SEQ ID NO: 15391 - protein, 169 aa, Triticum aestivum
  peptide (1)..(169): Ceres Seq. ID no. 15219798
  misc_feature (44)..(118): Pfam Name: Pfam Description:  Peroxidase
  misc_feature (7)..(118): NCBI GI NO: 6979323 NR Description: putative peroxidase [Oryza sativa]
  misc_feature (14)..(118): NCBI GI NO: 19698450 NR Description: gaiacol peroxidase [Gossypium hirsutum]
  misc_feature (5)..(118): NCBI GI NO: 5002236 NR Description: peroxidase [Glycine max]
  misc_feature (8)..(118): NCBI GI NO: 15236089 NR Description: cationic peroxidase, putative
  misc_feature (8)..(118): NCBI GI NO: 26397928 NR Description: Peroxidase 43 precursor (Atperox P43)
  misc_feature (7)..(118): NCBI GI NO: 22330687 NR Description: peroxidase, putative [Arabidopsis thaliana]
  misc_feature (10)..(118): NCBI GI NO: 25453193 NR Description: Peroxidase 13 precursor (Atperox P13)
  misc_feature (12)..(125): NCBI GI NO: 1232069 NR Description: cationic peroxidase [Stylosanthes humilis]
  misc_feature (15)..(125): NCBI GI NO: 19698452 NR Description: bacterial-induced gaiacol peroxidase
  misc_feature (15)..(125): NCBI GI NO: 4204759 NR Description: peroxidase precursor [Glycine max]
  misc_feature (120)..(120): Xaa is any aa, unknown or other
  misc_feature (121)..(121): Xaa is any aa, unknown or other
  misc_feature (122)..(122): Xaa is any aa, unknown or other
  misc_feature (123)..(123): Xaa is any aa, unknown or other
  misc_feature (124)..(124): Xaa is any aa, unknown or other
MADGVLPAALTVAFLLLLGTIGAAHGQLQMGFYSDSCPGAEDMVTAAVQEAAASDATILPALVRLQFHDCFVRGCDASVLITSAGNAAEVNNNKHQGLRGLDVVDRAKAELEEQCPGVPXXXXXLRRHHRSRRTRRHSHDERAVVRGADGAARRAVVERTRRRRAAGRE

SEQ ID NO: 15392 - DNA, 1140 bp, Triticum aestivum
  misc_feature (1)..(1140): Ceres Seq. ID no. 13597609
cactttgacttcggagcaaccgcgaccacgtcggtagcataaagctttcgcccggctggctcgggtgagagagacagggaaggcggagggggcggaggctgggcggcagaggcggcgccgtcactctgttcttgcgctcatctccagaggaaggggagcgtcacggttcagcaatggcagctccgaatacctacgccgtccatctctcctcggagacccacaagatcgaggcctggtgcgaatcggacgaggctttggctaagcaactgcaggaggaggaggattcgctcgctacaagggaatttgccggcagcgtgtccttggaaccatcatcaccagctgttgagtataggcctgccaataatgcagctcaggtggcgacagaagataatgtcgatccggataatatgtcatacgagcaactgcaagcaatcggtgaagaagtaggaactcagtccagaggattatctgatgacctgatcagctacctggagccttttaggaacaaatgtaacttcttctcctgcaaaaagaataccgatgaatgtgtgatctgcaaatcgaactataaaagcctacagaagttgataagattgccctgcagccattgttaccatgcaaattgcataactcgctggcttaagattaacaaggcatgcccagtctgcaatgaggaggtattcggttaacttgcgatgttagtggagacgctgtggcctcctcgccgcatcatgataatggacaatcttgctctcctatagcctattatactataaaatacttgatggtctaccgtgctttaagaacaaatgtatttcggatcatgccatgtttgatgtcccccaacttagttttgtcattaaggtaatgataaatatgtgcgggcagtgggttatatagtttgcaattttccgagaatgcaaccgagcaggagcagctaagtagatgatgtggtttgctatgtcttgcacagtctttacatcagcccactgtgtaaagtccgaagcaagatttgtaaatgtttatataggacgtctctttttgactttgaaaggttcagacaagtgtgttctggggtttccaaaattttgggaacaaatcttgcatgtaaaaattataatggaatgaactgtgtttttc

SEQ ID NO: 15393 - protein, 171 aa, Triticum aestivum
  peptide (1)..(171): Ceres Seq. ID no. 13597610
  misc_feature (125)..(165): Pfam Name: RING finger Pfam Description: Zinc finger, C3HC4 type
  misc_feature (1)..(171): NCBI GI NO: 38567912 NR Description: OSJNBa0088I22.8
  misc_feature (12)..(171): NCBI GI NO: 34898016 NR Description: ESTs C26000
  misc_feature (56)..(171): NCBI GI NO: 22331928 NR Description: zinc finger
  misc_feature (24)..(169): NCBI GI NO: 10334499 NR Description: hypothetical protein [Cicer arietinum]
  misc_feature (25)..(169): NCBI GI NO: 21536693 NR Description: unknown [Arabidopsis thaliana]
  misc_feature (25)..(169): NCBI GI NO: 18402411 NR Description: zinc finger
  misc_feature (71)..(168): NCBI GI NO: 15232746 NR Description: zinc-finger protein-related protein
  misc_feature (74)..(169): NCBI GI NO: 4240031 NR Description: DNA binding zinc finger protein (Pspzf)
  misc_feature (74)..(165): NCBI GI NO: 1076498 NR Description: RING finger protein Pzf - soybean (fragment)
  misc_feature (74)..(168): NCBI GI NO: 18400621 NR Description: zinc finger
MAAPNTYAVHLSSETHKIEAWCESDEALAKQLQEEEDSLATREFAGSVSLEPSSPAVEYRPANNAAQVATEDNVDPDNMSYEQLQAIGEEVGTQSRGLSDDLISYLEPFRNKCNFFSCKKNTDECVICKSNYKSLQKLIRLPCSHCYHANCITRWLKINKACPVCNEEVFG

SEQ ID NO: 15394 - protein, 93 aa, Triticum aestivum
  peptide (1)..(93): Ceres Seq. ID no. 13597611
  misc_feature (47)..(87): Pfam Name: RING finger Pfam Description: Zinc finger, C3HC4 type
  misc_feature (1)..(93): NCBI GI NO: 38567912 NR Description: OSJNBa0088I22.8
  misc_feature (1)..(93): NCBI GI NO: 34898016 NR Description: ESTs C26000
  misc_feature (1)..(93): NCBI GI NO: 22331928 NR Description: zinc finger
  misc_feature (1)..(91): NCBI GI NO: 10334499 NR Description: hypothetical protein [Cicer arietinum]
  misc_feature (1)..(91): NCBI GI NO: 21536693 NR Description: unknown [Arabidopsis thaliana]
  misc_feature (1)..(91): NCBI GI NO: 18402411 NR Description: zinc finger
  misc_feature (1)..(90): NCBI GI NO: 15232746 NR Description: zinc-finger protein-related protein
  misc_feature (1)..(91): NCBI GI NO: 4240031 NR Description: DNA binding zinc finger protein (Pspzf)
  misc_feature (1)..(87): NCBI GI NO: 1076498 NR Description: RING finger protein Pzf - soybean (fragment)
  misc_feature (1)..(90): NCBI GI NO: 18400621 NR Description: zinc finger
MSYEQLQAIGEEVGTQSRGLSDDLISYLEPFRNKCNFFSCKKNTDECVICKSNYKSLQKLIRLPCSHCYHANCITRWLKINKACPVCNEEVFG

SEQ ID NO: 15395 - DNA, 1353 bp, Triticum aestivum
  misc_feature (1)..(1353): Ceres Seq. ID no. 12617639
aaaagtacgcctgaagccctacaggctcccgccgcccccctccccctcccgcccccaaaccctaacccctccgccaccatcgccgccaccgcggctcccctctcttcctcctcgccgcgacaccccgtccccgccctctccaccacgtccacaatcttcctccattagatttcgaggggtctcgggaggatggcgttcctgcagaaggtcgggaatgccctcaagcggtccgcgggctccggctcggcgatgctccaggcggtccggtccatgtcctcctccaaggtcttcgtcggaggcatctcgtacggcaccgatgaccagagcctcgcggatgcgttttccaactacggccaagtcgtggaatccaaggtgatcatggaccgtgaatctgggaggtcaagggggtttggtttcgtgacctacacttcggcggaggaggctggagctgccatcaccggaatggatgggaaggatctgcagggtcggatagtgagggtgagctatgctcatgaccgtggtagtcgtccaagttttggcggtggtggcggctatggcggcggtggtggcggctatggcggcggtgacggtggttacggtggagctggtggtgcctatggtggtggtggaggctacagcggaggtggtggatatgggggtggaggcagaggtggtggatacaatagtggtggcaattataattcaggatacaacagtgggggaaactatggtgcccctcaaggcgagcaaggtggctatgggggtgatgctggtttcacaggggttggtggtggtggatacgatgctgctcctgccaacaactatggcggcgatagcctgaatcaagggggtggagcacctcctgcatttggaggtggaaactatggcgtaggcaacgacagctacgcggacgatgcccctgttgatctgccccctggtaagctcaatgacctgctgaaggatctcaaatttgatgttggtggcaaggaggatggtgctggggaggacgccggcttggttgacgcggacatcaagagaagcgagggacaggatgactttcttgacgacgacttcagcaaggatgaagatgactacgccaacaagagaagctgaatgttggtccagcaagaagcatcagccgaataatttcccgtcgatatgttctccatgactgccttgtttttggtattgtcctgtgatgaagataataatgtagtgcttgcaaacaagttatgttcggtctcttagctacgttctgtacgtctgctttgtgtactgtgttctggattcatagtatggtgcgaacttgaacctgaactctgcatgtattgcacgctgtgaaattgcactttc

SEQ ID NO: 15396 - protein, 307 aa, Triticum aestivum
  peptide (1)..(307): Ceres Seq. ID no. 12617640
  misc_feature (33)..(95): Pfam Name: a.k.a. RRM, RBD, or RNP domain Pfam Description: RNA recognition motif.
  misc_feature (1)..(286): NCBI GI NO: 15239505 NR Description: glycine-rich RNA-binding protein
  misc_feature (1)..(238): NCBI GI NO: 15221187 NR Description: glycine-rich RNA-binding protein
  misc_feature (96)..(306): NCBI GI NO: 37532692 NR Description: unknown protein
  misc_feature (1)..(246): NCBI GI NO: 15822705 NR Description: RNA-binding protein precursor [Solanum tuberosum]
  misc_feature (1)..(253): NCBI GI NO: 1084415 NR Description: RNA-binding protein - wood tobacco
  misc_feature (1)..(254): NCBI GI NO: 15822703 NR Description: RNA-binding protein precursor [Nicotiana tabacum]
  misc_feature (11)..(246): NCBI GI NO: 15822703 NR Description: RNA-binding protein precursor [Nicotiana tabacum]
  misc_feature (32)..(189): NCBI GI NO: 544423 NR Description: Glycine-rich RNA-binding protein 2
  misc_feature (32)..(202): NCBI GI NO: 15226605 NR Description: glycine-rich RNA binding protein AtGRP7
  misc_feature (1)..(155): NCBI GI NO: 15236359 NR Description: glycine-rich RNA-binding protein AtGRP2
MAFLQKVGNALKRSAGSGSAMLQAVRSMSSSKVFVGGISYGTDDQSLADAFSNYGQVVESKVIMDRESGRSRGFGFVTYTSAEEAGAAITGMDGKDLQGRIVRVSYAHDRGSRPSFGGGGGYGGGGGGYGGGDGGYGGAGGAYGGGGGYSGGGGYGGGGRGGGYNSGGNYNSGYNSGGNYGAPQGEQGGYGGDAGFTGVGGGGYDAAPANNYGGDSLNQGGGAPPAFGGGNYGVGNDSYADDAPVDLPPGKLNDLLKDLKFDVGGKEDGAGEDAGLVDADIKRSEGQDDFLDDDFSKDEDDYANKRS

SEQ ID NO: 15397 - protein, 287 aa, Triticum aestivum
  peptide (1)..(287): Ceres Seq. ID no. 12617641
  misc_feature (13)..(75): Pfam Name: a.k.a. RRM, RBD, or RNP domain Pfam Description: RNA recognition motif.
  misc_feature (1)..(266): NCBI GI NO: 15239505 NR Description: glycine-rich RNA-binding protein
  misc_feature (1)..(218): NCBI GI NO: 15221187 NR Description: glycine-rich RNA-binding protein
  misc_feature (76)..(286): NCBI GI NO: 37532692 NR Description: unknown protein
  misc_feature (1)..(226): NCBI GI NO: 15822705 NR Description: RNA-binding protein precursor [Solanum tuberosum]
  misc_feature (1)..(233): NCBI GI NO: 1084415 NR Description: RNA-binding protein - wood tobacco
  misc_feature (1)..(234): NCBI GI NO: 15822703 NR Description: RNA-binding protein precursor [Nicotiana tabacum]
  misc_feature (1)..(226): NCBI GI NO: 15822703 NR Description: RNA-binding protein precursor [Nicotiana tabacum]
  misc_feature (12)..(169): NCBI GI NO: 544423 NR Description: Glycine-rich RNA-binding protein 2
  misc_feature (12)..(182): NCBI GI NO: 15226605 NR Description: glycine-rich RNA binding protein AtGRP7
  misc_feature (1)..(135): NCBI GI NO: 15236359 NR Description: glycine-rich RNA-binding protein AtGRP2
MLQAVRSMSSSKVFVGGISYGTDDQSLADAFSNYGQVVESKVIMDRESGRSRGFGFVTYTSAEEAGAAITGMDGKDLQGRIVRVSYAHDRGSRPSFGGGGGYGGGGGGYGGGDGGYGGAGGAYGGGGGYSGGGGYGGGGRGGGYNSGGNYNSGYNSGGNYGAPQGEQGGYGGDAGFTGVGGGGYDAAPANNYGGDSLNQGGGAPPAFGGGNYGVGNDSYADDAPVDLPPGKLNDLLKDLKFDVGGKEDGAGEDAGLVDADIKRSEGQDDFLDDDFSKDEDDYANKRS

SEQ ID NO: 15398 - protein, 280 aa, Triticum aestivum
  peptide (1)..(280): Ceres Seq. ID no. 12617642
  misc_feature (6)..(68): Pfam Name: a.k.a. RRM, RBD, or RNP domain Pfam Description: RNA recognition motif.
  misc_feature (1)..(259): NCBI GI NO: 15239505 NR Description: glycine-rich RNA-binding protein
  misc_feature (1)..(211): NCBI GI NO: 15221187 NR Description: glycine-rich RNA-binding protein
  misc_feature (69)..(279): NCBI GI NO: 37532692 NR Description: unknown protein
  misc_feature (1)..(219): NCBI GI NO: 15822705 NR Description: RNA-binding protein precursor [Solanum tuberosum]
  misc_feature (1)..(226): NCBI GI NO: 1084415 NR Description: RNA-binding protein - wood tobacco
  misc_feature (1)..(227): NCBI GI NO: 15822703 NR Description: RNA-binding protein precursor [Nicotiana tabacum]
  misc_feature (1)..(219): NCBI GI NO: 15822703 NR Description: RNA-binding protein precursor [Nicotiana tabacum]
  misc_feature (5)..(162): NCBI GI NO: 544423 NR Description: Glycine-rich RNA-binding protein 2
  misc_feature (5)..(175): NCBI GI NO: 15226605 NR Description: glycine-rich RNA binding protein AtGRP7
  misc_feature (1)..(128): NCBI GI NO: 15236359 NR Description: glycine-rich RNA-binding protein AtGRP2
MSSSKVFVGGISYGTDDQSLADAFSNYGQVVESKVIMDRESGRSRGFGFVTYTSAEEAGAAITGMDGKDLQGRIVRVSYAHDRGSRPSFGGGGGYGGGGGGYGGGDGGYGGAGGAYGGGGGYSGGGGYGGGGRGGGYNSGGNYNSGYNSGGNYGAPQGEQGGYGGDAGFTGVGGGGYDAAPANNYGGDSLNQGGGAPPAFGGGNYGVGNDSYADDAPVDLPPGKLNDLLKDLKFDVGGKEDGAGEDAGLVDADIKRSEGQDDFLDDDFSKDEDDYANKRS

SEQ ID NO: 15399 - DNA, 1613 bp, Triticum aestivum
  misc_feature (1)..(1613): Ceres Seq. ID no. 13584612
aaaaaccccacaaatccatcccggccgaccgccgccgccgccgttgccacccccaccgccatgaatccggcatgcgcggaggcagcagccgccaagaagtcccggcacaaggacaagaaggagaagaaaaacaagcgcaaagacaccgcggagcacctcggcggcgagcccgcgacggccgacgaggaagccgtccacaagaagaagaagaagaagcacgcgaaggaggaggaggaggcggattcgaaggggaagccgacggtgagcatcgccgtcgccggttccgtcatcgacaacgcccagtccctcgagctcgccaccctcctggccggtcagatagcccgcgcggcggccgtattccgcatcgacgagatcgttgtcttcgacagcagcccacctgcggagaacggcggcggcggtgccgaagacgaagaggagagcggtgcgcggttcctcgttcgcatactggagtatctggagacgccgcagtacctgcgccgccgtctcttcccaatgcacaagaactttaaatatgtggggttgcttccgcctctggacgcgccgcaccatgtgcgcaagcatgagtggtctgaatttcgtgaaggtgtaacattgggcggggatcgttcaaagggtacacttgttgatgttgggttaagtcagaacgttctggttgagcaaatcctagaacaaggaaaaagggtaactgtagccatgggaaccaacagagaccttacaccagcttgtataaggaaagtcgttcctccgtcctcacccagcgaagaaatgggatcatattggggctataaagtccgctatgcttcaaatttaagtggtgttatcaatgattcaccatacaaggaaggatatgatcatatcattggcacttctgagcatggtgaaaccattatttcatctgagctaatcttaccttcattcaggcaccttttaattgcgtttggtggactggctggtctggaagaaagcatcgaagaggacccaaatctgaatggcaaaggtgcaaatgatgtattcgcatcttattttaatacatgccccaaccaaggtagcagaacaataaggacagaggaggcacttctcatatcccttcagtacttccaagaccccatcaggcgagcagggatatcgaattagaaggttttatgcagacacatgcaaatacaacattgcgcttaccaaaggattggctttaacgcttggaatagacatggaagatgcaccttgggtttgtttttgatggtcaatcgctggattgtagcacctacgggttttctgctcgggtcaagcactgtaaagcaaagaggaggtgcaagaataggtgatagctttaacttctattttgaaacaggcaaggcacacattttcattattaagaagagaatttgcctggttaattagaggaaaactgggcaaaagccaagatagcttgaacattgatgctagcattggtagagttttcttaagggggcattgatagagttgagaagaagatcagtgccccccaaaagagtgtttagagagggagcataattatcgtcggggatttgttttctttgctccaaattggctgaaatgagtgttttgtttttttt

SEQ ID NO: 15400 - protein, 384 aa, Triticum aestivum
  peptide (1)..(384): Ceres Seq. ID no. 13584613
  misc_feature (87)..(374): Pfam Name: Pfam Description:  Uncharacterized ACR, COG2106
  misc_feature (56)..(363): NCBI GI NO: 38346841 NR Description: OSJNBa0091C12.1
  misc_feature (97)..(380): NCBI GI NO: 15239710 NR Description: hypothetical protein [Arabidopsis thaliana]
  misc_feature (32)..(107): NCBI GI NO: 15239710 NR Description: hypothetical protein [Arabidopsis thaliana]
  misc_feature (37)..(381): NCBI GI NO: 7512808 NR Description: hypothetical protein DKFZp566D143
  misc_feature (37)..(381): NCBI GI NO: 39794258 NR Description: Unknown (protein for MGC:75017) [Homo sapiens]
  misc_feature (37)..(381): NCBI GI NO: 38679912 NR Description: hypothetical protein HSPC109 [Homo sapiens]
  misc_feature (10)..(381): NCBI GI NO: 34783965 NR Description: Unknown (protein for IMAGE:6142267) [Homo sapiens]
  misc_feature (67)..(381): NCBI GI NO: 27369948 NR Description: DNA segment
  misc_feature (15)..(378): NCBI GI NO: 21428350 NR Description: GM02932p [Drosophila melanogaster]
  misc_feature (15)..(378): NCBI GI NO: 20129839 NR Description: CG12128-PA [Drosophila melanogaster]
KNPTNPSRPTAAAAVATPTAMNPACAEAAAAKKSRHKDKKEKKNKRKDTAEHLGGEPATADEEAVHKKKKKKHAKEEEEADSKGKPTVSIAVAGSVIDNAQSLELATLLAGQIARAAAVFRIDEIVVFDSSPPAENGGGGAEDEEESGARFLVRILEYLETPQYLRRRLFPMHKNFKYVGLLPPLDAPHHVRKHEWSEFREGVTLGGDRSKGTLVDVGLSQNVLVEQILEQGKRVTVAMGTNRDLTPACIRKVVPPSSPSEEMGSYWGYKVRYASNLSGVINDSPYKEGYDHIIGTSEHGETIISSELILPSFRHLLIAFGGLAGLEESIEEDPNLNGKGANDVFASYFNTCPNQGSRTIRTEEALLISLQYFQDPIRRAGISN

SEQ ID NO: 15401 - protein, 364 aa, Triticum aestivum
  peptide (1)..(364): Ceres Seq. ID no. 13584614
  misc_feature (67)..(354): Pfam Name: Pfam Description:  Uncharacterized ACR, COG2106
  misc_feature (36)..(343): NCBI GI NO: 38346841 NR Description: OSJNBa0091C12.1
  misc_feature (77)..(360): NCBI GI NO: 15239710 NR Description: hypothetical protein [Arabidopsis thaliana]
  misc_feature (12)..(87): NCBI GI NO: 15239710 NR Description: hypothetical protein [Arabidopsis thaliana]
  misc_feature (17)..(361): NCBI GI NO: 7512808 NR Description: hypothetical protein DKFZp566D143
  misc_feature (17)..(361): NCBI GI NO: 39794258 NR Description: Unknown (protein for MGC:75017) [Homo sapiens]
  misc_feature (17)..(361): NCBI GI NO: 38679912 NR Description: hypothetical protein HSPC109 [Homo sapiens]
  misc_feature (1)..(361): NCBI GI NO: 34783965 NR Description: Unknown (protein for IMAGE:6142267) [Homo sapiens]
  misc_feature (47)..(361): NCBI GI NO: 27369948 NR Description: DNA segment
  misc_feature (1)..(358): NCBI GI NO: 21428350 NR Description: GM02932p [Drosophila melanogaster]
  misc_feature (1)..(358): NCBI GI NO: 20129839 NR Description: CG12128-PA [Drosophila melanogaster]
MNPACAEAAAAKKSRHKDKKEKKNKRKDTAEHLGGEPATADEEAVHKKKKKKHAKEEEEADSKGKPTVSIAVAGSVIDNAQSLELATLLAGQIARAAAVFRIDEIVVFDSSPPAENGGGGAEDEEESGARFLVRILEYLETPQYLRRRLFPMHKNFKYVGLLPPLDAPHHVRKHEWSEFREGVTLGGDRSKGTLVDVGLSQNVLVEQILEQGKRVTVAMGTNRDLTPACIRKVVPPSSPSEEMGSYWGYKVRYASNLSGVINDSPYKEGYDHIIGTSEHGETIISSELILPSFRHLLIAFGGLAGLEESIEEDPNLNGKGANDVFASYFNTCPNQGSRTIRTEEALLISLQYFQDPIRRAGISN

SEQ ID NO: 15402 - protein, 213 aa, Triticum aestivum
  peptide (1)..(213): Ceres Seq. ID no. 13584615
  misc_feature (1)..(203): Pfam Name: Pfam Description:  Uncharacterized ACR, COG2106
  misc_feature (1)..(192): NCBI GI NO: 38346841 NR Description: OSJNBa0091C12.1
  misc_feature (1)..(209): NCBI GI NO: 15239710 NR Description: hypothetical protein [Arabidopsis thaliana]
  misc_feature (1)..(210): NCBI GI NO: 7512808 NR Description: hypothetical protein DKFZp566D143
  misc_feature (1)..(210): NCBI GI NO: 39794258 NR Description: Unknown (protein for MGC:75017) [Homo sapiens]
  misc_feature (1)..(210): NCBI GI NO: 38679912 NR Description: hypothetical protein HSPC109 [Homo sapiens]
  misc_feature (1)..(210): NCBI GI NO: 34783965 NR Description: Unknown (protein for IMAGE:6142267) [Homo sapiens]
  misc_feature (1)..(210): NCBI GI NO: 27369948 NR Description: DNA segment
  misc_feature (1)..(207): NCBI GI NO: 21428350 NR Description: GM02932p [Drosophila melanogaster]
  misc_feature (1)..(207): NCBI GI NO: 20129839 NR Description: CG12128-PA [Drosophila melanogaster]
  misc_feature (1)..(203): NCBI GI NO: 39579860 NR Description: Hypothetical protein CBG24142
MHKNFKYVGLLPPLDAPHHVRKHEWSEFREGVTLGGDRSKGTLVDVGLSQNVLVEQILEQGKRVTVAMGTNRDLTPACIRKVVPPSSPSEEMGSYWGYKVRYASNLSGVINDSPYKEGYDHIIGTSEHGETIISSELILPSFRHLLIAFGGLAGLEESIEEDPNLNGKGANDVFASYFNTCPNQGSRTIRTEEALLISLQYFQDPIRRAGISN

SEQ ID NO: 15403 - DNA, 1513 bp, Triticum aestivum
  misc_feature (1)..(1513): Ceres Seq. ID no. 13598548
atagagcgagtcttcttcttcctccctgctctgaccgagatccgctccagtggactcgattagggttagggtttgcctctccgatcgtgaggcgggttgctacatctgccttgttcgtcggattccggtagaatcaaccactcgatcgacttaatttcccccgccggtgctgcctctgttttgccgaagatgctgggcggactttacggcgacctcccgccgcccacctcggcggccggcgacgacgacaagccgaccgcctccgtctggtcgagcgccaccaagatggcaccgcccaccctccgcaagccctccgcgaccttcgcccctcccacgtccctcctcaggaaccagcacccccgccccgccgccgctcccaaggccagcgccgtccaccagcagcagcagcagcagccgccgcaccccctccccctcgcctccgccgtcaccaccaccaccgcagcgtccttccaccccgccctcgtcgccgtgcagtccaccgtgctcgaggagtacgaccccgccaggcccaacgactacgaggactaccgcaaggagaagctcaagcgggccaaggacgccgagatgaagaaggagctcgaccggaggcgccgcgaggaccaggagcgggagagggagcgcgagctgagggaggccgaggcacgcctgcgggaggagcagtccagggcctcctccctcaacatatccggcgaggaagcctggaagaggagggccgccatgagcggcgctggcggcggcgctactcctcagagggtctcgtctccgccccacggcgatgccagtggcttctccatcccaggctcctcctcctctggcttgggcgtgggcgccggcggccagatgaccgctgcccagagaatgatggccaagatggggtggaaggaaggccaggggctcggcaagcaagagcagggaatcacagcgcctctggttgctaggaagactgatcggagggcaggggttattgtcgatgagagcagttccaggaggcccagatcagccaactttgaaggccagcccaccagagtagtgctgctgcgtaacatgattggtccgggcgaggttgacgacgagctggaagacgagattgcctcggagtgctccaagtttggggctgtgttgcgcgtgctgatattcgagatcacccaggcaaacttccccgcagacgaagcagtgaggatcttcgtgctgttcgagaggacagaagattcaaccaaggcgttggtcgaactggaagggcgctactttggcggacgcatagtgcacgccaccttcttcgatgagggaaggttcgagaggaacgagctcgctccgatgcccggcgaagtaccagggttcgactaaaccttcataagcagactaaagaactggacgttggtgtctcgggtgtaatttaatctagagcatgaacgctgtttttctcttttcttttgaggacagtttacggcatgttgacctattgccgttttattattgcagagttgttattgtt

SEQ ID NO: 15404 - protein, 391 aa, Triticum aestivum
  peptide (1)..(391): Ceres Seq. ID no. 13598549
  misc_feature (288)..(367): Pfam Name: a.k.a. RRM, RBD, or RNP domain Pfam Description: RNA recognition motif.
  misc_feature (20)..(391): NCBI GI NO: 34913374 NR Description: putative DNA damage repair protein
  misc_feature (1)..(390): NCBI GI NO: 15220757 NR Description: DNA damage repair protein -related
  misc_feature (1)..(390): NCBI GI NO: 421829 NR Description: DNA-damage repair protein DRT111 precursor -Arabidopsis thaliana
  misc_feature (1)..(159): NCBI GI NO: 34913374 NR Description: putative DNA damage repair protein
  misc_feature (132)..(386): NCBI GI NO: 21666567 NR Description: DNA repair enzyme [Toxoplasma gondii]
  misc_feature (132)..(386): NCBI GI NO: 21666569 NR Description: DNA repair enzyme [Toxoplasma gondii]
  misc_feature (113)..(381): NCBI GI NO: 14290573 NR Description: Unknown (protein for IMAGE:3868191) [Homo sapiens]
  misc_feature (113)..(381): NCBI GI NO: 22779924 NR Description: RIKEN cDNA 2700027J02 [Mus musculus]
  misc_feature (113)..(381): NCBI GI NO: 14249678 NR Description: splicing factor (45kD) [Homo sapiens]
  misc_feature (105)..(269): NCBI GI NO: 30923532 NR Description: CG17540-PB.3 [Drosophila melanogaster]
MLGGLYGDLPPPTSAAGDDDKPTASVWSSATKMAPPTLRKPSATFAPPTSLLRNQHPRPAAAPKASAVHQQQQQQPPHPLPLASAVTTTTAASFHPALVAVQSTVLEEYDPARPNDYEDYRKEKLKRAKDAEMKKELDRRRREDQERERERELREAEARLREEQSRASSLNISGEEAWKRRAAMSGAGGGATPQRVSSPPHGDASGFSIPGSSSSGLGVGAGGQMTAAQRMMAKMGWKEGQGLGKQEQGITAPLVARKTDRRAGVIVDESSSRRPRSANFEGQPTRVVLLRNMIGPGEVDDELEDEIASECSKFGAVLRVLIFEITQANFPADEAVRIFVLFERTEDSTKALVELEGRYFGGRIVHATFFDEGRFERNELAPMPGEVPGFD

SEQ ID NO: 15405 - protein, 359 aa, Triticum aestivum
  peptide (1)..(359): Ceres Seq. ID no. 13598550
  misc_feature (256)..(335): Pfam Name: a.k.a. RRM, RBD, or RNP domain Pfam Description: RNA recognition motif.
  misc_feature (1)..(359): NCBI GI NO: 34913374 NR Description: putative DNA damage repair protein
  misc_feature (1)..(358): NCBI GI NO: 15220757 NR Description: DNA damage repair protein -related
  misc_feature (1)..(358): NCBI GI NO: 421829 NR Description: DNA-damage repair protein DRT111 precursor -Arabidopsis thaliana
  misc_feature (1)..(127): NCBI GI NO: 34913374 NR Description: putative DNA damage repair protein
  misc_feature (100)..(354): NCBI GI NO: 21666567 NR Description: DNA repair enzyme [Toxoplasma gondii]
  misc_feature (100)..(354): NCBI GI NO: 21666569 NR Description: DNA repair enzyme [Toxoplasma gondii]
  misc_feature (81)..(349): NCBI GI NO: 14290573 NR Description: Unknown (protein for IMAGE:3868191) [Homo sapiens]
  misc_feature (81)..(349): NCBI GI NO: 22779924 NR Description: RIKEN cDNA 2700027J02 [Mus musculus]
  misc_feature (81)..(349): NCBI GI NO: 14249678 NR Description: splicing factor (45kD) [Homo sapiens]
  misc_feature (73)..(237): NCBI GI NO: 30923532 NR Description: CG17540-PB.3 [Drosophila melanogaster]
MAPPTLRKPSATFAPPTSLLRNQHPRPAAAPKASAVHQQQQQQPPHPLPLASAVTTTTAASFHPALVAVQSTVLEEYDPARPNDYEDYRKEKLKRAKDAEMKKELDRRRREDQERERERELREAEARLREEQSRASSLNISGEEAWKRRAAMSGAGGGATPQRVSSPPHGDASGFSIPGSSSSGLGVGAGGQMTAAQRMMAKMGWKEGQGLGKQEQGITAPLVARKTDRRAGVIVDESSSRRPRSANFEGQPTRVVLLRNMIGPGEVDDELEDEIASECSKFGAVLRVLIFEITQANFPADEAVRIFVLFERTEDSTKALVELEGRYFGGRIVHATFFDEGRFERNELAPMPGEVPGFD

SEQ ID NO: 15406 - protein, 259 aa, Triticum aestivum
  peptide (1)..(259): Ceres Seq. ID no. 13598551
  misc_feature (156)..(235): Pfam Name: a.k.a. RRM, RBD, or RNP domain Pfam Description: RNA recognition motif.
  misc_feature (1)..(259): NCBI GI NO: 34913374 NR Description: putative DNA damage repair protein
  misc_feature (1)..(258): NCBI GI NO: 15220757 NR Description: DNA damage repair protein -related
  misc_feature (1)..(258): NCBI GI NO: 421829 NR Description: DNA-damage repair protein DRT111 precursor -Arabidopsis thaliana
  misc_feature (1)..(27): NCBI GI NO: 34913374 NR Description: putative DNA damage repair protein
  misc_feature (1)..(254): NCBI GI NO: 21666567 NR Description: DNA repair enzyme [Toxoplasma gondii]
  misc_feature (1)..(254): NCBI GI NO: 21666569 NR Description: DNA repair enzyme [Toxoplasma gondii]
  misc_feature (1)..(249): NCBI GI NO: 14290573 NR Description: Unknown (protein for IMAGE:3868191) [Homo sapiens]
  misc_feature (1)..(249): NCBI GI NO: 22779924 NR Description: RIKEN cDNA 2700027J02 [Mus musculus]
  misc_feature (1)..(249): NCBI GI NO: 14249678 NR Description: splicing factor (45kD) [Homo sapiens]
  misc_feature (1)..(137): NCBI GI NO: 30923532 NR Description: CG17540-PB.3 [Drosophila melanogaster]
MKKELDRRRREDQERERERELREAEARLREEQSRASSLNISGEEAWKRRAAMSGAGGGATPQRVSSPPHGDASGFSIPGSSSSGLGVGAGGQMTAAQRMMAKMGWKEGQGLGKQEQGITAPLVARKTDRRAGVIVDESSSRRPRSANFEGQPTRVVLLRNMIGPGEVDDELEDEIASECSKFGAVLRVLIFEITQANFPADEAVRIFVLFERTEDSTKALVELEGRYFGGRIVHATFFDEGRFERNELAPMPGEVPGFD

SEQ ID NO: 15407 - DNA, 1031 bp, Triticum aestivum
  misc_feature (1)..(1031): Ceres Seq. ID no. 13585449
atttgcatttgatcacgcctctcaagtctacgcccatccgtctcacagcctctcggtctgggagacatcggctcaaagattactggagaaatggagacgagcgtgatcgtcctgtccgtcgtggtaggattgctcggggtcggaagcgccgtgctggggttcatcgccgagggcaccaagctcgagcggaatgacatcggggtgtccaagaccgagtgcgtgtaccccggcaacccggcgttcgcgctggggctggtcgcggcgctcctgctgctggcggcccagatcaccgtctcggccgccggccgctgctgcggctgctgcaagccccggggcgccgccttctccgcgtccaggcggaacatcggcgtcgtcttcgccgtcctctcatgggtggcgacggtgatcgcggagatctacttcgtgcagggcgcggcgtggaacgcgccggtgacgcgcgaggtcaacacggggtgctacttcgtcagggacggcgtgttcaggagggcggccatcctgagcatcatcgcaaccgtgctcgggatcaagtcctacttcttgcttcgcgccgctgcggccacggcggcggcggcggctgctgctgtgccaggatacccgggggccgtggcggggccgtcgttggcgggcgagcccaagcccgacgggatcgcgatgggtcaccctgctccgatgtacgggcaggcgccgtacgcgcactaccctccgcctccgaacgcgcaggggtacgggcagtacccgccccctccaaacgcgcaggggtatggacagtaccctcctcctgctcaggggtacgggcacggacactgattccagcccgctgctccccctcagggtcaaggatacgggcaagccgtgtagattgatcactggcctatgtgcaggcgtgctatgttcttctgtctctagtagaattctgctgcgtaaatcaccacacgggtcacggctcgtaggctgttcccgttgtggtgaatgatgatcgtctctgcttggaagtgcaaatttgagctttg

SEQ ID NO: 15408 - protein, 245 aa, Triticum aestivum
  peptide (1)..(245): Ceres Seq. ID no. 13585450
  misc_feature (1)..(176): NCBI GI NO: 18418215 NR Description: expressed protein [Arabidopsis thaliana]
  misc_feature (1)..(209): NCBI GI NO: 34897938 NR Description: ESTs AU082454
  misc_feature (39)..(176): NCBI GI NO: 10177066 NR Description: dbj|BAA92731
  misc_feature (173)..(245): NCBI GI NO: 295376 NR Description: surface glycoprotein
  misc_feature (173)..(245): NCBI GI NO: 323048 NR Description: surface antigen - Trypanosoma brucei
  misc_feature (3)..(172): NCBI GI NO: 22748411 NR Description: hypothetical protein
  misc_feature (1)..(170): NCBI GI NO: 18391509 NR Description: expressed protein [Arabidopsis thaliana]
  misc_feature (166)..(245): NCBI GI NO: 34907166 NR Description: P0423A12.20
  misc_feature (5)..(166): NCBI GI NO: 15225221 NR Description: expressed protein [Arabidopsis thaliana]
  misc_feature (174)..(245): NCBI GI NO: 34907166 NR Description: P0423A12.20
METSVIVLSVVVGLLGVGSAVLGFIAEGTKLERNDIGVSKTECVYPGNPAFALGLVAALLLLAAQITVSAAGRCCGCCKPRGAAFSASRRNIGVVFAVLSWVATVIAEIYFVQGAAWNAPVTREVNTGCYFVRDGVFRRAAILSIIATVLGIKSYFLLRAAAATAAAAAAAVPGYPGAVAGPSLAGEPKPDGIAMGHPAPMYGQAPYAHYPPPPNAQGYGQYPPPPNAQGYGQYPPPAQGYGHGH

SEQ ID NO: 15409 - protein, 164 aa, Triticum aestivum
  peptide (1)..(164): Ceres Seq. ID no. 13585451
MGGDGDRGDLLRAGRGVERAGDARGQHGVLLRQGRRVQEGGHPEHHRNRARDQVLLLASRRCGHGGGGGCCCARIPGGRGGAVVGGRAQARRDRDGSPCSDVRAGAVRALPSASERAGVRAVPAPSKRAGVWTVPSSCSGVRARTLIPARCSPSGSRIRASRVD

SEQ ID NO: 15410 - DNA, 1546 bp, Triticum aestivum
  misc_feature (1)..(1546): Ceres Seq. ID no. 13584616
atcccctctcccaccccaccaatctaccgtcgccggaccaggcgcgggccggggcgcgcgatgctgccgcagcagagccaggccgcggcgatgatgcagcaggcggccgcgatgcagtccatgtacgcgatgccgccgccgcctcaccaccaccacctcctcggcgccgcgccgccgcagcagatagagccaattctcactggaaatctgccacctggttttgatacaagtacatgccgcagtgtatatgtcggcaatattcatgttcaagtgactgaggcacttctccgagaggtttttcagagtgctggttcagttgacggatgcaagcttataagaaaagagaagtcctcatatggttttgttgactactacgaacgcggatcagctgccctagcaattttgacacttaacgggaagcaaatttttgggcagcctatcagagttaattgggcatatgctagcggtcagagggaggatacaacagaccatttccatatttttgttggtgatcttagccctgaggtcacggattctgcattatttgcattcttctcagcatattcccctaactgctctgatgctcgagtaatgtgggaccaaaagaccggaagatcaagaggttatggctttgtttccttcaggaatcaacaggatgcgcagagtgccataaatgacttaaatggtcagtggcttggaaatcggcagattcgttgcaactgggcaacaaaaggtgccaacagtggcgaggaccagctaacatcagattcgaaaagtatagctgatgtaaataacaatttcacagaaaatgcaaagcagaaatcaaacgaagatgctcccgagaataatccactgtacagaactgtttatgttgggaaccttgctcacgaggttactcaagacgtgcttcaccgtttcttccatgcacttggtgctggagccatcgaggaggtgcgtgtccagcatggcaaaggctttggttttgtcaagtacagcaatcatgccgaaactgcccttgcaattcagacgggtaatggtcgtattttgggtggtaaaccagtcaagtgttcctggggcaacaagcctacaccccctggtaccacctctgcgccactgccccctcctgctgctcctagccaccccgctgccgccgatctcgtagcgtatcaacgtgctattgcgatgagcaagatggcttcaacccaggcattgatgcaggctcagcatctcaggcacgcagccatggggatgggtgtaggtgcgagtcaggcgatgtacgatggtactttccagaacgtcggtgcctcgcagcagcaacagcagcagcagcagcagctcatgtactattaattccagccttggagggagctcatctttgtaatttgacccggattttattttttcttttctatcttcgtcgtgtctatatgcagtgtgacactatatgtcggtgttgccgtctggctgtgttggtagtgcaccgaatctgtgtctgtagtgatgcaagttgaccggttaatatcgaattttatgttattttctcgtg

SEQ ID NO: 15411 - protein, 449 aa, Triticum aestivum
  peptide (1)..(449): Ceres Seq. ID no. 13584617
  misc_feature (167)..(239): Pfam Name: a.k.a. RRM, RBD, or RNP domain Pfam Description: RNA recognition motif.
  misc_feature (21)..(449): NCBI GI NO: 23237933 NR Description: putative oligouridylate binding protein
  misc_feature (21)..(355): NCBI GI NO: 22208507 NR Description: putative oligouridylate binding protein
  misc_feature (356)..(449): NCBI GI NO: 22208507 NR Description: putative oligouridylate binding protein
  misc_feature (55)..(357): NCBI GI NO: 23928438 NR Description: putative oligouridylate binding protein [Zea mays]
  misc_feature (351)..(449): NCBI GI NO: 23928438 NR Description: putative oligouridylate binding protein [Zea mays]
  misc_feature (24)..(449): NCBI GI NO: 15231783 NR Description: oligouridylate binding protein (UBP1), putative
  misc_feature (24)..(449): NCBI GI NO: 21593280 NR Description: oligouridylate binding protein, putative
  misc_feature (24)..(449): NCBI GI NO: 18394471 NR Description: oligouridylate binding protein (UBP1), putative
  misc_feature (24)..(437): NCBI GI NO: 6996560 NR Description: oligouridylate binding protein
  misc_feature (19)..(449): NCBI GI NO: 15221031 NR Description: oligouridylate binding protein (UBP1), putative
IPSPTPPIYRRRTRRGPGRAMLPQQSQAAAMMQQAAAMQSMYAMPPPPHHHHLLGAAPPQQIEPILTGNLPPGFDTSTCRSVYVGNIHVQVTEALLREVFQSAGSVDGCKLIRKEKSSYGFVDYYERGSAALAILTLNGKQIFGQPIRVNWAYASGQREDTTDHFHIFVGDLSPEVTDSALFAFFSAYSPNCSDARVMWDQKTGRSRGYGFVSFRNQQDAQSAINDLNGQWLGNRQIRCNWATKGANSGEDQLTSDSKSIADVNNNFTENAKQKSNEDAPENNPLYRTVYVGNLAHEVTQDVLHRFFHALGAGAIEEVRVQHGKGFGFVKYSNHAETALAIQTGNGRILGGKPVKCSWGNKPTPPGTTSAPLPPPAAPSHPAAADLVAYQRAIAMSKMASTQALMQAQHLRHAAMGMGVGASQAMYDGTFQNVGASQQQQQQQQQLMYY

SEQ ID NO: 15412 - protein, 429 aa, Triticum aestivum
  peptide (1)..(429): Ceres Seq. ID no. 13584618
  misc_feature (147)..(219): Pfam Name: a.k.a. RRM, RBD, or RNP domain Pfam Description: RNA recognition motif.
  misc_feature (1)..(429): NCBI GI NO: 23237933 NR Description: putative oligouridylate binding protein
  misc_feature (1)..(335): NCBI GI NO: 22208507 NR Description: putative oligouridylate binding protein
  misc_feature (336)..(429): NCBI GI NO: 22208507 NR Description: putative oligouridylate binding protein
  misc_feature (35)..(337): NCBI GI NO: 23928438 NR Description: putative oligouridylate binding protein [Zea mays]
  misc_feature (331)..(429): NCBI GI NO: 23928438 NR Description: putative oligouridylate binding protein [Zea mays]
  misc_feature (4)..(429): NCBI GI NO: 15231783 NR Description: oligouridylate binding protein (UBP1), putative
  misc_feature (4)..(429): NCBI GI NO: 21593280 NR Description: oligouridylate binding protein, putative
  misc_feature (4)..(429): NCBI GI NO: 18394471 NR Description: oligouridylate binding protein (UBP1), putative
  misc_feature (4)..(417): NCBI GI NO: 6996560 NR Description: oligouridylate binding protein
  misc_feature (1)..(429): NCBI GI NO: 15221031 NR Description: oligouridylate binding protein (UBP1), putative
MLPQQSQAAAMMQQAAAMQSMYAMPPPPHHHHLLGAAPPQQIEPILTGNLPPGFDTSTCRSVYVGNIHVQVTEALLREVFQSAGSVDGCKLIRKEKSSYGFVDYYERGSAALAILTLNGKQIFGQPIRVNWAYASGQREDTTDHFHIFVGDLSPEVTDSALFAFFSAYSPNCSDARVMWDQKTGRSRGYGFVSFRNQQDAQSAINDLNGQWLGNRQIRCNWATKGANSGEDQLTSDSKSIADVNNNFTENAKQKSNEDAPENNPLYRTVYVGNLAHEVTQDVLHRFFHALGAGAIEEVRVQHGKGFGFVKYSNHAETALAIQTGNGRILGGKPVKCSWGNKPTPPGTTSAPLPPPAAPSHPAAADLVAYQRAIAMSKMASTQALMQAQHLRHAAMGMGVGASQAMYDGTFQNVGASQQQQQQQQQLMYY

SEQ ID NO: 15413 - protein, 419 aa, Triticum aestivum
  peptide (1)..(419): Ceres Seq. ID no. 13584619
  misc_feature (137)..(209): Pfam Name: a.k.a. RRM, RBD, or RNP domain Pfam Description: RNA recognition motif.
  misc_feature (1)..(419): NCBI GI NO: 23237933 NR Description: putative oligouridylate binding protein
  misc_feature (1)..(325): NCBI GI NO: 22208507 NR Description: putative oligouridylate binding protein
  misc_feature (326)..(419): NCBI GI NO: 22208507 NR Description: putative oligouridylate binding protein
  misc_feature (25)..(327): NCBI GI NO: 23928438 NR Description: putative oligouridylate binding protein [Zea mays]
  misc_feature (321)..(419): NCBI GI NO: 23928438 NR Description: putative oligouridylate binding protein [Zea mays]
  misc_feature (1)..(419): NCBI GI NO: 15231783 NR Description: oligouridylate binding protein (UBP1), putative
  misc_feature (1)..(419): NCBI GI NO: 21593280 NR Description: oligouridylate binding protein, putative
  misc_feature (1)..(419): NCBI GI NO: 18394471 NR Description: oligouridylate binding protein (UBP1), putative
  misc_feature (1)..(407): NCBI GI NO: 6996560 NR Description: oligouridylate binding protein
  misc_feature (1)..(419): NCBI GI NO: 15221031 NR Description: oligouridylate binding protein (UBP1), putative
MMQQAAAMQSMYAMPPPPHHHHLLGAAPPQQIEPILTGNLPPGFDTSTCRSVYVGNIHVQVTEALLREVFQSAGSVDGCKLIRKEKSSYGFVDYYERGSAALAILTLNGKQIFGQPIRVNWAYASGQREDTTDHFHIFVGDLSPEVTDSALFAFFSAYSPNCSDARVMWDQKTGRSRGYGFVSFRNQQDAQSAINDLNGQWLGNRQIRCNWATKGANSGEDQLTSDSKSIADVNNNFTENAKQKSNEDAPENNPLYRTVYVGNLAHEVTQDVLHRFFHALGAGAIEEVRVQHGKGFGFVKYSNHAETALAIQTGNGRILGGKPVKCSWGNKPTPPGTTSAPLPPPAAPSHPAAADLVAYQRAIAMSKMASTQALMQAQHLRHAAMGMGVGASQAMYDGTFQNVGASQQQQQQQQQLMYY

SEQ ID NO: 15414 - DNA, 1896 bp, Triticum aestivum
  misc_feature (1)..(1896): Ceres Seq. ID no. 13584620
atccagtggatcccggtgaacggcacatggcggctaccaactctcgatcccctttcttcttcctcctcgcccgaaccccagctactctccatcttgtgtaatcgctacttgatcatgtatctgtgagtgagattgccaccatatattcgagctactactattgtgtaccttatatttggtatcagtcgccaccaccatcctctccgcagcgcgctctggctcacttcatcgagacgcgccgactccgccaagcgcgcctgcaactggaacacatggatccagcggtcaagtcctacctcgacaagctctcggctacgatggaggccaacacgacggctctgacggtgatcacctcccgtctcgacgatctagcggcgtggcggcctgatctggagaagtgcgtcgccgatctaggggaagcggtggctgcgctgcagcaagggcgcccgggctccaccaacggcgagggtacacaggcgccggcaccaacggcgccactgccagcgactcgtgccacggcaagtcgtgtcgctgaaggtgcggcgggcgcaccccacgggtccattgaccatggcgagttccacctgcaacgagggtcgacggtggtgtcatcccagacgccgccgccactcccgaccaacggtcagctcaaaatcccgtccccaaattctcttccatcgccttttgcgcatgctagtcagatgttagcggggctaggacaggcgcacccatccatcgctttccctcaattctcgagggagaatccaaatctctggaaaaccatgtgtgagcagtactttaacatgtttggaatacacgaatacttttaggttccgatggtggcgctgaatttttcagggcctgctgccatttggctgcaatccatacagaaaaaactgggatcatttacatgggaatcatttgctgccttgctatgcactagatttgggcgtgatacgcaccgaaatctaatccgtcggttctacaccattaagcagacttcctcaatagctaattttattgagaaatttgagcttattacaaatcacttgagttcatattcagattcaattcacccctactatttccttactcgttttgtggagggactgaggccggacatacgcgcggtggtcatagtgcagcggccgccggacctggacacagcttgtgctctagctctgctccaggaggaggtggctgatggagcaggcctggagtcgtcgcggcagttccactaccagtcacggcctccaaaggtgaacacgcgccctcccgcggcgctgccacttccaccaccatcgggtcgcccaccaccaccagctggggcggccgatcggcgtgggactgaagccgctcgagctgaagcggcgaaaatcaagactctgcgcgactacagaagagcgcgggggctatgcttcaagtgtggcgaacgatggggtcatgaccacacctgacccacgtcagtccagctccatgtggtcgaggaactcctggagctgtttggcatcgacgcagtcacggatcagcagagcttgccagcggacgagcaacagcaagatatagtcatggcgatctcatgatctgccgtgacgggaggggtgtcatctaaagctttttagctccgtgcttggattcaaggccgcgaagtgttgatgctcgtcgactccggaagcacaacttcttcttcctcctcgcccgaaccctagttactctcgatcttgtgtaatcgctacttgatcgtgtatctgtgagtgagattgccaccatatattcgagctactactactatgtaaaaaaaaaaaaaaaaaaaaaaaaaaaaaaaaaaaaaaaaaaaaaaaaaaaaaaaaaaaaccaaaaaaaaaaaaaaaaaggtttatcaataccgccaacctc

SEQ ID NO: 15415 - protein, 206 aa, Triticum aestivum
  peptide (1)..(206): Ceres Seq. ID no. 13584621
  misc_feature (1)..(93): Pfam Name: Pfam Description:  Retrotransposon gag protein
  misc_feature (1)..(206): NCBI GI NO: 38346427 NR Description: OSJNBa0019J05.12
  misc_feature (1)..(206): NCBI GI NO: 37536012 NR Description: putative gag-pol polyprotein
  misc_feature (1)..(206): NCBI GI NO: 32489310 NR Description: OSJNBa0060B20.14
  misc_feature (1)..(206): NCBI GI NO: 38568032 NR Description: OSJNBa0065J03.2
  misc_feature (1)..(206): NCBI GI NO: 15451606 NR Description: Putative mutator-like transposase [Oryza sativa]
  misc_feature (1)..(206): NCBI GI NO: 38346675 NR Description: OSJNBa0079C19.28
  misc_feature (1)..(206): NCBI GI NO: 38345213 NR Description: OSJNBb0043H09.2
  misc_feature (1)..(206): NCBI GI NO: 38567914 NR Description: OSJNBa0088I22.10
  misc_feature (1)..(206): NCBI GI NO: 18568269 NR Description: putative gag-pol polyprotein [Zea mays]
  misc_feature (1)..(206): NCBI GI NO: 38567864 NR Description: OSJNBa0091D06.2
MVALNFSGPAAIWLQSIQKKLGSFTWESFAALLCTRFGRDTHRNLIRRFYTIKQTSSIANFIEKFELITNHLSSYSDSIHPYYFLTRFVEGLRPDIRAVVIVQRPPDLDTACALALLQEEVADGAGLESSRQFHYQSRPPKVNTRPPAALPLPPPSGRPPPPAGAADRRGTEAARAEAAKIKTLRDYRRARGLCFKCGERWGHDHT

SEQ ID NO: 15416 - protein, 185 aa, Triticum aestivum
  peptide (1)..(185): Ceres Seq. ID no. 13584622
  misc_feature (148)..(185): NCBI GI NO: 38346427 NR Description: OSJNBa0019J05.12
  misc_feature (4)..(185): NCBI GI NO: 37536012 NR Description: putative gag-pol polyprotein
  misc_feature (35)..(185): NCBI GI NO: 32489310 NR Description: OSJNBa0060B20.14
  misc_feature (148)..(185): NCBI GI NO: 38568032 NR Description: OSJNBa0065J03.2
  misc_feature (111)..(185): NCBI GI NO: 15451606 NR Description: Putative mutator-like transposase [Oryza sativa]
  misc_feature (128)..(185): NCBI GI NO: 38346675 NR Description: OSJNBa0079C19.28
  misc_feature (128)..(185): NCBI GI NO: 38345213 NR Description: OSJNBb0043H09.2
  misc_feature (35)..(185): NCBI GI NO: 38567914 NR Description: OSJNBa0088I22.10
  misc_feature (1)..(185): NCBI GI NO: 18568269 NR Description: putative gag-pol polyprotein [Zea mays]
  misc_feature (1)..(185): NCBI GI NO: 21671877 NR Description: Putative retroelement
MDPAVKSYLDKLSATMEANTTALTVITSRLDDLAAWRPDLEKCVADLGEAVAALQQGRPGSTNGEGTQAPAPTAPLPATRATASRVAEGAAGAPHGSIDHGEFHLQRGSTVVSSQTPPPLPTNGQLKIPSPNSLPSPFAHASQMLAGLGQAHPSIAFPQFSRENPNLWKTMCEQYFNMFGIHEYF

SEQ ID NO: 15417 - protein, 170 aa, Triticum aestivum
  peptide (1)..(170): Ceres Seq. ID no. 13584623
  misc_feature (133)..(170): NCBI GI NO: 38346427 NR Description: OSJNBa0019J05.12
  misc_feature (1)..(170): NCBI GI NO: 37536012 NR Description: putative gag-pol polyprotein
  misc_feature (20)..(170): NCBI GI NO: 32489310 NR Description: OSJNBa0060B20.14
  misc_feature (133)..(170): NCBI GI NO: 38568032 NR Description: OSJNBa0065J03.2
  misc_feature (96)..(170): NCBI GI NO: 15451606 NR Description: Putative mutator-like transposase [Oryza sativa]
  misc_feature (113)..(170): NCBI GI NO: 38346675 NR Description: OSJNBa0079C19.28
  misc_feature (113)..(170): NCBI GI NO: 38345213 NR Description: OSJNBb0043H09.2
  misc_feature (20)..(170): NCBI GI NO: 38567914 NR Description: OSJNBa0088I22.10
  misc_feature (1)..(170): NCBI GI NO: 18568269 NR Description: putative gag-pol polyprotein [Zea mays]
  misc_feature (1)..(170): NCBI GI NO: 21671877 NR Description: Putative retroelement
MEANTTALTVITSRLDDLAAWRPDLEKCVADLGEAVAALQQGRPGSTNGEGTQAPAPTAPLPATRATASRVAEGAAGAPHGSIDHGEFHLQRGSTVVSSQTPPPLPTNGQLKIPSPNSLPSPFAHASQMLAGLGQAHPSIAFPQFSRENPNLWKTMCEQYFNMFGIHEYF

SEQ ID NO: 15418 - DNA, 1783 bp, Triticum aestivum
  misc_feature (1)..(1783): Ceres Seq. ID no. 14316025
acgcaaaaagggacgaaaaaccaaacttctcccgcaagactggctcgcaccaaatcgcatcgcccttggagtcgcccctcactgatcccttggcgtcctgcttcccaagccacagcccacaggcccccacgcccagctcctcccgctccgatttcacagcctgcgagctagccatgtcgattcggccgctgttgctgccggagccgccgggcgaggtggatcgggcgccggagatcttcgcgggtggcgtggccgcggtgcgccgcgcagttgtcatcgggaacggctgcgccggcgccgagaaccagtgcctcggcctcgtccgcgccctcggcctggccgaccgcctcacgctctaccgtattatcaggccaaccggaggaatcaacaagtggctgcactttctccctatctccttgcataaaatggtggaccaagtactcagacatatactgtctaacacgacattcacaacactgtttcaaggaaaactgtcggcaccttatcctgtcagtaatgttcaatctcttggattgtcttctgtactggaagcagattccaaaaggatagtgacaatggtccgtgataccttcgagaaggaaggcctggcgatagttgttgcttgtggccgtgataccataccatatgcaagctctgtaaggtgtttagctccagataatgtctttgtcattcagatacaacaccccaggtatcgccttgataggtttgatttggtggtgactcctcgccatgattactacgctttaactgcaaagggacaacaagaagtaccgtggctttttcggagatggattactccacgagaaccacccggtcctaatgtggtcctgacgtctggagcacttcaccaagcagattctgctgcactacgcattgctgctacaaactggcatgatgaacttgctcccttgccaaagccattggtagtagtaaatattggagaaccaacaagaaactgtaattatggtgtagaccttgccaagcagttggtaagctcactgcacaatgtttcagagacctgtggaagtgtcagaatttcattttccaggagaacgccacaaaacgtgtccgatcttatattgagagagttcagcacacatccaaagttctacatttggggtggtgaagaacctaacccacacctagggcatcttgcatgggccgatgctttcatcataacagcagactcgataagtatgctaagtgaggcgtgcagcactgggaagccggtctatgtcgttggaactgagcattgcaggtggaaattctcagattttcacaacactctgcagaaacgaggggctgttcgtcctttcactggatcagaagatatgtcagacagctggagctaccctcctctgaacgatgccattgatgtggctgcacgggttcgtgaagtgcttgcacaacgtggatggacagtgggttaatagcggtcgaagcagagaaaaagagtgccatttttgctcagttacgttccaagcccagacaattcagagcctgcatttcagttatcttagttgcatctgcatgaggattttttttgccatatgaccgttgcaagacgacatcgcttcttttcaaaagatggctatatttttgggaacatactgtgtaaagttttgagcaatcacacatagacagcagtgtttattcttggcatattcatgcattattgtacctagtgttatgctgtaaagaagccgatagaagtgcgaacggaagttaaaaatctttgtccttggaacgaggtgacatcatg

SEQ ID NO: 15419 - protein, 482 aa, Triticum aestivum
  peptide (1)..(482): Ceres Seq. ID no. 14316026
  misc_feature (92)..(475): Pfam Name: DUF1022 Pfam Description: Protein of unknown function
  misc_feature (281)..(469): NCBI GI NO: 38346329 NR Description: OJ000126_13.11
  misc_feature (75)..(246): NCBI GI NO: 38346329 NR Description: OJ000126_13.11
  misc_feature (60)..(481): NCBI GI NO: 18420465 NR Description: expressed protein [Arabidopsis thaliana]
  misc_feature (120)..(481): NCBI GI NO: 9757815 NR Description: gene_id:MWD9
  misc_feature (60)..(119): NCBI GI NO: 9757815 NR Description: gene_id:MWD9
  misc_feature (132)..(481): NCBI GI NO: 18415120 NR Description: expressed protein [Arabidopsis thaliana]
  misc_feature (86)..(161): NCBI GI NO: 18415120 NR Description: expressed protein [Arabidopsis thaliana]
  misc_feature (86)..(451): NCBI GI NO: 9759316 NR Description: gene_id:MBL20
  misc_feature (264)..(478): NCBI GI NO: 16127081 NR Description: conserved hypothetical protein
  misc_feature (206)..(251): NCBI GI NO: 16127081 NR Description: conserved hypothetical protein
AKRDEKPNFSRKTGSHQIASPLESPLTDPLASCFPSHSPQAPTPSSSRSDFTACELAMSIRPLLLPEPPGEVDRAPEIFAGGVAAVRRAVVIGNGCAGAENQCLGLVRALGLADRLTLYRIIRPTGGINKWLHFLPISLHKMVDQVLRHILSNTTFTTLFQGKLSAPYPVSNVQSLGLSSVLEADSKRIVTMVRDTFEKEGLAIVVACGRDTIPYASSVRCLAPDNVFVIQIQHPRYRLDRFDLVVTPRHDYYALTAKGQQEVPWLFRRWITPREPPGPNVVLTSGALHQADSAALRIAATNWHDELAPLPKPLVVVNIGEPTRNCNYGVDLAKQLVSSLHNVSETCGSVRISFSRRTPQNVSDLILREFSTHPKFYIWGGEEPNPHLGHLAWADAFIITADSISMLSEACSTGKPVYVVGTEHCRWKFSDFHNTLQKRGAVRPFTGSEDMSDSWSYPPLNDAIDVAARVREVLAQRGWTVG

SEQ ID NO: 15420 - protein, 425 aa, Triticum aestivum
  peptide (1)..(425): Ceres Seq. ID no. 14316027
  misc_feature (35)..(418): Pfam Name: DUF1022 Pfam Description: Protein of unknown function
  misc_feature (224)..(412): NCBI GI NO: 38346329 NR Description: OJ000126_13.11
  misc_feature (18)..(189): NCBI GI NO: 38346329 NR Description: OJ000126_13.11
  misc_feature (3)..(424): NCBI GI NO: 18420465 NR Description: expressed protein [Arabidopsis thaliana]
  misc_feature (63)..(424): NCBI GI NO: 9757815 NR Description: gene_id:MWD9
  misc_feature (3)..(62): NCBI GI NO: 9757815 NR Description: gene_id:MWD9
  misc_feature (75)..(424): NCBI GI NO: 18415120 NR Description: expressed protein [Arabidopsis thaliana]
  misc_feature (29)..(104): NCBI GI NO: 18415120 NR Description: expressed protein [Arabidopsis thaliana]
  misc_feature (29)..(394): NCBI GI NO: 9759316 NR Description: gene_id:MBL20
  misc_feature (207)..(421): NCBI GI NO: 16127081 NR Description: conserved hypothetical protein
  misc_feature (149)..(194): NCBI GI NO: 16127081 NR Description: conserved hypothetical protein
MSIRPLLLPEPPGEVDRAPEIFAGGVAAVRRAVVIGNGCAGAENQCLGLVRALGLADRLTLYRIIRPTGGINKWLHFLPISLHKMVDQVLRHILSNTTFTTLFQGKLSAPYPVSNVQSLGLSSVLEADSKRIVTMVRDTFEKEGLAIVVACGRDTIPYASSVRCLAPDNVFVIQIQHPRYRLDRFDLVVTPRHDYYALTAKGQQEVPWLFRRWITPREPPGPNVVLTSGALHQADSAALRIAATNWHDELAPLPKPLVVVNIGEPTRNCNYGVDLAKQLVSSLHNVSETCGSVRISFSRRTPQNVSDLILREFSTHPKFYIWGGEEPNPHLGHLAWADAFIITADSISMLSEACSTGKPVYVVGTEHCRWKFSDFHNTLQKRGAVRPFTGSEDMSDSWSYPPLNDAIDVAARVREVLAQRGWTVG

SEQ ID NO: 15421 - protein, 341 aa, Triticum aestivum
  peptide (1)..(341): Ceres Seq. ID no. 14316028
  misc_feature (1)..(334): Pfam Name: DUF1022 Pfam Description: Protein of unknown function
  misc_feature (140)..(328): NCBI GI NO: 38346329 NR Description: OJ000126_13.11
  misc_feature (1)..(105): NCBI GI NO: 38346329 NR Description: OJ000126_13.11
  misc_feature (1)..(340): NCBI GI NO: 18420465 NR Description: expressed protein [Arabidopsis thaliana]
  misc_feature (1)..(340): NCBI GI NO: 9757815 NR Description: gene_id:MWD9
  misc_feature (1)..(340): NCBI GI NO: 18415120 NR Description: expressed protein [Arabidopsis thaliana]
  misc_feature (1)..(20): NCBI GI NO: 18415120 NR Description: expressed protein [Arabidopsis thaliana]
  misc_feature (1)..(310): NCBI GI NO: 9759316 NR Description: gene_id:MBL20
  misc_feature (123)..(337): NCBI GI NO: 16127081 NR Description: conserved hypothetical protein
  misc_feature (65)..(110): NCBI GI NO: 16127081 NR Description: conserved hypothetical protein
  misc_feature (139)..(341): NCBI GI NO: 22968024 NR Description: hypothetical protein [Rhodospirillum rubrum]
MVDQVLRHILSNTTFTTLFQGKLSAPYPVSNVQSLGLSSVLEADSKRIVTMVRDTFEKEGLAIVVACGRDTIPYASSVRCLAPDNVFVIQIQHPRYRLDRFDLVVTPRHDYYALTAKGQQEVPWLFRRWITPREPPGPNVVLTSGALHQADSAALRIAATNWHDELAPLPKPLVVVNIGEPTRNCNYGVDLAKQLVSSLHNVSETCGSVRISFSRRTPQNVSDLILREFSTHPKFYIWGGEEPNPHLGHLAWADAFIITADSISMLSEACSTGKPVYVVGTEHCRWKFSDFHNTLQKRGAVRPFTGSEDMSDSWSYPPLNDAIDVAARVREVLAQRGWTVG

SEQ ID NO: 15422 - DNA, 1097 bp, Triticum aestivum
  misc_feature (1)..(1097): Ceres Seq. ID no. 12625805
gatatccggcatcgccgcgtctctcacataaacgcacgcttccatcgggacaagacagcggcgcgtagcaaagggaacacggcgaggccggcgatggatgtcaagtgccggcgtctggaggggaaggtggccgtcgtgacggcttccacgcagggcatcggcctcgccatcgccgagcgcctcggccgggagggcgccgcggtcgtcatctcctcccgcaagcagaaaaacgtggacgatgcggtggagggcctcagggcaaaggggatcaccgtggtcggggccgtctgccacgtctccaacgccgagcagcgcaagcaccttgttgacacggccgtcaagaatttcggacatattgatattgttgtctccaatgccgctgcaaatccttctgtggatagcatactagagatgaaagagtcagttcttgacaagctatgggacattaatgtcaaagcttctattcttctacttcaggacgccgcaccacatttgaggaagggatcatctgtgatactaatttcttcaattgctggctataatcctgatgcagctttaacgatgtatggtgttacaaagactgccctttttggtctcacgaaggctcttgctactgagatgggcccaaatacccgtgttaactgtatagctcctgggtttgttcctacacgttttgctggtttcctcacaactaatgagaccattagaaatgaacttatcgagaggagcataattaagagattgggtagcgtggaagacatggcttcagccgccgctttcctggcatccgacgatgcatccttcattacagctgaaacaattgttgttgctggaggaacacaatcaagactatagagaagttttgagggtcaatcagccacagtgtcctgatcaataaatatagtgatactagtaggtctagtatacaacatttcaagtgcgcttagatataaacaagatgcagtgtaataaatttgatgttggggtgccatacaatcttgcaaggacgaatgatagtctatcggcattgtggtccgaacatgtattgttgtataacctgtgttcatgtataggaattgcgatgaagtgacagagtg

SEQ ID NO: 15423 - protein, 284 aa, Triticum aestivum
  peptide (1)..(284): Ceres Seq. ID no. 12625806
  misc_feature (37)..(284): NCBI GI NO: 18412959 NR Description: coded for by A
  misc_feature (37)..(284): NCBI GI NO: 33991766 NR Description: Unknown (protein for MGC:65987) [Danio rerio]
  misc_feature (26)..(284): NCBI GI NO: 7023407 NR Description: unnamed protein product [Homo sapiens]
  misc_feature (39)..(284): NCBI GI NO: 11559412 NR Description: NADPH-dependent retinol dehydrogenase/reductase
  misc_feature (26)..(284): NCBI GI NO: 33337583 NR Description: Hep27-like protein [Homo sapiens]
  misc_feature (37)..(284): NCBI GI NO: 21355319 NR Description: CG10672-PA [Drosophila melanogaster]
  misc_feature (39)..(284): NCBI GI NO: 11559416 NR Description: NADPH-dependent retinol dehydrogenase/reductase
  misc_feature (39)..(284): NCBI GI NO: 17298119 NR Description: carbonyl reductase/NADP-retinol dehydrogenase
  misc_feature (39)..(284): NCBI GI NO: 27807351 NR Description: NADPH-dependent retinol dehydrogenase/reductase
  misc_feature (32)..(284): NCBI GI NO: 39593247 NR Description: Hypothetical protein CBG09503
DIRHRRVSHINARFHRDKTAARSKGNTARPAMDVKCRRLEGKVAVVTASTQGIGLAIAERLGREGAAVVISSRKQKNVDDAVEGLRAKGITVVGAVCHVSNAEQRKHLVDTAVKNFGHIDIVVSNAAANPSVDSILEMKESVLDKLWDINVKASILLLQDAAPHLRKGSSVILISSIAGYNPDAALTMYGVTKTALFGLTKALATEMGPNTRVNCIAPGFVPTRFAGFLTTNETIRNELIERSIIKRLGSVEDMASAAAFLASDDASFITAETIVVAGGTQSRL

SEQ ID NO: 15424 - protein, 253 aa, Triticum aestivum
  peptide (1)..(253): Ceres Seq. ID no. 12625807
  misc_feature (6)..(253): NCBI GI NO: 18412959 NR Description: coded for by A
  misc_feature (6)..(253): NCBI GI NO: 33991766 NR Description: Unknown (protein for MGC:65987) [Danio rerio]
  misc_feature (1)..(253): NCBI GI NO: 7023407 NR Description: unnamed protein product [Homo sapiens]
  misc_feature (8)..(253): NCBI GI NO: 11559412 NR Description: NADPH-dependent retinol dehydrogenase/reductase
  misc_feature (1)..(253): NCBI GI NO: 33337583 NR Description: Hep27-like protein [Homo sapiens]
  misc_feature (6)..(253): NCBI GI NO: 21355319 NR Description: CG10672-PA [Drosophila melanogaster]
  misc_feature (8)..(253): NCBI GI NO: 11559416 NR Description: NADPH-dependent retinol dehydrogenase/reductase
  misc_feature (8)..(253): NCBI GI NO: 17298119 NR Description: carbonyl reductase/NADP-retinol dehydrogenase
  misc_feature (8)..(253): NCBI GI NO: 27807351 NR Description: NADPH-dependent retinol dehydrogenase/reductase
  misc_feature (1)..(253): NCBI GI NO: 39593247 NR Description: Hypothetical protein CBG09503
MDVKCRRLEGKVAVVTASTQGIGLAIAERLGREGAAVVISSRKQKNVDDAVEGLRAKGITVVGAVCHVSNAEQRKHLVDTAVKNFGHIDIVVSNAAANPSVDSILEMKESVLDKLWDINVKASILLLQDAAPHLRKGSSVILISSIAGYNPDAALTMYGVTKTALFGLTKALATEMGPNTRVNCIAPGFVPTRFAGFLTTNETIRNELIERSIIKRLGSVEDMASAAAFLASDDASFITAETIVVAGGTQSRL

SEQ ID NO: 15425 - protein, 147 aa, Triticum aestivum
  peptide (1)..(147): Ceres Seq. ID no. 12625808
  misc_feature (1)..(147): NCBI GI NO: 18412959 NR Description: coded for by A
  misc_feature (1)..(147): NCBI GI NO: 33991766 NR Description: Unknown (protein for MGC:65987) [Danio rerio]
  misc_feature (1)..(147): NCBI GI NO: 7023407 NR Description: unnamed protein product [Homo sapiens]
  misc_feature (1)..(147): NCBI GI NO: 11559412 NR Description: NADPH-dependent retinol dehydrogenase/reductase
  misc_feature (1)..(147): NCBI GI NO: 33337583 NR Description: Hep27-like protein [Homo sapiens]
  misc_feature (1)..(147): NCBI GI NO: 21355319 NR Description: CG10672-PA [Drosophila melanogaster]
  misc_feature (1)..(147): NCBI GI NO: 11559416 NR Description: NADPH-dependent retinol dehydrogenase/reductase
  misc_feature (1)..(147): NCBI GI NO: 17298119 NR Description: carbonyl reductase/NADP-retinol dehydrogenase
  misc_feature (1)..(147): NCBI GI NO: 27807351 NR Description: NADPH-dependent retinol dehydrogenase/reductase
  misc_feature (1)..(147): NCBI GI NO: 39593247 NR Description: Hypothetical protein CBG09503
MKESVLDKLWDINVKASILLLQDAAPHLRKGSSVILISSIAGYNPDAALTMYGVTKTALFGLTKALATEMGPNTRVNCIAPGFVPTRFAGFLTTNETIRNELIERSIIKRLGSVEDMASAAAFLASDDASFITAETIVVAGGTQSRL

SEQ ID NO: 15426 - DNA, 1483 bp, Triticum aestivum
  misc_feature (1)..(1483): Ceres Seq. ID no. 13598565
acacacatcgatcagcagcagcctcaagcaaacgcaaactcgtactgctagcccgtgtagtttgttaagcagcaagcttgcatccacacatcgatcggcagaccaccgtggtcaccggacaccaatccaccatgccgtccattgacaaggccaccgacaacggcgagatgaagcagcggcagccggagcaggagctggtctgcgtcacgggggccggaggcttcatcggctcctgggtcgtgaaggagctcctcctccgcggctaccgcgtcaggggaaccgccagggaccccgctgaccaaaagaacgcacacctgctggcgatggagggcgccgaggagaggctcaccctgtgccgggccgacgttcttgactacgacggcctccgcaccgccttccgcggctgccacggcgtcttccacgtcgcctcgccagtctccaacgacccggacctcgtgccggtcgccgtggaggggacgaggaacgtgatcagagcggcggcggacgcgggcgtgcggcgcgtggtgttcacttcgtcctatggcgccgtgcacatggaccccaaccgcaggcccgacgcagtgctcgacgagtcgtgctggagcgactatgagtactgcaaaaacacagggaacatgtactgctgcgccaagatgatggcggagatcacggcgacggaggaggcggccaagaggggcctggagctagcggtggtggtgccgtccatgaccatgggccccatgctgcagcagtcgctcaacttcagcagcagccacgtggcccgctacctcaccggcgcaaagcccacctacccgaatgccgtcgccgcctacaccgacgtccgtgatgtcgcccgcgcgcacgtcttcgtctacgagcacccggacgcgcgcggccgctacctctgcatcggtgccgtgctgcaccgcgcgcatttccttcagctcctcggcgacctctttcctcagtacaacataaccgccaagtgcgaagacgacgacaattccatggccaagccatacaagttctcgaaccggaggctgagggagctcggattagagttcactccgttgagggaaagcttgtacgagacagtgatgtgcttgcagaaaaagggctatctgcctctccccgttgttcccatagcacagaagcgtgcgtacttgtaacagggcaggacaggggataagcccatctgatgaaacaacaagagcaaagccgcaagaacaaaagaagatactatccggattttggagcttcagcatagaattaattgtgtattcctacaaagcacagtgtggcatgtaaatagaattaaaaccacaataagtattttggaacggagggagtactacctccgtctaggtgaataagtcattcgcgcagttctaggtcatcgatttgaggaattaaacatatgctaaaaaaaaaaaaaaaaaagcttatcgataccgtcgacctcgagggggggcccggtacccaa

SEQ ID NO: 15427 - protein, 345 aa, Triticum aestivum
  peptide (1)..(345): Ceres Seq. ID no. 15222372
  misc_feature (25)..(308): Pfam Name: Pfam Description:  NAD dependent epimerase/dehydratase family
  misc_feature (8)..(345): NCBI GI NO: 18307514 NR Description: cinnamoyl CoA reductase [Oryza sativa]
  misc_feature (20)..(335): NCBI GI NO: 34902520 NR Description: putative cinnamoyl-CoA reductase
  misc_feature (20)..(332): NCBI GI NO: 34902518 NR Description: putative cinnamoyl-CoA reductase
  misc_feature (21)..(334): NCBI GI NO: 9998901 NR Description: cinnamoyl-CoA reductase
  misc_feature (21)..(334): NCBI GI NO: 2960364 NR Description: cinnamoyl CoA reductase
  misc_feature (21)..(334): NCBI GI NO: 40233135 NR Description: cinnamoyl CoA reductase [Populus tomentosa]
  misc_feature (20)..(334): NCBI GI NO: 7239228 NR Description: cinnamoyl CoA reductase; CCR [Populus tremuloides]
  misc_feature (21)..(337): NCBI GI NO: 25989515 NR Description: cinnamoyl CoA reductase [Eucalyptus globulus]
  misc_feature (21)..(337): NCBI GI NO: 7431407 NR Description: cinnamoyl-CoA reductase (EC 1
  misc_feature (21)..(337): NCBI GI NO: 10304406 NR Description: cinnamoyl-CoA reductase [Eucalyptus saligna]
MPSIDKATDNGEMKQRQPEQELVCVTGAGGFIGSWVVKELLLRGYRVRGTARDPADQKNAHLLAMEGAEERLTLCRADVLDYDGLRTAFRGCHGVFHVASPVSNDPDLVPVAVEGTRNVIRAAADAGVRRVVFTSSYGAVHMDPNRRPDAVLDESCWSDYEYCKNTGNMYCCAKMMAEITATEEAAKRGLELAVVVPSMTMGPMLQQSLNFSSSHVARYLTGAKPTYPNAVAAYTDVRDVARAHVFVYEHPDARGRYLCIGAVLHRAHFLQLLGDLFPQYNITAKCEDDDNSMAKPYKFSNRRLRELGLEFTPLRESLYETVMCLQKKGYLPLPVVPIAQKRAYL

SEQ ID NO: 15428 - protein, 333 aa, Triticum aestivum
  peptide (1)..(333): Ceres Seq. ID no. 15222373
  misc_feature (13)..(296): Pfam Name: Pfam Description:  NAD dependent epimerase/dehydratase family
  misc_feature (1)..(333): NCBI GI NO: 18307514 NR Description: cinnamoyl CoA reductase [Oryza sativa]
  misc_feature (8)..(323): NCBI GI NO: 34902520 NR Description: putative cinnamoyl-CoA reductase
  misc_feature (8)..(320): NCBI GI NO: 34902518 NR Description: putative cinnamoyl-CoA reductase
  misc_feature (9)..(322): NCBI GI NO: 9998901 NR Description: cinnamoyl-CoA reductase
  misc_feature (9)..(322): NCBI GI NO: 2960364 NR Description: cinnamoyl CoA reductase
  misc_feature (9)..(322): NCBI GI NO: 40233135 NR Description: cinnamoyl CoA reductase [Populus tomentosa]
  misc_feature (8)..(322): NCBI GI NO: 7239228 NR Description: cinnamoyl CoA reductase; CCR [Populus tremuloides]
  misc_feature (9)..(325): NCBI GI NO: 25989515 NR Description: cinnamoyl CoA reductase [Eucalyptus globulus]
  misc_feature (9)..(325): NCBI GI NO: 7431407 NR Description: cinnamoyl-CoA reductase (EC 1
  misc_feature (9)..(325): NCBI GI NO: 10304406 NR Description: cinnamoyl-CoA reductase [Eucalyptus saligna]
MKQRQPEQELVCVTGAGGFIGSWVVKELLLRGYRVRGTARDPADQKNAHLLAMEGAEERLTLCRADVLDYDGLRTAFRGCHGVFHVASPVSNDPDLVPVAVEGTRNVIRAAADAGVRRVVFTSSYGAVHMDPNRRPDAVLDESCWSDYEYCKNTGNMYCCAKMMAEITATEEAAKRGLELAVVVPSMTMGPMLQQSLNFSSSHVARYLTGAKPTYPNAVAAYTDVRDVARAHVFVYEHPDARGRYLCIGAVLHRAHFLQLLGDLFPQYNITAKCEDDDNSMAKPYKFSNRRLRELGLEFTPLRESLYETVMCLQKKGYLPLPVVPIAQKRAYL

SEQ ID NO: 15429 - protein, 281 aa, Triticum aestivum
  peptide (1)..(281): Ceres Seq. ID no. 15222374
  misc_feature (1)..(244): Pfam Name: Pfam Description:  NAD dependent epimerase/dehydratase family
  misc_feature (1)..(281): NCBI GI NO: 18307514 NR Description: cinnamoyl CoA reductase [Oryza sativa]
  misc_feature (1)..(271): NCBI GI NO: 34902520 NR Description: putative cinnamoyl-CoA reductase
  misc_feature (1)..(268): NCBI GI NO: 34902518 NR Description: putative cinnamoyl-CoA reductase
  misc_feature (1)..(270): NCBI GI NO: 9998901 NR Description: cinnamoyl-CoA reductase
  misc_feature (1)..(270): NCBI GI NO: 2960364 NR Description: cinnamoyl CoA reductase
  misc_feature (1)..(270): NCBI GI NO: 40233135 NR Description: cinnamoyl CoA reductase [Populus tomentosa]
  misc_feature (1)..(270): NCBI GI NO: 7239228 NR Description: cinnamoyl CoA reductase; CCR [Populus tremuloides]
  misc_feature (1)..(273): NCBI GI NO: 25989515 NR Description: cinnamoyl CoA reductase [Eucalyptus globulus]
  misc_feature (1)..(273): NCBI GI NO: 7431407 NR Description: cinnamoyl-CoA reductase (EC 1
  misc_feature (1)..(273): NCBI GI NO: 10304406 NR Description: cinnamoyl-CoA reductase [Eucalyptus saligna]
MEGAEERLTLCRADVLDYDGLRTAFRGCHGVFHVASPVSNDPDLVPVAVEGTRNVIRAAADAGVRRVVFTSSYGAVHMDPNRRPDAVLDESCWSDYEYCKNTGNMYCCAKMMAEITATEEAAKRGLELAVVVPSMTMGPMLQQSLNFSSSHVARYLTGAKPTYPNAVAAYTDVRDVARAHVFVYEHPDARGRYLCIGAVLHRAHFLQLLGDLFPQYNITAKCEDDDNSMAKPYKFSNRRLRELGLEFTPLRESLYETVMCLQKKGYLPLPVVPIAQKRAYL

SEQ ID NO: 15430 - DNA, 1212 bp, Triticum aestivum
  misc_feature (1)..(1212): Ceres Seq. ID no. 13598589
gagtaggacagccccagaggaggaggatacacagccgctagctcttcccccgcggcgcccgatctcgtcgtacttggagccttggaggagactcgaaccctaatcccctcccgccgcaggagagatcccgctcagcctcggctccaatccgcgactcgactcgactcgaagctccagctccgccgccgccccccgccgctgccgatggatccgaagctggtggaggtgacgcagctgatcgaccgcttcaaggcggccttcaaggccagcaatttcgacgtctgctcgaccctcctctcgcagctcaaggtcctcctcaccaagttccccagccttcccccggtgttccagcagacgcccaacgccgtggaggagctcaagcttgcgagggaaatttatgagcaggcagttattttgagtgtgaaaatggaagaccaagatgcatttgaaagggacttctgccagctcaagccgtattacatggacacatgtggcataattcccccatcatcggaggagtacccaatcatgggggctaaccttctgaggctgttagtccagaatagaattgcggagttccacactgagctggagcttcttcccgccaaagcgctggataatgcttacatcaagcacggggttgagctcgagcagtcctttatggagggcgcatacaaccgcgtgctgagcgctcgacaaaccgcgccgcatgaaacctacatatacttcatggaccttctcgtcaaaacggttagagacgagatagctgggtgcagcgagaagggatatgattacctgtcaataaacgacgcgaagcagatgtttaagttcagctccgacaaggaactgcaacagtacatcgcagaggagcaccccgagtgggatgtcaaggacggccgggtcttgttccagaaggcgaaggagtcccagccctgcaaggagatcccggcggcgccggtcatcaaccagacccttggctacgcgagggaattggagaggattgtgtgatttgtttgcctcttttttcttcatctttggactgagtttcccatgaagaggtggattattggattgccctgtgactcggctgtactattttgttaaatcgtttgtttcacctagggtttccaaagctacacaactgtgaaatgtcggcctaaaatggcacaagaaacaatgcctgttatgttaatcaattgattgtgtaagcgg

SEQ ID NO: 15431 - protein, 267 aa, Triticum aestivum
  peptide (1)..(267): Ceres Seq. ID no. 13598590
  misc_feature (109)..(267): Pfam Name: Pfam Description:  26S proteasome non-ATPase regulatory subunit Nin1/mts3
  misc_feature (1)..(267): NCBI GI NO: 17297985 NR Description: 26S proteasome regulatory particle non-ATPase subunit12
  misc_feature (1)..(267): NCBI GI NO: 15217661 NR Description: 26S proteasome regulatory subunit
  misc_feature (109)..(267): NCBI GI NO: 15238267 NR Description: hypothetical protein [Arabidopsis thaliana]
  misc_feature (8)..(267): NCBI GI NO: 38372874 NR Description: Probable 26S proteasome non-ATPase regulatory subunit 8
  misc_feature (27)..(267): NCBI GI NO: 21357229 NR Description: CG4157-PA [Drosophila melanogaster]
  misc_feature (10)..(267): NCBI GI NO: 13278567 NR Description: RIKEN cDNA 6720456J22 gene [Mus musculus]
  misc_feature (5)..(267): NCBI GI NO: 40787635 NR Description: Unknown (protein for IMAGE:6055235) [Homo sapiens]
  misc_feature (10)..(267): NCBI GI NO: 34855658 NR Description: similar to proteasome 26S non-ATPase subunit 8
  misc_feature (10)..(267): NCBI GI NO: 26371077 NR Description: unnamed protein product [Mus musculus]
  misc_feature (20)..(267): NCBI GI NO: 4506233 NR Description: proteasome 26S non-ATPase subunit 8
MDPKLVEVTQLIDRFKAAFKASNFDVCSTLLSQLKVLLTKFPSLPPVFQQTPNAVEELKLAREIYEQAVILSVKMEDQDAFERDFCQLKPYYMDTCGIIPPSSEEYPIMGANLLRLLVQNRIAEFHTELELLPAKALDNAYIKHGVELEQSFMEGAYNRVLSARQTAPHETYIYFMDLLVKTVRDEIAGCSEKGYDYLSINDAKQMFKFSSDKELQQYIAEEHPEWDVKDGRVLFQKAKESQPCKEIPAAPVINQTLGYARELERIV

SEQ ID NO: 15432 - protein, 193 aa, Triticum aestivum
  peptide (1)..(193): Ceres Seq. ID no. 13598591
  misc_feature (35)..(193): Pfam Name: Pfam Description:  26S proteasome non-ATPase regulatory subunit Nin1/mts3
  misc_feature (1)..(193): NCBI GI NO: 17297985 NR Description: 26S proteasome regulatory particle non-ATPase subunit12
  misc_feature (1)..(193): NCBI GI NO: 15217661 NR Description: 26S proteasome regulatory subunit
  misc_feature (35)..(193): NCBI GI NO: 15238267 NR Description: hypothetical protein [Arabidopsis thaliana]
  misc_feature (1)..(193): NCBI GI NO: 38372874 NR Description: Probable 26S proteasome non-ATPase regulatory subunit 8
  misc_feature (1)..(193): NCBI GI NO: 21357229 NR Description: CG4157-PA [Drosophila melanogaster]
  misc_feature (1)..(193): NCBI GI NO: 13278567 NR Description: RIKEN cDNA 6720456J22 gene [Mus musculus]
  misc_feature (1)..(193): NCBI GI NO: 40787635 NR Description: Unknown (protein for IMAGE:6055235) [Homo sapiens]
  misc_feature (1)..(193): NCBI GI NO: 34855658 NR Description: similar to proteasome 26S non-ATPase subunit 8
  misc_feature (1)..(193): NCBI GI NO: 26371077 NR Description: unnamed protein product [Mus musculus]
  misc_feature (1)..(193): NCBI GI NO: 4506233 NR Description: proteasome 26S non-ATPase subunit 8
MEDQDAFERDFCQLKPYYMDTCGIIPPSSEEYPIMGANLLRLLVQNRIAEFHTELELLPAKALDNAYIKHGVELEQSFMEGAYNRVLSARQTAPHETYIYFMDLLVKTVRDEIAGCSEKGYDYLSINDAKQMFKFSSDKELQQYIAEEHPEWDVKDGRVLFQKAKESQPCKEIPAAPVINQTLGYARELERIV

SEQ ID NO: 15433 - protein, 175 aa, Triticum aestivum
  peptide (1)..(175): Ceres Seq. ID no. 13598592
  misc_feature (17)..(175): Pfam Name: Pfam Description:  26S proteasome non-ATPase regulatory subunit Nin1/mts3
  misc_feature (1)..(175): NCBI GI NO: 17297985 NR Description: 26S proteasome regulatory particle non-ATPase subunit12
  misc_feature (1)..(175): NCBI GI NO: 15217661 NR Description: 26S proteasome regulatory subunit
  misc_feature (17)..(175): NCBI GI NO: 15238267 NR Description: hypothetical protein [Arabidopsis thaliana]
  misc_feature (1)..(175): NCBI GI NO: 38372874 NR Description: Probable 26S proteasome non-ATPase regulatory subunit 8
  misc_feature (1)..(175): NCBI GI NO: 21357229 NR Description: CG4157-PA [Drosophila melanogaster]
  misc_feature (1)..(175): NCBI GI NO: 13278567 NR Description: RIKEN cDNA 6720456J22 gene [Mus musculus]
  misc_feature (1)..(175): NCBI GI NO: 40787635 NR Description: Unknown (protein for IMAGE:6055235) [Homo sapiens]
  misc_feature (1)..(175): NCBI GI NO: 34855658 NR Description: similar to proteasome 26S non-ATPase subunit 8
  misc_feature (1)..(175): NCBI GI NO: 26371077 NR Description: unnamed protein product [Mus musculus]
  misc_feature (1)..(175): NCBI GI NO: 4506233 NR Description: proteasome 26S non-ATPase subunit 8
MDTCGIIPPSSEEYPIMGANLLRLLVQNRIAEFHTELELLPAKALDNAYIKHGVELEQSFMEGAYNRVLSARQTAPHETYIYFMDLLVKTVRDEIAGCSEKGYDYLSINDAKQMFKFSSDKELQQYIAEEHPEWDVKDGRVLFQKAKESQPCKEIPAAPVINQTLGYARELERIV

SEQ ID NO: 15434 - DNA, 1826 bp, Triticum aestivum
  misc_feature (1)..(1826): Ceres Seq. ID no. 13597647
gaccattacctagaacatcctaatcgaaaaaaaaataaaccaagagagagagagggaggaagggcggaaggcggagtggagcgaccccgaataaccctagcttcttcctggtcctcgtcgtcgccgtggccctcctactcgccagccacccggccggcgccccgatcccgccgccatggtgctcggcaagatcgccatcgtcatcggctcagggatcatcggaaccatggtcaccggcggcgacggcagcaagcttccggacctcagggacgtgctctccttctccttcaagttcatgaagcaggacaagaaggaaggctcgtccaacgcctcgccgcagaacgacctcttgttgtctcaggtcaactatctcagggatcagctccaagcattgtcccgtgaggctcaatgcccgcagattatcaacgtcaatggcggaccaggcgctggtgcttatggtttaacttttattgctgttggagccattggctatttatacataagatggaagggatggaaaatttctgatatgatgtttgtcaccaagcgtggcttggctgatgcctgcaacatagttggcaaacaattggatcaggtttcagaaagtgttcatgcttcaaaaaagcatttggctggaaggatcgaccgagtcgattgtagtctagatgaatgccacgaaattattgaagccacagggaaagaggttacagtcatacatggagatctaagtgcctttcaggaggaaatacaatcagttcaccatgttgtccgcactctggagacaaagcttggacgccttgcatatactcaagatcacacaacacgaggaatacatgagttatgtgagttcactaaaagattggatcggagtccgaaagccgatactcttaaggtcacagcatcaactcctctccctgcaatcgagtcttcagaaggaattactaggactgcttcgttgccgtcaggttcagaacccgtgtctcctgtagctcaatcacctagagcagatccacctaaggttctgcgttcgtctacagccatatcagcatcaggactgagtatgctagctggaactacagcaatacctaaaagggctgtgatcaaccgggcaacttcgatgaaggaaggagtgccgacccccgaggccccaaagaacacttcaagcgcagcagcagcaaccatcaagagacctgtttcgggttcgagccggttcggtttcctgcggggtttcgccagttgagggacaggcgaacagtgatgatatactacatatggcactgccttgctgtggtttgtgccaaaggacagcacgacatcccagtaacctttttttattacttgtaacatttattatctatctatccatctagctagatatgcagggcaggtaaggtagtagaaaaacatggcagtgggcaaaggaaggggaatttgctttgccagacaaatttttgtagaaagcaaaatatgtatggtggagatacgaggggcggtgatatgatggcaagagatgcgttacgtacactgtcatttactcgcatggttaattttggcgaagcaaggatgatgcatacgaggtttctgatctcgatatcaatggatattacatgtagccgcatctggaagatgcggatgaaaacagtgtcttgttcgagtctagcgagtcatgtagcgggggactgctactgttttaagtatgggcaagcaagaatgttgctgataagaaaaggagacctggtagctggtggtgttgctctaccaccattctgttgctgatgctttgcaccatgaataaaatcaatctgcttagcatgttttgtgcaccc

SEQ ID NO: 15435 - protein, 354 aa, Triticum aestivum
  peptide (1)..(354): Ceres Seq. ID no. 15222156
  misc_feature (62)..(354): NCBI GI NO: 15128438 NR Description: contains EST D16001
  misc_feature (1)..(39): NCBI GI NO: 15128438 NR Description: contains EST D16001
  misc_feature (1)..(252): NCBI GI NO: 34894218 NR Description: P0439B06.30
  misc_feature (1)..(296): NCBI GI NO: 22329773 NR Description: expressed protein [Arabidopsis thaliana]
  misc_feature (1)..(275): NCBI GI NO: 30688826 NR Description: expressed protein [Arabidopsis thaliana]
  misc_feature (219)..(308): NCBI GI NO: 34893996 NR Description: P0672D08.6
  misc_feature (88)..(151): NCBI GI NO: 34893996 NR Description: P0672D08.6
  misc_feature (1)..(314): NCBI GI NO: 7208775 NR Description: hypothetical protein [Cicer arietinum]
  misc_feature (1)..(295): NCBI GI NO: 18390460 NR Description: expressed protein [Arabidopsis thaliana]
  misc_feature (1)..(215): NCBI GI NO: 18396143 NR Description: bZIP family transcription factor
MVLGKIAIVIGSGIIGTMVTGGDGSKLPDLRDVLSFSFKFMKQDKKEGSSNASPQNDLLLSQVNYLRDQLQALSREAQCPQIINVNGGPGAGAYGLTFIAVGAIGYLYIRWKGWKISDMMFVTKRGLADACNIVGKQLDQVSESVHASKKHLAGRIDRVDCSLDECHEIIEATGKEVTVIHGDLSAFQEEIQSVHHVVRTLETKLGRLAYTQDHTTRGIHELCEFTKRLDRSPKADTLKVTASTPLPAIESSEGITRTASLPSGSEPVSPVAQSPRADPPKVLRSSTAISASGLSMLAGTTAIPKRAVINRATSMKEGVPTPEAPKNTSSAAAATIKRPVSGSSRFGFLRGFAS

SEQ ID NO: 15436 - protein, 337 aa, Triticum aestivum
  peptide (1)..(337): Ceres Seq. ID no. 15222157
  misc_feature (45)..(337): NCBI GI NO: 15128438 NR Description: contains EST D16001
  misc_feature (1)..(22): NCBI GI NO: 15128438 NR Description: contains EST D16001
  misc_feature (1)..(235): NCBI GI NO: 34894218 NR Description: P0439B06.30
  misc_feature (1)..(279): NCBI GI NO: 22329773 NR Description: expressed protein [Arabidopsis thaliana]
  misc_feature (1)..(258): NCBI GI NO: 30688826 NR Description: expressed protein [Arabidopsis thaliana]
  misc_feature (202)..(291): NCBI GI NO: 34893996 NR Description: P0672D08.6
  misc_feature (71)..(134): NCBI GI NO: 34893996 NR Description: P0672D08.6
  misc_feature (1)..(297): NCBI GI NO: 7208775 NR Description: hypothetical protein [Cicer arietinum]
  misc_feature (1)..(278): NCBI GI NO: 18390460 NR Description: expressed protein [Arabidopsis thaliana]
  misc_feature (1)..(198): NCBI GI NO: 18396143 NR Description: bZIP family transcription factor
MVTGGDGSKLPDLRDVLSFSFKFMKQDKKEGSSNASPQNDLLLSQVNYLRDQLQALSREAQCPQIINVNGGPGAGAYGLTFIAVGAIGYLYIRWKGWKISDMMFVTKRGLADACNIVGKQLDQVSESVHASKKHLAGRIDRVDCSLDECHEIIEATGKEVTVIHGDLSAFQEEIQSVHHVVRTLETKLGRLAYTQDHTTRGIHELCEFTKRLDRSPKADTLKVTASTPLPAIESSEGITRTASLPSGSEPVSPVAQSPRADPPKVLRSSTAISASGLSMLAGTTAIPKRAVINRATSMKEGVPTPEAPKNTSSAAAATIKRPVSGSSRFGFLRGFAS

SEQ ID NO: 15437 - protein, 314 aa, Triticum aestivum
  peptide (1)..(314): Ceres Seq. ID no. 15222158
  misc_feature (22)..(314): NCBI GI NO: 15128438 NR Description: contains EST D16001
  misc_feature (1)..(212): NCBI GI NO: 34894218 NR Description: P0439B06.30
  misc_feature (1)..(256): NCBI GI NO: 22329773 NR Description: expressed protein [Arabidopsis thaliana]
  misc_feature (1)..(235): NCBI GI NO: 30688826 NR Description: expressed protein [Arabidopsis thaliana]
  misc_feature (179)..(268): NCBI GI NO: 34893996 NR Description: P0672D08.6
  misc_feature (48)..(111): NCBI GI NO: 34893996 NR Description: P0672D08.6
  misc_feature (1)..(274): NCBI GI NO: 7208775 NR Description: hypothetical protein [Cicer arietinum]
  misc_feature (1)..(255): NCBI GI NO: 18390460 NR Description: expressed protein [Arabidopsis thaliana]
  misc_feature (1)..(175): NCBI GI NO: 18396143 NR Description: bZIP family transcription factor
  misc_feature (1)..(175): NCBI GI NO: 21537323 NR Description: unknown [Arabidopsis thaliana]
MKQDKKEGSSNASPQNDLLLSQVNYLRDQLQALSREAQCPQIINVNGGPGAGAYGLTFIAVGAIGYLYIRWKGWKISDMMFVTKRGLADACNIVGKQLDQVSESVHASKKHLAGRIDRVDCSLDECHEIIEATGKEVTVIHGDLSAFQEEIQSVHHVVRTLETKLGRLAYTQDHTTRGIHELCEFTKRLDRSPKADTLKVTASTPLPAIESSEGITRTASLPSGSEPVSPVAQSPRADPPKVLRSSTAISASGLSMLAGTTAIPKRAVINRATSMKEGVPTPEAPKNTSSAAAATIKRPVSGSSRFGFLRGFAS

SEQ ID NO: 15438 - DNA, 1088 bp, Triticum aestivum
  misc_feature (1)..(1088): Ceres Seq. ID no. 13585437
agtcagccatacaggtcgatcacgggagttttgactcttgaacccgatttggagcaaccgagcggcgagcggcgcgggcgcgggagcggccaaggagtgcgacagtgcgaccggcaaccggcagccggcgcggcttgctgtcgtctcggcgaaggcgcgcccagatctactaaagcaatcacatggcaactctgaaagatgcagtagcacggaagcctatactggcaacaatccgcctgcttgttccagctggtgctgcacgtcctgcaccaccagttggtccggcactcggtttttataggctcaatttgatggcgttctgcaaggatttcaatgcaaggacccagaaatacaaggcagaaactcctatgcaggtcacgctaactgcctacaaagatagcactttcgagtttgtagtcaagtcgccgtccgtttcatggttcctcaagaaggcagcaggaattgagaccgccagcactcgtcctggtcacaacgttgtgtcatccctaacactccgccacgtttacgagattgcaaaacttaaacaagctgaccccttctgcaagcatatgtcactcgaggcgttgtgcaaatctatcattggcacagctaactcaatgggcattgagattgtcaaggatctctgagtggattggctcgtctccaatactaccaagctcctaccttcccaggtgacatttgtgagctgtagtttctcattgatgtgggagaagatgggagtttttcaactgttgatccttactgagctcttcagcccaggcaatattttcattttcttcatacccagtcttcagctgttcctgctgcaatgttgatctcttccatgggagatatttcacggaaaataatgttacttctaagcttgcgccagacgaacaatattatccatttctgttaccttgccaagttgctagttgtttgtttacttttggtatcattgtcatttctcgtgtaatggcaatgtatttgaaacacaaatatgtaatggttaattttggtgcttttacatgacttttacttgcaactttaaaaaaaaaaaaaaaaaacggcacgagaagcttatcgat

SEQ ID NO: 15439 - protein, 154 aa, Triticum aestivum
  peptide (1)..(154): Ceres Seq. ID no. 13585438
  misc_feature (80)..(150): Pfam Name: Pfam Description:  Ribosomal protein L11, RNA binding domain
  misc_feature (3)..(154): NCBI GI NO: 37535204 NR Description: putative ribosomal protein L11
  misc_feature (1)..(154): NCBI GI NO: 15823668 NR Description: mitochondrial ribosomal protein L11
  misc_feature (1)..(154): NCBI GI NO: 15237029 NR Description: ribosomal protein L11p family
  misc_feature (17)..(151): NCBI GI NO: 19115007 NR Description: probable 50S ribosomal protein L11
  misc_feature (11)..(151): NCBI GI NO: 7245461 NR Description: Chain K
  misc_feature (11)..(151): NCBI GI NO: 7767082 NR Description: Chain A
  misc_feature (11)..(151): NCBI GI NO: 15643220 NR Description: ribosomal protein L11 [Thermotoga maritima]
  misc_feature (11)..(151): NCBI GI NO: 15988475 NR Description: Chain A
  misc_feature (11)..(152): NCBI GI NO: 22966134 NR Description: hypothetical protein [Rhodospirillum rubrum]
  misc_feature (17)..(151): NCBI GI NO: 7767188 NR Description: Chain L
MATLKDAVARKPILATIRLLVPAGAARPAPPVGPALGFYRLNLMAFCKDFNARTQKYKAETPMQVTLTAYKDSTFEFVVKSPSVSWFLKKAAGIETASTRPGHNVVSSLTLRHVYEIAKLKQADPFCKHMSLEALCKSIIGTANSMGIEIVKDL

SEQ ID NO: 15440 - protein, 111 aa, Triticum aestivum
  peptide (1)..(111): Ceres Seq. ID no. 13585439
  misc_feature (37)..(107): Pfam Name: Pfam Description:  Ribosomal protein L11, RNA binding domain
  misc_feature (1)..(111): NCBI GI NO: 37535204 NR Description: putative ribosomal protein L11
  misc_feature (1)..(111): NCBI GI NO: 15823668 NR Description: mitochondrial ribosomal protein L11
  misc_feature (1)..(111): NCBI GI NO: 15237029 NR Description: ribosomal protein L11p family
  misc_feature (1)..(108): NCBI GI NO: 19115007 NR Description: probable 50S ribosomal protein L11
  misc_feature (1)..(108): NCBI GI NO: 7245461 NR Description: Chain K
  misc_feature (1)..(108): NCBI GI NO: 15988475 NR Description: Chain A
  misc_feature (1)..(108): NCBI GI NO: 7767082 NR Description: Chain A
  misc_feature (1)..(108): NCBI GI NO: 15643220 NR Description: ribosomal protein L11 [Thermotoga maritima]
  misc_feature (1)..(109): NCBI GI NO: 22966134 NR Description: hypothetical protein [Rhodospirillum rubrum]
  misc_feature (1)..(108): NCBI GI NO: 7767188 NR Description: Chain L
MAFCKDFNARTQKYKAETPMQVTLTAYKDSTFEFVVKSPSVSWFLKKAAGIETASTRPGHNVVSSLTLRHVYEIAKLKQADPFCKHMSLEALCKSIIGTANSMGIEIVKDL

SEQ ID NO: 15441 - protein, 92 aa, Triticum aestivum
  peptide (1)..(92): Ceres Seq. ID no. 13585440
  misc_feature (18)..(88): Pfam Name: Pfam Description:  Ribosomal protein L11, RNA binding domain
  misc_feature (1)..(92): NCBI GI NO: 37535204 NR Description: putative ribosomal protein L11
  misc_feature (1)..(92): NCBI GI NO: 15823668 NR Description: mitochondrial ribosomal protein L11
  misc_feature (1)..(92): NCBI GI NO: 15237029 NR Description: ribosomal protein L11p family
  misc_feature (1)..(89): NCBI GI NO: 19115007 NR Description: probable 50S ribosomal protein L11
  misc_feature (1)..(89): NCBI GI NO: 7245461 NR Description: Chain K
  misc_feature (1)..(89): NCBI GI NO: 7767082 NR Description: Chain A
  misc_feature (1)..(89): NCBI GI NO: 15988475 NR Description: Chain A
  misc_feature (1)..(89): NCBI GI NO: 15643220 NR Description: ribosomal protein L11 [Thermotoga maritima]
  misc_feature (1)..(90): NCBI GI NO: 22966134 NR Description: hypothetical protein [Rhodospirillum rubrum]
  misc_feature (1)..(89): NCBI GI NO: 7767188 NR Description: Chain L
MQVTLTAYKDSTFEFVVKSPSVSWFLKKAAGIETASTRPGHNVVSSLTLRHVYEIAKLKQADPFCKHMSLEALCKSIIGTANSMGIEIVKDL

SEQ ID NO: 15442 - DNA, 1210 bp, Triticum aestivum
  misc_feature (1)..(1210): Ceres Seq. ID no. 13597551
ctacggccgcttagccaacgcgaggcgccgccggagacggcgatgcaggcggcggcctcttaccggggcgcggcaggccaccgccgcgccggccacccctcccggcgccctcccggtccctctcttcttctacccgtcagcgtcgctggcgtcggccgtttctccgacgcggcggttccgctccgagtcggctccctgccccttcctcgggctcgcggcggcggcgatttcgcgcggctggatgccagggacggggaggcgtggcagctgacgcgcgcgctcgggctaatccttcctggtcaccagaaaatggtgcatgctaacctgctgaaaactgctgttctttcaacaatgtcgatgctcataatgcctcttgaggcatcagcggagacatgtcaaccaactagttcttttgccaatatgccgattttcattgctgtcgctctaataggagctgctgtgggtggattattagcacggcaaagaaaggacgaactgaagcgattgaataatcaacttcgtcagattaatactgcccttagaaggcaggcacagattgaatcgtttgcccccggccttacttatgcgcctgtagggagagcaggagaaattgaggtcattgttgatcccaggaagcagcagttggtggtaaatttgaaaaatgggaagaattatatgaggaatcaggaccttgataaggcagtaatggagttcaagacagctctggagcttgcagaaagcataggggatcgctttgaggagaagaaagctgcgcgaggattaggcgcatcactacaaaggttgggacagtacagagaagcaatgagctggtactacaaggttctggcgctatcaaaggagaccggcgaggattctggctgcaccgaggcctacggcgcgatagccgactgctgcgtcgatctcggcgacttggaaggagcagcgaagctgtatgacgagtacatatcaaggctgcagccccgtgattgagcgctcggaccgttgttggagatcaaacacatcatatgccagagcccgtccgttgccctgcttctgatgtcgcggttgcttgcttgctatctggcggaaaacgagccgattttgcttgtcttttaacttggttggagcacttggattgtccatgaggagcccctctctacttgtgtatatgaatttcgatggtgctatggcatgtgctggttcagagttc

SEQ ID NO: 15443 - protein, 329 aa, Triticum aestivum
  peptide (1)..(329): Ceres Seq. ID no. 13597552
  misc_feature (295)..(326): Pfam Name: Pfam Description:  TPR Domain
  misc_feature (102)..(326): NCBI GI NO: 34914598 NR Description: P0520B06.12
  misc_feature (113)..(326): NCBI GI NO: 9294636 NR Description: emb|CAB41081
  misc_feature (113)..(326): NCBI GI NO: 18400278 NR Description: tetratricopeptide repeat (TPR)-containing protein
  misc_feature (208)..(323): NCBI GI NO: 23125284 NR Description: hypothetical protein [Nostoc punctiforme]
LRPLSQREAPPETAMQAAASYRGAAGHRRAGHPSRRPPGPSLLLPVSVAGVGRFSDAAVPLRVGSLPLPRARGGGDFARLDARDGEAWQLTRALGLILPGHQKMVHANLLKTAVLSTMSMLIMPLEASAETCQPTSSFANMPIFIAVALIGAAVGGLLARQRKDELKRLNNQLRQINTALRRQAQIESFAPGLTYAPVGRAGEIEVIVDPRKQQLVVNLKNGKNYMRNQDLDKAVMEFKTALELAESIGDRFEEKKAARGLGASLQRLGQYREAMSWYYKVLALSKETGEDSGCTEAYGAIADCCVDLGDLEGAAKLYDEYISRLQPRD

SEQ ID NO: 15444 - protein, 315 aa, Triticum aestivum
  peptide (1)..(315): Ceres Seq. ID no. 13597553
  misc_feature (281)..(312): Pfam Name: Pfam Description:  TPR Domain
  misc_feature (88)..(312): NCBI GI NO: 34914598 NR Description: P0520B06.12
  misc_feature (99)..(312): NCBI GI NO: 9294636 NR Description: emb|CAB41081
  misc_feature (99)..(312): NCBI GI NO: 18400278 NR Description: tetratricopeptide repeat (TPR)-containing protein
  misc_feature (194)..(309): NCBI GI NO: 23125284 NR Description: hypothetical protein [Nostoc punctiforme]
MQAAASYRGAAGHRRAGHPSRRPPGPSLLLPVSVAGVGRFSDAAVPLRVGSLPLPRARGGGDFARLDARDGEAWQLTRALGLILPGHQKMVHANLLKTAVLSTMSMLIMPLEASAETCQPTSSFANMPIFIAVALIGAAVGGLLARQRKDELKRLNNQLRQINTALRRQAQIESFAPGLTYAPVGRAGEIEVIVDPRKQQLVVNLKNGKNYMRNQDLDKAVMEFKTALELAESIGDRFEEKKAARGLGASLQRLGQYREAMSWYYKVLALSKETGEDSGCTEAYGAIADCCVDLGDLEGAAKLYDEYISRLQPRD

SEQ ID NO: 15445 - protein, 226 aa, Triticum aestivum
  peptide (1)..(226): Ceres Seq. ID no. 13597554
  misc_feature (192)..(223): Pfam Name: Pfam Description:  TPR Domain
  misc_feature (1)..(223): NCBI GI NO: 34914598 NR Description: P0520B06.12
  misc_feature (10)..(223): NCBI GI NO: 9294636 NR Description: emb|CAB41081
  misc_feature (10)..(223): NCBI GI NO: 18400278 NR Description: tetratricopeptide repeat (TPR)-containing protein
  misc_feature (105)..(220): NCBI GI NO: 23125284 NR Description: hypothetical protein [Nostoc punctiforme]
MVHANLLKTAVLSTMSMLIMPLEASAETCQPTSSFANMPIFIAVALIGAAVGGLLARQRKDELKRLNNQLRQINTALRRQAQIESFAPGLTYAPVGRAGEIEVIVDPRKQQLVVNLKNGKNYMRNQDLDKAVMEFKTALELAESIGDRFEEKKAARGLGASLQRLGQYREAMSWYYKVLALSKETGEDSGCTEAYGAIADCCVDLGDLEGAAKLYDEYISRLQPRD

SEQ ID NO: 15446 - DNA, 549 bp, Triticum aestivum
  misc_feature (1)..(549): Ceres Seq. ID no. 13597555
agagctccgtccccccgcgtcgccgcttagcgtacgcaccaccgcaccggcagcaggcgaggggcggccggcgacctactttggagcgcagacggaaggtttctacattttccatggcgcttgtggtgatgtgcgggcagccgtgcagcggcaagtcagaggctgcagcttgtctcgctgccgctcttcgctcctccgtgcttgacgttactgtccgcgtcattgacgagtcatcgctccatcttggacgcgatgaaagctacaaagatatggttgtggagaaaaacttaagaggagttttgagatcagaagttgataggtccgtgtcacgggatggcataatcatcgtggattctctgaacaatattaaggggtaccgatacgagctgtggtgtcttgcgcgtgcttcgggaataagatattgtgtgttcttttgtgatacagaagtggaccattgtagggattggaacgtcaagcgtcaggagaaaggagaaccctcatatgatagcaatatatttgaagatctggcaaggagatttgagaggcctg

SEQ ID NO: 15447 - protein, 182 aa, Triticum aestivum
  peptide (1)..(182): Ceres Seq. ID no. 13597556
  misc_feature (38)..(181): NCBI GI NO: 15222972 NR Description: expressed protein [Arabidopsis thaliana]
  misc_feature (38)..(181): NCBI GI NO: 23504265 NR Description: DRL1 protein [Arabidopsis thaliana]
  misc_feature (38)..(181): NCBI GI NO: 28850452 NR Description: similar to similarity to S
  misc_feature (38)..(145): NCBI GI NO: 19923939 NR Description: hypothetical protein BC012173 [Homo sapiens]
  misc_feature (38)..(145): NCBI GI NO: 20270210 NR Description: RIKEN cDNA 1110001A12 [Mus musculus]
  misc_feature (38)..(181): NCBI GI NO: 33300521 NR Description: Hypothetical protein Y57G11C.43
  misc_feature (38)..(181): NCBI GI NO: 39583457 NR Description: Hypothetical protein CBG21524
  misc_feature (38)..(181): NCBI GI NO: 19115468 NR Description: similarity to S. cerevisiae kti12 protein
  misc_feature (38)..(181): NCBI GI NO: 6322739 NR Description: Protein involved in resistance to K
  misc_feature (38)..(142): NCBI GI NO: 40744828 NR Description: hypothetical protein AN2499.2
SSVPPRRRLAYAPPHRQQARGGRRPTLERRRKVSTFSMALVVMCGQPCSGKSEAAACLAAALRSSVLDVTVRVIDESSLHLGRDESYKDMVVEKNLRGVLRSEVDRSVSRDGIIIVDSLNNIKGYRYELWCLARASGIRYCVFFCDTEVDHCRDWNVKRQEKGEPSYDSNIFEDLARRFERP

SEQ ID NO: 15448 - protein, 145 aa, Triticum aestivum
  peptide (1)..(145): Ceres Seq. ID no. 13597557
  misc_feature (1)..(144): NCBI GI NO: 15222972 NR Description: expressed protein [Arabidopsis thaliana]
  misc_feature (1)..(144): NCBI GI NO: 23504265 NR Description: DRL1 protein [Arabidopsis thaliana]
  misc_feature (1)..(144): NCBI GI NO: 28850452 NR Description: similar to similarity to S
  misc_feature (1)..(108): NCBI GI NO: 19923939 NR Description: hypothetical protein BC012173 [Homo sapiens]
  misc_feature (1)..(108): NCBI GI NO: 20270210 NR Description: RIKEN cDNA 1110001A12 [Mus musculus]
  misc_feature (1)..(144): NCBI GI NO: 33300521 NR Description: Hypothetical protein Y57G11C.43
  misc_feature (1)..(144): NCBI GI NO: 39583457 NR Description: Hypothetical protein CBG21524
  misc_feature (1)..(144): NCBI GI NO: 19115468 NR Description: similarity to S. cerevisiae kti12 protein
  misc_feature (1)..(144): NCBI GI NO: 6322739 NR Description: Protein involved in resistance to K
  misc_feature (1)..(105): NCBI GI NO: 40744828 NR Description: hypothetical protein AN2499.2
MALVVMCGQPCSGKSEAAACLAAALRSSVLDVTVRVIDESSLHLGRDESYKDMVVEKNLRGVLRSEVDRSVSRDGIIIVDSLNNIKGYRYELWCLARASGIRYCVFFCDTEVDHCRDWNVKRQEKGEPSYDSNIFEDLARRFERP

SEQ ID NO: 15449 - protein, 140 aa, Triticum aestivum
  peptide (1)..(140): Ceres Seq. ID no. 13597558
  misc_feature (1)..(139): NCBI GI NO: 15222972 NR Description: expressed protein [Arabidopsis thaliana]
  misc_feature (1)..(139): NCBI GI NO: 23504265 NR Description: DRL1 protein [Arabidopsis thaliana]
  misc_feature (1)..(139): NCBI GI NO: 28850452 NR Description: similar to similarity to S
  misc_feature (1)..(103): NCBI GI NO: 19923939 NR Description: hypothetical protein BC012173 [Homo sapiens]
  misc_feature (1)..(103): NCBI GI NO: 20270210 NR Description: RIKEN cDNA 1110001A12 [Mus musculus]
  misc_feature (1)..(139): NCBI GI NO: 33300521 NR Description: Hypothetical protein Y57G11C.43
  misc_feature (1)..(139): NCBI GI NO: 39583457 NR Description: Hypothetical protein CBG21524
  misc_feature (1)..(139): NCBI GI NO: 19115468 NR Description: similarity to S. cerevisiae kti12 protein
  misc_feature (1)..(139): NCBI GI NO: 6322739 NR Description: Protein involved in resistance to K
  misc_feature (1)..(100): NCBI GI NO: 40744828 NR Description: hypothetical protein AN2499.2
MCGQPCSGKSEAAACLAAALRSSVLDVTVRVIDESSLHLGRDESYKDMVVEKNLRGVLRSEVDRSVSRDGIIIVDSLNNIKGYRYELWCLARASGIRYCVFFCDTEVDHCRDWNVKRQEKGEPSYDSNIFEDLARRFERP

SEQ ID NO: 15450 - DNA, 1479 bp, Triticum aestivum
  misc_feature (1)..(1479): Ceres Seq. ID no. 13597559
acacagcccactcgcagcagcagtgccactaccagcgcacaccaatccagctgattttgagcacgagcagctcttgcccaacagccaccgtcgtcggctactgtcatccatggccatgaggaacgcgacgcagcaggtggtccgggccttggagccgtccctcaccaggagccttcatgcgtccccggacagcaagaagatcgtgggcgtgttctacaagggcggcgagtacgcggggcagaaccccaacttcgtggggtgtgtggagaacgcgctgggcatccgtagctggctcgagtcgcagggccaccagtacatcgtcaccgacgacaaggacggccccaactgcgagctagagaagcacatcgcggacgcgcacgtgctcatcaccacgccgttccacccggcgtacgtgagcgcggaccggatcaggcgcggcaagaacctggagctgctcctcacggcggggatcggctccgaccacatcgagctgtcggcggcggcggccgcggggctgaccgtcgccgaggtcacgggcagcaacaccgtgtcggtggcggaggaccagctgatgcgcatcctggtcctcatgcgcaacttcctgccgggccaccaccaagccatcaacggggagtgggacctcgccggcatcgcgcaccgggcctacgacctggagggcaagacggtgggcaccgtcggcgccggccgcatcgggaagctgctgctccagcgcctcaagccattcggctgcaacctgctctaccacgacaagctccgcgtcgacgccgcgctggagaaggagctcggcgccgccttcgaggaggacctcgacgccatgctgcccaagtgcgacgtcgtcgtgctcaacatgccgctcaccgagaagacaaagggcatgttcaacaaggagaagatcgccaagatgaagaaaggcgtcatcatcgtgaacaacgctcgtggagcgatcatggatacgcaggcagtggcagacgcttgcaagagtaggcacatcgctggatacggcggcgacgtgtggtacccgcagccggcgcccaaggagcacccgtggaggtacatgcccaacaacgcaatgaccccgcacatctccggcaccaccattgacggccagctgaggtacgcggccggtgtgaaggacatgctggagaggtacttcaagggacaggacttcccggagcccaactacattgtcaaggaaggcaagctcgccagccagtaccagtgagcgtccatccatggagccgcagctgcacgcctgcatcagcatgccggttaccagaaactaaataaaagatgcttggccgttgcaatggccatcacccataaatatatctatacctaaataaaatggaacaaaaactggttgctttaatttgctatcagcttcctttgctgtatttttctcgtacactgtccttcgctgtatttcgtttgaactataataaagtcaaagtgttgtcc

SEQ ID NO: 15451 - protein, 413 aa, Triticum aestivum
  peptide (1)..(413): Ceres Seq. ID no. 13597560
  misc_feature (82)..(179): Pfam Name: Pfam Description:  D-isomer specific 2-hydroxyacid dehydrogenase
  misc_feature (37)..(413): NCBI GI NO: 26454627 NR Description: Formate dehydrogenase, mitochondrial precursor
  misc_feature (37)..(413): NCBI GI NO: 21263611 NR Description: Formate dehydrogenase, mitochondrial precursor
  misc_feature (39)..(413): NCBI GI NO: 542089 NR Description: formate dehydrogenase (EC 1
  misc_feature (49)..(413): NCBI GI NO: 38636526 NR Description: formate dehydrogenase [Quercus robur]
  misc_feature (40)..(413): NCBI GI NO: 21263612 NR Description: Formate dehydrogenase, mitochondrial precursor
  misc_feature (37)..(413): NCBI GI NO: 15241492 NR Description: formate dehydrogenase (FDH) [Arabidopsis thaliana]
  misc_feature (70)..(311): NCBI GI NO: 40738675 NR Description: FDH_EMENI Probable formate dehydrogenase
  misc_feature (310)..(411): NCBI GI NO: 40738675 NR Description: FDH_EMENI Probable formate dehydrogenase
  misc_feature (70)..(311): NCBI GI NO: 416574 NR Description: PROBABLE FORMATE DEHYDROGENASE
  misc_feature (310)..(411): NCBI GI NO: 416574 NR Description: PROBABLE FORMATE DEHYDROGENASE
HSPLAAAVPLPAHTNPADFEHEQLLPNSHRRRLLSSMAMRNATQQVVRALEPSLTRSLHASPDSKKIVGVFYKGGEYAGQNPNFVGCVENALGIRSWLESQGHQYIVTDDKDGPNCELEKHIADAHVLITTPFHPAYVSADRIRRGKNLELLLTAGIGSDHIELSAAAAAGLTVAEVTGSNTVSVAEDQLMRILVLMRNFLPGHHQAINGEWDLAGIAHRAYDLEGKTVGTVGAGRIGKLLLQRLKPFGCNLLYHDKLRVDAALEKELGAAFEEDLDAMLPKCDVVVLNMPLTEKTKGMFNKEKIAKMKKGVIIVNNARGAIMDTQAVADACKSRHIAGYGGDVWYPQPAPKEHPWRYMPNNAMTPHISGTTIDGQLRYAAGVKDMLERYFKGQDFPEPNYIVKEGKLASQYQ

SEQ ID NO: 15452 - protein, 377 aa, Triticum aestivum
  peptide (1)..(377): Ceres Seq. ID no. 13597561
  misc_feature (46)..(143): Pfam Name: Pfam Description:  D-isomer specific 2-hydroxyacid dehydrogenase
  misc_feature (1)..(377): NCBI GI NO: 26454627 NR Description: Formate dehydrogenase, mitochondrial precursor
  misc_feature (1)..(377): NCBI GI NO: 21263611 NR Description: Formate dehydrogenase, mitochondrial precursor
  misc_feature (3)..(377): NCBI GI NO: 542089 NR Description: formate dehydrogenase (EC 1
  misc_feature (13)..(377): NCBI GI NO: 38636526 NR Description: formate dehydrogenase [Quercus robur]
  misc_feature (4)..(377): NCBI GI NO: 21263612 NR Description: Formate dehydrogenase, mitochondrial precursor
  misc_feature (1)..(377): NCBI GI NO: 15241492 NR Description: formate dehydrogenase (FDH) [Arabidopsis thaliana]
  misc_feature (34)..(275): NCBI GI NO: 40738675 NR Description: FDH_EMENI Probable formate dehydrogenase
  misc_feature (274)..(375): NCBI GI NO: 40738675 NR Description: FDH_EMENI Probable formate dehydrogenase
  misc_feature (34)..(275): NCBI GI NO: 416574 NR Description: PROBABLE FORMATE DEHYDROGENASE
  misc_feature (274)..(375): NCBI GI NO: 416574 NR Description: PROBABLE FORMATE DEHYDROGENASE
MAMRNATQQVVRALEPSLTRSLHASPDSKKIVGVFYKGGEYAGQNPNFVGCVENALGIRSWLESQGHQYIVTDDKDGPNCELEKHIADAHVLITTPFHPAYVSADRIRRGKNLELLLTAGIGSDHIELSAAAAAGLTVAEVTGSNTVSVAEDQLMRILVLMRNFLPGHHQAINGEWDLAGIAHRAYDLEGKTVGTVGAGRIGKLLLQRLKPFGCNLLYHDKLRVDAALEKELGAAFEEDLDAMLPKCDVVVLNMPLTEKTKGMFNKEKIAKMKKGVIIVNNARGAIMDTQAVADACKSRHIAGYGGDVWYPQPAPKEHPWRYMPNNAMTPHISGTTIDGQLRYAAGVKDMLERYFKGQDFPEPNYIVKEGKLASQYQ

SEQ ID NO: 15453 - protein, 375 aa, Triticum aestivum
  peptide (1)..(375): Ceres Seq. ID no. 13597562
  misc_feature (44)..(141): Pfam Name: Pfam Description:  D-isomer specific 2-hydroxyacid dehydrogenase
  misc_feature (1)..(375): NCBI GI NO: 26454627 NR Description: Formate dehydrogenase, mitochondrial precursor
  misc_feature (1)..(375): NCBI GI NO: 21263611 NR Description: Formate dehydrogenase, mitochondrial precursor
  misc_feature (1)..(375): NCBI GI NO: 542089 NR Description: formate dehydrogenase (EC 1
  misc_feature (11)..(375): NCBI GI NO: 38636526 NR Description: formate dehydrogenase [Quercus robur]
  misc_feature (2)..(375): NCBI GI NO: 21263612 NR Description: Formate dehydrogenase, mitochondrial precursor
  misc_feature (1)..(375): NCBI GI NO: 15241492 NR Description: formate dehydrogenase (FDH) [Arabidopsis thaliana]
  misc_feature (32)..(273): NCBI GI NO: 40738675 NR Description: FDH_EMENI Probable formate dehydrogenase
  misc_feature (272)..(373): NCBI GI NO: 40738675 NR Description: FDH_EMENI Probable formate dehydrogenase
  misc_feature (32)..(273): NCBI GI NO: 416574 NR Description: PROBABLE FORMATE DEHYDROGENASE
  misc_feature (272)..(373): NCBI GI NO: 416574 NR Description: PROBABLE FORMATE DEHYDROGENASE
MRNATQQVVRALEPSLTRSLHASPDSKKIVGVFYKGGEYAGQNPNFVGCVENALGIRSWLESQGHQYIVTDDKDGPNCELEKHIADAHVLITTPFHPAYVSADRIRRGKNLELLLTAGIGSDHIELSAAAAAGLTVAEVTGSNTVSVAEDQLMRILVLMRNFLPGHHQAINGEWDLAGIAHRAYDLEGKTVGTVGAGRIGKLLLQRLKPFGCNLLYHDKLRVDAALEKELGAAFEEDLDAMLPKCDVVVLNMPLTEKTKGMFNKEKIAKMKKGVIIVNNARGAIMDTQAVADACKSRHIAGYGGDVWYPQPAPKEHPWRYMPNNAMTPHISGTTIDGQLRYAAGVKDMLERYFKGQDFPEPNYIVKEGKLASQYQ

SEQ ID NO: 15454 - DNA, 1328 bp, Triticum aestivum
  misc_feature (1)..(1328): Ceres Seq. ID no. 13655934
acacgcgcgcacccacgcataggtcgctctcctgctccgctctcccttcgcgtccaagcctccctcccatccccgctgcaccgcaagtcaaccgcctttccacctcctccgccccctcgccgtcgcctccttcctggcgcaacgccagtatatagagccgcacaggcattcctttgctgccacgacaaagaggaggcagaggttcgcaaggttgaaactgcaatcccggcgacggcaaaggcttctctttagttagctagcgtagcagacttctattcatatactgttcttgcgtgctctgcacttcttggctagctagctggtcggccatggcggatcaccagaggcagaggatccacccggtggacctggaggcgggccagccgaggccctcggcgccgctggtgccgccggggagctcgttccggtccgacaagggcgaccctgccgcggccccggacaggaggccgccgcaccaccagccgctgcccccgccgaagcggcgcaggggctgctgctgccgcttcatctgctgcgtcctggtgaccgtcatcctgctcgccgtcctcgccgcggtggccctgggcgcgctctacctggtgttccagcccaaggcgccccactactcggtggaccggctgtcggtgtcgcagttccaggtggacccgaccctcacggcgagcgcgcggttcgacgtcacggtgacggcggcgaaccccaacagccgcatcggcatcttctacgagcgcgggtccagcctgagcgtgtggtacgacacccaccggctcgcccagggcgcgctcccggccttctaccagggccgccgcaacacgacggtgctgggcgtggtaatggccgggcaggcgcagctgggcagcgcggtggtggcggcgctgcgcgacgagcagcagacgggcgccgtgccgctggtgttccgcgccgacgtgcccgtgcgggtggagctcggcagcctcaagctgtggacggtcacgtccagggtgcgctgcgacctcgtcgtcgacagcctcctcaacgccagcagccagatcaagatcaaggccagcaactgcaagttcagcttgaagctgtgatcggcccttgtctttcttttcgttcatggtgtagtgtaattctttgggtggttcgttctggggataggtcgatcgagttcttcgccctgtgggcgcgctggattcttttggcagcagagagccgtgccgtgtttgcatcggtgcactcccgccccctagcatatcttttctagtagctccgtgcatgtacatcttgtgtagagttgatattaccttgcgttagagaggagtaataat

SEQ ID NO: 15455 - protein, 253 aa, Triticum aestivum
  peptide (1)..(253): Ceres Seq. ID no. 13655935
  misc_feature (5)..(253): NCBI GI NO: 18408342 NR Description: expressed protein [Arabidopsis thaliana]
  misc_feature (5)..(253): NCBI GI NO: 6686408 NR Description: F1E22.7 [Arabidopsis thaliana]
  misc_feature (1)..(253): NCBI GI NO: 15239459 NR Description: hypothetical protein [Arabidopsis thaliana]
  misc_feature (1)..(253): NCBI GI NO: 10178216 NR Description: gb|AAF23842
  misc_feature (8)..(253): NCBI GI NO: 38344198 NR Description: OSJNBa0064G10.14
  misc_feature (6)..(253): NCBI GI NO: 15221846 NR Description: hypothetical protein [Arabidopsis thaliana]
  misc_feature (21)..(246): NCBI GI NO: 18401317 NR Description: expressed protein [Arabidopsis thaliana]
  misc_feature (17)..(252): NCBI GI NO: 38636986 NR Description: unknown protein
  misc_feature (27)..(253): NCBI GI NO: 15242167 NR Description: hypothetical protein [Arabidopsis thaliana]
  misc_feature (57)..(248): NCBI GI NO: 34909192 NR Description: P0425G02.19
MADHQRQRIHPVDLEAGQPRPSAPLVPPGSSFRSDKGDPAAAPDRRPPHHQPLPPPKRRRGCCCRFICCVLVTVILLAVLAAVALGALYLVFQPKAPHYSVDRLSVSQFQVDPTLTASARFDVTVTAANPNSRIGIFYERGSSLSVWYDTHRLAQGALPAFYQGRRNTTVLGVVMAGQAQLGSAVVAALRDEQQTGAVPLVFRADVPVRVELGSLKLWTVTSRVRCDLVVDSLLNASSQIKIKASNCKFSLKL

SEQ ID NO: 15456 - DNA, 1945 bp, Triticum aestivum
  misc_feature (1)..(1945): Ceres Seq. ID no. 13585454
atcactcgacacatcgacccttgactcgagtagacgcaacaacagcaccgacttgaccaaagtaacttccttctcggcatgagcggctcatcagccattgcccttgcaatccgcccaacctcgcatccctttccccgaggagtggcagagctcgcctccctcgcgtcgtcgtcctcgtcggcatgagcggtttcctcgctgtggccggcaagattgtcacgttcctgctgtgggtgctcttcctggtcctgcagacagccaccaaggttgtcgggggcctcctgcaggttgcaccgccagccgagccacaagaagagccgcaaccagaagcagcaccacgacccagatcgccgccggctgcgaggaaccgcgccggcggcggccccgcggatccatacggtccgcagtcacagctgtgggacccaccaccgcccccccacaccgctccggtgacggatgagtatcactcgtcctcgatctaccggcggcgggtgagcgccccgcaggccgctgaagatttggtggtttcctccagcagttactctcattcggccgtggcagcagcgccagcctctccggctcatgccgtctcagtgccaccagtgtcgcggacaattaagacaccggcagttgccagtaagcggcccaagctggagaggaagtactccaagattgtggaccagtaccgctccttggatgaggttattgaagcattagcgcaagctggcctcgagtcttccaatttaatcattggaattgatttcacgaaaagtaatgaatggacaggaaagagttcattcaatggtgtgagcctgcatcatattggtgatgcccccaatccttacgagcaggcaatctccatcattggacaaacactgtcagcttttgatgaggataacttaattccgtgctatggttttggagatgcatctacacatgaccaagatgtatttgccttcaaccctgacgaaagaccatgctatgggtttcaggaggctttggctcgatatagagaaattgttcctcatcttcgtctttccggtcctacatcattttctccaataattgaaatggccacaaccattgttgagcaaagcggtggccaataccatgttttagtaataattgccgatggacaagtcacacgaagtgttaacactgaatttggtcaattaagtacccaagagcagatgactgtagatgctattgtgcaagccagtgaatttcctttgtctataattctggtcggagttggagatggtccttgggacatgatgaatgaatttgatgacaacattcctgctagatcttttgacaatttccagtttgtcaacttcaccggaatcatgtcaaaaaagatcagtcaaagcaacaaggagacagagtttgctctttcagcactcatggaaatacctttgcagtacaaagcaacattacagcttggaatactggggcgtcgacttgcaaagtctccagagcgagttccacttcctcctccttttgcaagttataataccacctcaagagcagcaccatcttgggcaaataacttccgaagtgtgccttctaatcttagggaggaggcgactttagattcaacaatcacaccgtcagttacacccccaccagctgcagatgctagagcatcagaactccaattctgcccagtttgccttgccaaaccccgggacatggcatttggttgtggtcatcagacttgttcagggtgtggaccgcaggtcgtggattgccctatctgtcgaaggccaattgatacaagagtaaaactatactaacagcctcacatgcctgactaggtttgactgaagtacgctggagtgttgaaagtagaatccatggaaaagaaaaagaactccgtttgcactgtagcttgtaccataaagaaaatgaataacagttgtgtactgcacaaaaaaaaaaaaaa

SEQ ID NO: 15457 - protein, 537 aa, Triticum aestivum
  peptide (1)..(537): Ceres Seq. ID no. 13585455
  misc_feature (96)..(537): NCBI GI NO: 15241400 NR Description: copine-related [Arabidopsis thaliana]
  misc_feature (56)..(497): NCBI GI NO: 15232157 NR Description: copine-related [Arabidopsis thaliana]
  misc_feature (476)..(537): NCBI GI NO: 15232157 NR Description: copine-related [Arabidopsis thaliana]
  misc_feature (127)..(525): NCBI GI NO: 20804894 NR Description: P0497A05.19
  misc_feature (111)..(537): NCBI GI NO: 18408863 NR Description: copine-related [Arabidopsis thaliana]
  misc_feature (111)..(537): NCBI GI NO: 30697566 NR Description: copine-related [Arabidopsis thaliana]
  misc_feature (156)..(480): NCBI GI NO: 22328041 NR Description: copine-related [Arabidopsis thaliana]
  misc_feature (455)..(537): NCBI GI NO: 22328041 NR Description: copine-related [Arabidopsis thaliana]
  misc_feature (149)..(455): NCBI GI NO: 18412353 NR Description: copine-related [Arabidopsis thaliana]
  misc_feature (475)..(537): NCBI GI NO: 18412353 NR Description: copine-related [Arabidopsis thaliana]
MSGFLAVAGKIVTFLLWVLFLVLQTATKVVGGLLQVAPPAEPQEEPQPEAAPRPRSPPAARNRAGGGPADPYGPQSQLWDPPPPPHTAPVTDEYHSSSIYRRRVSAPQAAEDLVVSSSSYSHSAVAAAPASPAHAVSVPPVSRTIKTPAVASKRPKLERKYSKIVDQYRSLDEVIEALAQAGLESSNLIIGIDFTKSNEWTGKSSFNGVSLHHIGDAPNPYEQAISIIGQTLSAFDEDNLIPCYGFGDASTHDQDVFAFNPDERPCYGFQEALARYREIVPHLRLSGPTSFSPIIEMATTIVEQSGGQYHVLVIIADGQVTRSVNTEFGQLSTQEQMTVDAIVQASEFPLSIILVGVGDGPWDMMNEFDDNIPARSFDNFQFVNFTGIMSKKISQSNKETEFALSALMEIPLQYKATLQLGILGRRLAKSPERVPLPPPFASYNTTSRAAPSWANNFRSVPSNLREEATLDSTITPSVTPPPAADARASELQFCPVCLAKPRDMAFGCGHQTCSGCGPQVVDCPICRRPIDTRVKLY

SEQ ID NO: 15458 - DNA, 1321 bp, Triticum aestivum
  misc_feature (1)..(1321): Ceres Seq. ID no. 13584630
aaaccgaaacactttctctctctcccttgtttctcgtgctcggaaaccctagccgcacgaagacttcgcctcgcccccacatcgcccgccgtctgacctgcctacgagggcgaacgatggccgcggagaactactggaggtacgccgacgcgcggcagcagcaggccatggtggcggctgcggcggccgcggcggggatggcccctgcagctaccgttgcgcaggccgcgacggccgcggggggcatgcagcagcaccagcaccagcaccagcaccagcaggcggcgatggcgcaacagcagcagcagcagcaacagcagcagcaggcggccgcgccgtcgcttaagcgcgcgcgcccagactatggcgatggtcctggaggacaagagatggctggatattatccgcgggaaaatgcaggttaccactcacttagagacaatgaagcaattggagcatcttacgaccgctacttacgcaatgggatgccttctgtggcagccaatgaaccaagtagggcagttgttggtgccatgggtggagctgcaatggttggtggtggaatgagtggatatcctgttgatgaccgccgtatgatgggtgtcgttggtatggacagcagagccatggggtatggtgcaagacctgagcctcctcttcccccggatgcatccaacaccttgtatattgaaggtctgcctgcaaactgcacccgtagggaggtttcacatatattccgcccttttgttggtttccgtgaagtgaggcttgtcaacaaagagtcaagacaccctggtggagatcctcatgtcctgtgtttcgttgattttgatagccctgcccaagctactattgcacttgaagccctgcaaggttataagtttgacgaacacgatcgtgaatcagcccatttaaggctgcaattctcgcgctttcctggtccgaggtcagctggcgggcctcgtggtaggcgttaagtcgtgcgggtcaggcggttgacgaacctaccgtttatacgagcgatcgaacctgcttggtgtaacgctttgcgccgaattctccgccggtggctcgtagggttcgtcagcccttgtcgtgaaagcgtgaaaaggacgatgcaataatctcgctgttcagtatccattagattctcggggtcgcatgtgtgtctgctttagtatttatggtctactgtattttgttatctcgcggcgtgacccagacaatatcagtcttttatcatgtgtaacgctaactttcttaaagcacttgctcgtttgtttagccgtgctagtaatatcaactcttttcttcgtcttgc

SEQ ID NO: 15459 - protein, 324 aa, Triticum aestivum
  peptide (1)..(324): Ceres Seq. ID no. 13584631
  misc_feature (227)..(301): Pfam Name: a.k.a. RRM, RBD, or RNP domain Pfam Description: RNA recognition motif.
  misc_feature (78)..(251): NCBI GI NO: 25553563 NR Description: OSJNBa0038F22.13
  misc_feature (244)..(324): NCBI GI NO: 25553563 NR Description: OSJNBa0038F22.13
  misc_feature (101)..(324): NCBI GI NO: 30699215 NR Description: expressed protein [Arabidopsis thaliana]
  misc_feature (125)..(321): NCBI GI NO: 23304837 NR Description: RNA-binding protein [Medicago truncatula]
  misc_feature (175)..(324): NCBI GI NO: 26450151 NR Description: unknown protein [Arabidopsis thaliana]
  misc_feature (56)..(324): NCBI GI NO: 25513502 NR Description: F16F4.3 protein - Arabidopsis thaliana
  misc_feature (266)..(324): NCBI GI NO: 15218968 NR Description: hypothetical protein [Arabidopsis thaliana]
  misc_feature (45)..(324): NCBI GI NO: 6324132 NR Description: Protein involved in regulation of cell size; Whi3p
  misc_feature (50)..(115): NCBI GI NO: 6448931 NR Description: zeste protein [Drosophila virilis]
TETLSLSPLFLVLGNPSRTKTSPRPHIARRLTCLRGRTMAAENYWRYADARQQQAMVAAAAAAAGMAPAATVAQAATAAGGMQQHQHQHQHQQAAMAQQQQQQQQQQQAAAPSLKRARPDYGDGPGGQEMAGYYPRENAGYHSLRDNEAIGASYDRYLRNGMPSVAANEPSRAVVGAMGGAAMVGGGMSGYPVDDRRMMGVVGMDSRAMGYGARPEPPLPPDASNTLYIEGLPANCTRREVSHIFRPFVGFREVRLVNKESRHPGGDPHVLCFVDFDSPAQATIALEALQGYKFDEHDRESAHLRLQFSRFPGPRSAGGPRGRR

SEQ ID NO: 15460 - protein, 286 aa, Triticum aestivum
  peptide (1)..(286): Ceres Seq. ID no. 13584632
  misc_feature (189)..(263): Pfam Name: a.k.a. RRM, RBD, or RNP domain Pfam Description: RNA recognition motif.
  misc_feature (40)..(213): NCBI GI NO: 25553563 NR Description: OSJNBa0038F22.13
  misc_feature (206)..(286): NCBI GI NO: 25553563 NR Description: OSJNBa0038F22.13
  misc_feature (63)..(286): NCBI GI NO: 30699215 NR Description: expressed protein [Arabidopsis thaliana]
  misc_feature (87)..(283): NCBI GI NO: 23304837 NR Description: RNA-binding protein [Medicago truncatula]
  misc_feature (137)..(286): NCBI GI NO: 26450151 NR Description: unknown protein [Arabidopsis thaliana]
  misc_feature (18)..(286): NCBI GI NO: 25513502 NR Description: F16F4.3 protein - Arabidopsis thaliana
  misc_feature (228)..(286): NCBI GI NO: 15218968 NR Description: hypothetical protein [Arabidopsis thaliana]
  misc_feature (7)..(286): NCBI GI NO: 6324132 NR Description: Protein involved in regulation of cell size; Whi3p
  misc_feature (12)..(77): NCBI GI NO: 6448931 NR Description: zeste protein [Drosophila virilis]
MAAENYWRYADARQQQAMVAAAAAAAGMAPAATVAQAATAAGGMQQHQHQHQHQQAAMAQQQQQQQQQQQAAAPSLKRARPDYGDGPGGQEMAGYYPRENAGYHSLRDNEAIGASYDRYLRNGMPSVAANEPSRAVVGAMGGAAMVGGGMSGYPVDDRRMMGVVGMDSRAMGYGARPEPPLPPDASNTLYIEGLPANCTRREVSHIFRPFVGFREVRLVNKESRHPGGDPHVLCFVDFDSPAQATIALEALQGYKFDEHDRESAHLRLQFSRFPGPRSAGGPRGRR

SEQ ID NO: 15461 - protein, 269 aa, Triticum aestivum
  peptide (1)..(269): Ceres Seq. ID no. 13584633
  misc_feature (172)..(246): Pfam Name: a.k.a. RRM, RBD, or RNP domain Pfam Description: RNA recognition motif.
  misc_feature (23)..(196): NCBI GI NO: 25553563 NR Description: OSJNBa0038F22.13
  misc_feature (189)..(269): NCBI GI NO: 25553563 NR Description: OSJNBa0038F22.13
  misc_feature (46)..(269): NCBI GI NO: 30699215 NR Description: expressed protein [Arabidopsis thaliana]
  misc_feature (70)..(266): NCBI GI NO: 23304837 NR Description: RNA-binding protein [Medicago truncatula]
  misc_feature (120)..(269): NCBI GI NO: 26450151 NR Description: unknown protein [Arabidopsis thaliana]
  misc_feature (1)..(269): NCBI GI NO: 25513502 NR Description: F16F4.3 protein - Arabidopsis thaliana
  misc_feature (211)..(269): NCBI GI NO: 15218968 NR Description: hypothetical protein [Arabidopsis thaliana]
  misc_feature (1)..(269): NCBI GI NO: 6324132 NR Description: Protein involved in regulation of cell size; Whi3p
  misc_feature (1)..(60): NCBI GI NO: 6448931 NR Description: zeste protein [Drosophila virilis]
MVAAAAAAAGMAPAATVAQAATAAGGMQQHQHQHQHQQAAMAQQQQQQQQQQQAAAPSLKRARPDYGDGPGGQEMAGYYPRENAGYHSLRDNEAIGASYDRYLRNGMPSVAANEPSRAVVGAMGGAAMVGGGMSGYPVDDRRMMGVVGMDSRAMGYGARPEPPLPPDASNTLYIEGLPANCTRREVSHIFRPFVGFREVRLVNKESRHPGGDPHVLCFVDFDSPAQATIALEALQGYKFDEHDRESAHLRLQFSRFPGPRSAGGPRGRR

SEQ ID NO: 15462 - DNA, 1052 bp, Triticum aestivum
  misc_feature (1)..(1052): Ceres Seq. ID no. 12617659
tgacattttctcctcccgacctccgtaccaaacacagccaaccgctccaaatcgccgaagctactctctcctatcggcgagaagaagtgggggagatcttcgtcttcagcactcgcgcgcgcaagctcattcgctccagatcttcccttaccatcgtagatctcacgaccccaagccgccacgcccccaacgaaaccctagctcgcgcccctccgccgcgtaggggcgccgccatgggcatcgtgttcacgcggctcttctcgtcggtattcggaaaccgcgaggcccgcatcctcgtcctcggcctcgacaatgccggcaagactactatcctctatcggctgcagatgggggaggtcgtttccacgatcccaacgatcgggttcaacgtggagacggtgcagtacaataacatcaagttccaagtttgggatctcggtggtcaaacaagcatcaggccatactggagatgctactttccaaacactcaggctatcatatatgttgttgattcaagtgatactgataggctggtaactgcaaaagaagaatttcattccatccttgaggaggatgagctgaaaggtgcggttgtccttgtatatgcgaataaacaggaccttccaggtgcacttgatgatgctgccataactgaatcattagaacttcacaagattaagagccgccaatgggcaattttcaaaacatctgctataaaaggggaggggctttttgaaggcttgaactggctcagtaatgcactcaagtccggaggcagctaatgtaggaggcccagcctccattccgtgaatcattgcttgatggtaaggaacagtgacgatgacagccttctcgctagtctgcgtgaaaatcagaatctctttatttcaactccggaagttatacacaatcagttatctgtagagtgcttgttgaagtttccagatacaacactaggtgtaccatgtcgagagcaagaatatatttgtagaaaataccgagcaaacgattacggtttgaaatatgtggcttacaccgcgtaaaatttcacc

SEQ ID NO: 15463 - protein, 259 aa, Triticum aestivum
  peptide (1)..(259): Ceres Seq. ID no. 12617660
  misc_feature (81)..(254): Pfam Name: Pfam Description:  ADP-ribosylation factor family
  misc_feature (78)..(259): NCBI GI NO: 40253742 NR Description: putative ADP-ribosylation factor 3
  misc_feature (78)..(257): NCBI GI NO: 30682545 NR Description: ADP-ribosylation factor 3 (ARF3)
  misc_feature (78)..(257): NCBI GI NO: 3182922 NR Description: ADP-ribosylation factor 1
  misc_feature (78)..(256): NCBI GI NO: 4502227 NR Description: ADP-ribosylation factor-like 1 [Homo sapiens]
  misc_feature (78)..(256): NCBI GI NO: 13385340 NR Description: ADP-ribosylation-like 1 [Mus musculus]
  misc_feature (78)..(256): NCBI GI NO: 39653273 NR Description: ADP-ribosylation factor [Medicago sativa]
  misc_feature (78)..(256): NCBI GI NO: 11693150 NR Description: ADP-ribosylation factor-like 1 [Rattus norvegicus]
  misc_feature (78)..(256): NCBI GI NO: 11131026 NR Description: ADP-ribosylation factor
  misc_feature (78)..(254): NCBI GI NO: 29841386 NR Description: similar to GenBank Accession Number M61127 GTP-binding protein in Drosophila melanogaster
  misc_feature (61)..(256): NCBI GI NO: 34909214 NR Description: putative ADP-ribosylation factor
TFSPPDLRTKHSQPLQIAEATLSYRREEVGEIFVFSTRARKLIRSRSSLTIVDLTTPSRHAPNETLARAPPPRRGAAMGIVFTRLFSSVFGNREARILVLGLDNAGKTTILYRLQMGEVVSTIPTIGFNVETVQYNNIKFQVWDLGGQTSIRPYWRCYFPNTQAIIYVVDSSDTDRLVTAKEEFHSILEEDELKGAVVLVYANKQDLPGALDDAAITESLELHKIKSRQWAIFKTSAIKGEGLFEGLNWLSNALKSGGS

SEQ ID NO: 15464 - protein, 182 aa, Triticum aestivum
  peptide (1)..(182): Ceres Seq. ID no. 12617661
  misc_feature (4)..(177): Pfam Name: Pfam Description:  ADP-ribosylation factor family
  misc_feature (1)..(182): NCBI GI NO: 40253742 NR Description: putative ADP-ribosylation factor 3
  misc_feature (1)..(180): NCBI GI NO: 30682545 NR Description: ADP-ribosylation factor 3 (ARF3)
  misc_feature (1)..(180): NCBI GI NO: 3182922 NR Description: ADP-ribosylation factor 1
  misc_feature (1)..(179): NCBI GI NO: 4502227 NR Description: ADP-ribosylation factor-like 1 [Homo sapiens]
  misc_feature (1)..(179): NCBI GI NO: 13385340 NR Description: ADP-ribosylation-like 1 [Mus musculus]
  misc_feature (1)..(179): NCBI GI NO: 39653273 NR Description: ADP-ribosylation factor [Medicago sativa]
  misc_feature (1)..(179): NCBI GI NO: 11693150 NR Description: ADP-ribosylation factor-like 1 [Rattus norvegicus]
  misc_feature (1)..(179): NCBI GI NO: 11131026 NR Description: ADP-ribosylation factor
  misc_feature (1)..(177): NCBI GI NO: 29841386 NR Description: similar to GenBank Accession Number M61127 GTP-binding protein in Drosophila melanogaster
  misc_feature (1)..(179): NCBI GI NO: 34909214 NR Description: putative ADP-ribosylation factor
MGIVFTRLFSSVFGNREARILVLGLDNAGKTTILYRLQMGEVVSTIPTIGFNVETVQYNNIKFQVWDLGGQTSIRPYWRCYFPNTQAIIYVVDSSDTDRLVTAKEEFHSILEEDELKGAVVLVYANKQDLPGALDDAAITESLELHKIKSRQWAIFKTSAIKGEGLFEGLNWLSNALKSGGS

SEQ ID NO: 15465 - protein, 144 aa, Triticum aestivum
  peptide (1)..(144): Ceres Seq. ID no. 12617662
  misc_feature (1)..(139): Pfam Name: Pfam Description:  ADP-ribosylation factor family
  misc_feature (1)..(144): NCBI GI NO: 40253742 NR Description: putative ADP-ribosylation factor 3
  misc_feature (1)..(142): NCBI GI NO: 30682545 NR Description: ADP-ribosylation factor 3 (ARF3)
  misc_feature (1)..(142): NCBI GI NO: 3182922 NR Description: ADP-ribosylation factor 1
  misc_feature (1)..(141): NCBI GI NO: 4502227 NR Description: ADP-ribosylation factor-like 1 [Homo sapiens]
  misc_feature (1)..(141): NCBI GI NO: 13385340 NR Description: ADP-ribosylation-like 1 [Mus musculus]
  misc_feature (1)..(141): NCBI GI NO: 39653273 NR Description: ADP-ribosylation factor [Medicago sativa]
  misc_feature (1)..(141): NCBI GI NO: 11693150 NR Description: ADP-ribosylation factor-like 1 [Rattus norvegicus]
  misc_feature (1)..(141): NCBI GI NO: 11131026 NR Description: ADP-ribosylation factor
  misc_feature (1)..(139): NCBI GI NO: 29841386 NR Description: similar to GenBank Accession Number M61127 GTP-binding protein in Drosophila melanogaster
  misc_feature (1)..(141): NCBI GI NO: 34909214 NR Description: putative ADP-ribosylation factor
MGEVVSTIPTIGFNVETVQYNNIKFQVWDLGGQTSIRPYWRCYFPNTQAIIYVVDSSDTDRLVTAKEEFHSILEEDELKGAVVLVYANKQDLPGALDDAAITESLELHKIKSRQWAIFKTSAIKGEGLFEGLNWLSNALKSGGS

SEQ ID NO: 15466 - DNA, 561 bp, Triticum aestivum
  misc_feature (1)..(561): Ceres Seq. ID no. 13597688
  misc_feature (358)..(358): n is a, c, t, g, unknown, or other
  misc_feature (355)..(355): n is a, c, t, g, unknown, or other
  misc_feature (356)..(356): n is a, c, t, g, unknown, or other
  misc_feature (357)..(357): n is a, c, t, g, unknown, or other
ctcctctcttcgtgagcctcgactcgtgtctcctctccttccacagagagagggagcaccaccgccgcacggcccgcgtgacctagaccccgccctccgccgccgtattgattcggctgcgctgctgggagctatggcgggcggctctaggggcggcttccccgcctggatgaccgccgccgcggcgcgcatcgacctctccggcggcgccgccgccacgtccggctcacagcctccccaacctgggcctccggccgcggtggtggccgaccaggagctcgggatggccgagcgtgccctctccgccgcaagcgccgccttcatctccgccatcatcgttaaccctctcgacgtnnnnaagacgaggttgcaggcgcaggccgcgggggtgccttactaccaagcaccccagatggcggcgctcggcccggatgcgatactgtctgagttgcgatgctctccatcatgcacacgtggtatcattttgggaagcgaacctatttgcccacccgattgctttcagtacaagggaacagttgatgtattcttgaaagttgttag

SEQ ID NO: 15467 - protein, 186 aa, Triticum aestivum
  peptide (1)..(186): Ceres Seq. ID no. 13597689
  misc_feature (38)..(185): NCBI GI NO: 40253478 NR Description: putative mitochondrial carrier protein
  misc_feature (88)..(185): NCBI GI NO: 7486963 NR Description: hypothetical protein T13J8
  misc_feature (88)..(185): NCBI GI NO: 18417093 NR Description: mitochondrial carrier protein family
  misc_feature (38)..(146): NCBI GI NO: 40253479 NR Description: unknown protein
  misc_feature (80)..(185): NCBI GI NO: 26449442 NR Description: unknown protein [Arabidopsis thaliana]
  misc_feature (80)..(185): NCBI GI NO: 25408981 NR Description: hypothetical protein At2g46320
  misc_feature (80)..(185): NCBI GI NO: 19310377 NR Description: At2g46320/F11C10.1 [Arabidopsis thaliana]
  misc_feature (80)..(185): NCBI GI NO: 30690323 NR Description: mitochondrial carrier protein family
  misc_feature (118)..(118): Xaa is any aa, unknown or other
  misc_feature (119)..(119): Xaa is any aa, unknown or other
SSLREPRLVSPLLPQREGAPPPHGPRDLDPALRRRIDSAALLGAMAGGSRGGFPAWMTAAAARIDLSGGAAATSGSQPPQPGPPAAVVADQELGMAERALSAASAAFISAIIVNPLDXXKTRLQAQAAGVPYYQAPQMAALGPDAILSELRCSPSCTRGIILGSEPICPPDCFQYKGTVDVFLKVV

SEQ ID NO: 15468 - protein, 142 aa, Triticum aestivum
  peptide (1)..(142): Ceres Seq. ID no. 13597690
  misc_feature (1)..(141): NCBI GI NO: 40253478 NR Description: putative mitochondrial carrier protein
  misc_feature (44)..(141): NCBI GI NO: 7486963 NR Description: hypothetical protein T13J8
  misc_feature (44)..(141): NCBI GI NO: 18417093 NR Description: mitochondrial carrier protein family
  misc_feature (1)..(102): NCBI GI NO: 40253479 NR Description: unknown protein
  misc_feature (36)..(141): NCBI GI NO: 26449442 NR Description: unknown protein [Arabidopsis thaliana]
  misc_feature (36)..(141): NCBI GI NO: 25408981 NR Description: hypothetical protein At2g46320
  misc_feature (36)..(141): NCBI GI NO: 19310377 NR Description: At2g46320/F11C10.1 [Arabidopsis thaliana]
  misc_feature (36)..(141): NCBI GI NO: 30690323 NR Description: mitochondrial carrier protein family
  misc_feature (74)..(74): Xaa is any aa, unknown or other
  misc_feature (75)..(75): Xaa is any aa, unknown or other
MAGGSRGGFPAWMTAAAARIDLSGGAAATSGSQPPQPGPPAAVVADQELGMAERALSAASAAFISAIIVNPLDXXKTRLQAQAAGVPYYQAPQMAALGPDAILSELRCSPSCTRGIILGSEPICPPDCFQYKGTVDVFLKVV

SEQ ID NO: 15469 - protein, 130 aa, Triticum aestivum
  peptide (1)..(130): Ceres Seq. ID no. 13597691
  misc_feature (1)..(129): NCBI GI NO: 40253478 NR Description: putative mitochondrial carrier protein
  misc_feature (32)..(129): NCBI GI NO: 7486963 NR Description: hypothetical protein T13J8
  misc_feature (32)..(129): NCBI GI NO: 18417093 NR Description: mitochondrial carrier protein family
  misc_feature (1)..(90): NCBI GI NO: 40253479 NR Description: unknown protein
  misc_feature (24)..(129): NCBI GI NO: 26449442 NR Description: unknown protein [Arabidopsis thaliana]
  misc_feature (24)..(129): NCBI GI NO: 25408981 NR Description: hypothetical protein At2g46320
  misc_feature (24)..(129): NCBI GI NO: 19310377 NR Description: At2g46320/F11C10.1 [Arabidopsis thaliana]
  misc_feature (24)..(129): NCBI GI NO: 30690323 NR Description: mitochondrial carrier protein family
  misc_feature (62)..(62): Xaa is any aa, unknown or other
  misc_feature (63)..(63): Xaa is any aa, unknown or other
MTAAAARIDLSGGAAATSGSQPPQPGPPAAVVADQELGMAERALSAASAAFISAIIVNPLDXXKTRLQAQAAGVPYYQAPQMAALGPDAILSELRCSPSCTRGIILGSEPICPPDCFQYKGTVDVFLKVV

SEQ ID NO: 15470 - DNA, 1436 bp, Triticum aestivum
  misc_feature (1)..(1436): Ceres Seq. ID no. 13598582
tccgccgcgcacgcacacaacctccatctcttccccccttccgcagaaccctagctgtccacaagtctcttcgtcggcgatggcggcggcggagaacgccggggacgtggcggcgggggagagccgcaagctgttcgtgggtggcatcccgtcctcagcgcaggagacggagctgcggggtcactttgcccgcttcggtgcggtgcgctcaatcgtcgtgatgcgggacaaggagtcgggccacggccgcgggttcgggttcgtcgagttcgaggacgaagaagcggccgccaaggcgctcggcgatggggagaggcccaagcacttcatctgcggccgactggtggacgttaagagggcgcgtgctagacctcctcggaacttgggcgagcaacctgtgcatcaacatcagcatcagcatcagctggaacagggtccagttcagggtcaccaagacgctggggacagtaccgaggccagtagtgacagtatgagctatgcttcaaagaaggtattcattggtggtttgcgtgacaacatcacagaggaggagttcagagcttactttgaggcgtttggcactgtaacagatgttgttgtgatatacgacagcctgacaagcaggtcaaggggttttggttttgtcacctttgattccgaggaagctgtgagaaaggtgatggggcaaagctttcatgacttgaaagggacaagggtggaagcaaagatcgctatccccaaggatgctcagtattaccgtaatggccgaggtcgtggctcaagaacctttggcggaaggggtcctgttggctttgatggttcaacataccaaccgtacaataaccgacatggtttctacaatggctatatgccacaacctgttcccacacatccctactatcatggcctctattttggtatgggaggcaatccctatgcaaatgcatatccaaaccatgcagtcatggcaaatgttccaaacatggtggcaaggcgtccagtatatagcccatatcccccaatgtatcctggctatggttttgcatacagaagtggttatgcgggtgctgcaccttctgttcagtatggcgttaatggtggcagggattacatgaatgaccaagactctatggatgtacaagaacttgacagcactgctaccattgctacaaagtttgaatacatgaagctaggttcacaatgacgttctgggcaattatttctacactgatgacagcggaagtcgcaactgtgaagacatgagctgagattctttggttgacaagtacatcattggaaattatcaacttacccccattccttgtttcaactgcatgtagactgaaaacattcaagttccaactggctgttgagctcacatgccttgtaccaatgcttaaatccttttaatgtatcagaatcagaacatttgatgc

SEQ ID NO: 15471 - protein, 400 aa, Triticum aestivum
  peptide (1)..(400): Ceres Seq. ID no. 13598583
  misc_feature (171)..(240): Pfam Name: a.k.a. RRM, RBD, or RNP domain Pfam Description: RNA recognition motif.
  misc_feature (24)..(400): NCBI GI NO: 28201305 NR Description: putative RNA binding protein
  misc_feature (43)..(368): NCBI GI NO: 37535274 NR Description: putative RNA-binding protein
  misc_feature (143)..(363): NCBI GI NO: 15226106 NR Description: heterogeneous nuclear ribonucleoprotein
  misc_feature (43)..(123): NCBI GI NO: 15226106 NR Description: heterogeneous nuclear ribonucleoprotein
  misc_feature (143)..(376): NCBI GI NO: 22328624 NR Description: heterogeneous nuclear ribonucleoprotein
  misc_feature (43)..(123): NCBI GI NO: 22328624 NR Description: heterogeneous nuclear ribonucleoprotein
  misc_feature (43)..(337): NCBI GI NO: 15217975 NR Description: RNA-binding protein [Arabidopsis thaliana]
  misc_feature (43)..(337): NCBI GI NO: 25456498 NR Description: RNA binding protein
  misc_feature (143)..(376): NCBI GI NO: 7439958 NR Description: probable ribonucleoprotein - Arabidopsis thaliana
  misc_feature (43)..(86): NCBI GI NO: 7439958 NR Description: probable ribonucleoprotein - Arabidopsis thaliana
PPRTHTTSISSPLPQNPSCPQVSSSAMAAAENAGDVAAGESRKLFVGGIPSSAQETELRGHFARFGAVRSIVVMRDKESGHGRGFGFVEFEDEEAAAKALGDGERPKHFICGRLVDVKRARARPPRNLGEQPVHQHQHQHQLEQGPVQGHQDAGDSTEASSDSMSYASKKVFIGGLRDNITEEEFRAYFEAFGTVTDVVVIYDSLTSRSRGFGFVTFDSEEAVRKVMGQSFHDLKGTRVEAKIAIPKDAQYYRNGRGRGSRTFGGRGPVGFDGSTYQPYNNRHGFYNGYMPQPVPTHPYYHGLYFGMGGNPYANAYPNHAVMANVPNMVARRPVYSPYPPMYPGYGFAYRSGYAGAAPSVQYGVNGGRDYMNDQDSMDVQELDSTATIATKFEYMKLGSQ

SEQ ID NO: 15472 - protein, 374 aa, Triticum aestivum
  peptide (1)..(374): Ceres Seq. ID no. 13598584
  misc_feature (145)..(214): Pfam Name: a.k.a. RRM, RBD, or RNP domain Pfam Description: RNA recognition motif.
  misc_feature (1)..(374): NCBI GI NO: 28201305 NR Description: putative RNA binding protein
  misc_feature (17)..(342): NCBI GI NO: 37535274 NR Description: putative RNA-binding protein
  misc_feature (117)..(337): NCBI GI NO: 15226106 NR Description: heterogeneous nuclear ribonucleoprotein
  misc_feature (17)..(97): NCBI GI NO: 15226106 NR Description: heterogeneous nuclear ribonucleoprotein
  misc_feature (117)..(350): NCBI GI NO: 22328624 NR Description: heterogeneous nuclear ribonucleoprotein
  misc_feature (17)..(97): NCBI GI NO: 22328624 NR Description: heterogeneous nuclear ribonucleoprotein
  misc_feature (17)..(311): NCBI GI NO: 15217975 NR Description: RNA-binding protein [Arabidopsis thaliana]
  misc_feature (17)..(311): NCBI GI NO: 25456498 NR Description: RNA binding protein
  misc_feature (117)..(350): NCBI GI NO: 7439958 NR Description: probable ribonucleoprotein - Arabidopsis thaliana
  misc_feature (17)..(60): NCBI GI NO: 7439958 NR Description: probable ribonucleoprotein - Arabidopsis thaliana
MAAAENAGDVAAGESRKLFVGGIPSSAQETELRGHFARFGAVRSIVVMRDKESGHGRGFGFVEFEDEEAAAKALGDGERPKHFICGRLVDVKRARARPPRNLGEQPVHQHQHQHQLEQGPVQGHQDAGDSTEASSDSMSYASKKVFIGGLRDNITEEEFRAYFEAFGTVTDVVVIYDSLTSRSRGFGFVTFDSEEAVRKVMGQSFHDLKGTRVEAKIAIPKDAQYYRNGRGRGSRTFGGRGPVGFDGSTYQPYNNRHGFYNGYMPQPVPTHPYYHGLYFGMGGNPYANAYPNHAVMANVPNMVARRPVYSPYPPMYPGYGFAYRSGYAGAAPSVQYGVNGGRDYMNDQDSMDVQELDSTATIATKFEYMKLGSQ

SEQ ID NO: 15473 - protein, 327 aa, Triticum aestivum
  peptide (1)..(327): Ceres Seq. ID no. 13598585
  misc_feature (98)..(167): Pfam Name: a.k.a. RRM, RBD, or RNP domain Pfam Description: RNA recognition motif.
  misc_feature (1)..(327): NCBI GI NO: 28201305 NR Description: putative RNA binding protein
  misc_feature (1)..(295): NCBI GI NO: 37535274 NR Description: putative RNA-binding protein
  misc_feature (70)..(290): NCBI GI NO: 15226106 NR Description: heterogeneous nuclear ribonucleoprotein
  misc_feature (1)..(50): NCBI GI NO: 15226106 NR Description: heterogeneous nuclear ribonucleoprotein
  misc_feature (70)..(303): NCBI GI NO: 22328624 NR Description: heterogeneous nuclear ribonucleoprotein
  misc_feature (1)..(50): NCBI GI NO: 22328624 NR Description: heterogeneous nuclear ribonucleoprotein
  misc_feature (1)..(264): NCBI GI NO: 15217975 NR Description: RNA-binding protein [Arabidopsis thaliana]
  misc_feature (1)..(264): NCBI GI NO: 25456498 NR Description: RNA binding protein
  misc_feature (70)..(303): NCBI GI NO: 7439958 NR Description: probable ribonucleoprotein - Arabidopsis thaliana
  misc_feature (1)..(13): NCBI GI NO: 7439958 NR Description: probable ribonucleoprotein - Arabidopsis thaliana
MRDKESGHGRGFGFVEFEDEEAAAKALGDGERPKHFICGRLVDVKRARARPPRNLGEQPVHQHQHQHQLEQGPVQGHQDAGDSTEASSDSMSYASKKVFIGGLRDNITEEEFRAYFEAFGTVTDVVVIYDSLTSRSRGFGFVTFDSEEAVRKVMGQSFHDLKGTRVEAKIAIPKDAQYYRNGRGRGSRTFGGRGPVGFDGSTYQPYNNRHGFYNGYMPQPVPTHPYYHGLYFGMGGNPYANAYPNHAVMANVPNMVARRPVYSPYPPMYPGYGFAYRSGYAGAAPSVQYGVNGGRDYMNDQDSMDVQELDSTATIATKFEYMKLGSQ

SEQ ID NO: 15474 - DNA, 1247 bp, Triticum aestivum
  misc_feature (1)..(1247): Ceres Seq. ID no. 13584577
gtgctagctagctggcctgattcgcgtgagttcatccatccatccaccatggcctccgaccgcctcgccgccctcaaggccttcgacgagaccaaggccggcgtgaagggcctcgtggacgccggcgtcaaggccgtcccggacatcttccgccaccctcccgacccgctcccccagtgcaccaaggtcgccgccatcccggtcgtcgacctctcgggtccccgctcggaggtggtcgccgcggtgagggaggcggcgcggacggcgggcttcttccagctggtgaaccacggcgtgccggaggcggccatgtcggggatgctggcggcggtgcggcggttcaacgaggagcccgcggaggccaaggcgccctactacacgcgggacgccgcgcggcgcgtgcgctacaactgcaacgccgacctcttccggaccctggtgggcaagtggcgcgacaccatctacatggacgacgtggaccggctggcggcgggcgaggaggaggaggtcctcccgccggcgtgccggggcgtcgcgcccaagtacacggcgcagatacggatgctggggcgcgcgctcttcgagctgctgtcggaggccctgggcgtgcggcgcgggtacctggaggaggaggccggctgcctggggacgctcagcgtcgccggccactactacccggcgtgcccggagccgcacctgacgctgggcgccgtcaggcacaacgaccccggcttcctcaccgtgctgctccaggacggggtcggcggcctccaggtgctcacggacgtcgaggacggcgaagggaacgtgtccgccgcgtgggccgacgtgccggcggtgccgggggcgctggtggtgaacgtcggcgacttcctgcagctggtgtccaacgacaggttcaggagcgtcgcgcaccgcgtggtggccaacagcgtggggccccggatgtcggtggcgtgcttcttcagggccaagggagcgaccgtgtgcgccccggtggtggcggacgggggtggcccgccgcgctacaggaccgtcacggcggaggagctgctccgctcgtccgggaagcagaacgggctccgcgacgtgaggctctagctggcgagcctcaagaaagcagagagcagagacgaggcgtgaatgcatgttgggacatggtgatgaaatgcgtgtcgatgaagttggagctttgcatgaatttgcttatctttgtctgaaaaataaataaatttgcttatctgctg

SEQ ID NO: 15475 - protein, 366 aa, Triticum aestivum
  peptide (1)..(366): Ceres Seq. ID no. 13584578
  misc_feature (215)..(322): Pfam Name: II Pfam Description: 2OG-Fe
  misc_feature (19)..(357): NCBI GI NO: 40253431 NR Description: putative 2-oxoglutarate-dependent oxygenase
  misc_feature (19)..(357): NCBI GI NO: 40253423 NR Description: putative 2-oxoglutarate-dependent oxygenase
  misc_feature (19)..(357): NCBI GI NO: 40253427 NR Description: putative 2-oxoglutarate-dependent oxygenase
  misc_feature (19)..(352): NCBI GI NO: 40253419 NR Description: putative 2-oxoglutarate-dependent oxygenase
  misc_feature (15)..(352): NCBI GI NO: 29123084 NR Description: 2-oxoglutarate-dependent oxygenase [Zea mays]
  misc_feature (14)..(356): NCBI GI NO: 30679748 NR Description: 2-oxoglutarate-dependent dioxygenase, putative
  misc_feature (14)..(350): NCBI GI NO: 5031283 NR Description: unknown [Prunus armeniaca]
  misc_feature (20)..(350): NCBI GI NO: 15721876 NR Description: CmE8 [Cucumis melo]
  misc_feature (20)..(350): NCBI GI NO: 119640 NR Description: 1-AMINOCYCLOPROPANE-1-CARBOXYLATE OXIDASE HOMOLOG
  misc_feature (13)..(352): NCBI GI NO: 1916643 NR Description: desacetoxyvindoline 4-hydroxylase
VLASWPDSREFIHPSTMASDRLAALKAFDETKAGVKGLVDAGVKAVPDIFRHPPDPLPQCTKVAAIPVVDLSGPRSEVVAAVREAARTAGFFQLVNHGVPEAAMSGMLAAVRRFNEEPAEAKAPYYTRDAARRVRYNCNADLFRTLVGKWRDTIYMDDVDRLAAGEEEEVLPPACRGVAPKYTAQIRMLGRALFELLSEALGVRRGYLEEEAGCLGTLSVAGHYYPACPEPHLTLGAVRHNDPGFLTVLLQDGVGGLQVLTDVEDGEGNVSAAWADVPAVPGALVVNVGDFLQLVSNDRFRSVAHRVVANSVGPRMSVACFFRAKGATVCAPVVADGGGPPRYRTVTAEELLRSSGKQNGLRDVRL

SEQ ID NO: 15476 - protein, 350 aa, Triticum aestivum
  peptide (1)..(350): Ceres Seq. ID no. 13584579
  misc_feature (199)..(306): Pfam Name: II Pfam Description: 2OG-Fe
  misc_feature (3)..(341): NCBI GI NO: 40253431 NR Description: putative 2-oxoglutarate-dependent oxygenase
  misc_feature (3)..(341): NCBI GI NO: 40253423 NR Description: putative 2-oxoglutarate-dependent oxygenase
  misc_feature (3)..(341): NCBI GI NO: 40253427 NR Description: putative 2-oxoglutarate-dependent oxygenase
  misc_feature (3)..(336): NCBI GI NO: 40253419 NR Description: putative 2-oxoglutarate-dependent oxygenase
  misc_feature (1)..(336): NCBI GI NO: 29123084 NR Description: 2-oxoglutarate-dependent oxygenase [Zea mays]
  misc_feature (1)..(340): NCBI GI NO: 30679748 NR Description: 2-oxoglutarate-dependent dioxygenase, putative
  misc_feature (1)..(334): NCBI GI NO: 5031283 NR Description: unknown [Prunus armeniaca]
  misc_feature (4)..(334): NCBI GI NO: 15721876 NR Description: CmE8 [Cucumis melo]
  misc_feature (4)..(334): NCBI GI NO: 119640 NR Description: 1-AMINOCYCLOPROPANE-1-CARBOXYLATE OXIDASE HOMOLOG
  misc_feature (1)..(336): NCBI GI NO: 1916643 NR Description: desacetoxyvindoline 4-hydroxylase
MASDRLAALKAFDETKAGVKGLVDAGVKAVPDIFRHPPDPLPQCTKVAAIPVVDLSGPRSEVVAAVREAARTAGFFQLVNHGVPEAAMSGMLAAVRRFNEEPAEAKAPYYTRDAARRVRYNCNADLFRTLVGKWRDTIYMDDVDRLAAGEEEEVLPPACRGVAPKYTAQIRMLGRALFELLSEALGVRRGYLEEEAGCLGTLSVAGHYYPACPEPHLTLGAVRHNDPGFLTVLLQDGVGGLQVLTDVEDGEGNVSAAWADVPAVPGALVVNVGDFLQLVSNDRFRSVAHRVVANSVGPRMSVACFFRAKGATVCAPVVADGGGPPRYRTVTAEELLRSSGKQNGLRDVRL

SEQ ID NO: 15477 - protein, 263 aa, Triticum aestivum
  peptide (1)..(263): Ceres Seq. ID no. 13584580
  misc_feature (112)..(219): Pfam Name: II Pfam Description: 2OG-Fe
  misc_feature (1)..(254): NCBI GI NO: 40253431 NR Description: putative 2-oxoglutarate-dependent oxygenase
  misc_feature (1)..(254): NCBI GI NO: 40253423 NR Description: putative 2-oxoglutarate-dependent oxygenase
  misc_feature (1)..(254): NCBI GI NO: 40253427 NR Description: putative 2-oxoglutarate-dependent oxygenase
  misc_feature (1)..(249): NCBI GI NO: 40253419 NR Description: putative 2-oxoglutarate-dependent oxygenase
  misc_feature (1)..(249): NCBI GI NO: 29123084 NR Description: 2-oxoglutarate-dependent oxygenase [Zea mays]
  misc_feature (1)..(253): NCBI GI NO: 30679748 NR Description: 2-oxoglutarate-dependent dioxygenase, putative
  misc_feature (1)..(247): NCBI GI NO: 5031283 NR Description: unknown [Prunus armeniaca]
  misc_feature (1)..(247): NCBI GI NO: 15721876 NR Description: CmE8 [Cucumis melo]
  misc_feature (1)..(247): NCBI GI NO: 119640 NR Description: 1-AMINOCYCLOPROPANE-1-CARBOXYLATE OXIDASE HOMOLOG
  misc_feature (1)..(249): NCBI GI NO: 1916643 NR Description: desacetoxyvindoline 4-hydroxylase
MSGMLAAVRRFNEEPAEAKAPYYTRDAARRVRYNCNADLFRTLVGKWRDTIYMDDVDRLAAGEEEEVLPPACRGVAPKYTAQIRMLGRALFELLSEALGVRRGYLEEEAGCLGTLSVAGHYYPACPEPHLTLGAVRHNDPGFLTVLLQDGVGGLQVLTDVEDGEGNVSAAWADVPAVPGALVVNVGDFLQLVSNDRFRSVAHRVVANSVGPRMSVACFFRAKGATVCAPVVADGGGPPRYRTVTAEELLRSSGKQNGLRDVRL

SEQ ID NO: 15478 - DNA, 1368 bp, Triticum aestivum
  misc_feature (1)..(1368): Ceres Seq. ID no. 13597612
acttgtcatggccttggcctccttcgcggtgtcgcccccaatcgccgcctgcgccgccgtcctccgccgcgccatgtcgttctcctccgtctccgctgcgtcgcagacgagggtgggtgtggtgcagatgacctccgtgggggacctcgacgccaactacgccacctgctcccgcctcaccaaggaagctgctgcggccggagtcaaatttctttgcttccctgaggtcttctccttcataggatccaaggatggcgagtctgttaagctagccgaaccattagatggcccaataatgcagagatattgctcacttgcaaatgagtcaagtatttggttgtctcttggagggtttcaagaaaggggcccagatgattcacaccagtacaacactcatgtattaatcgatgaatctggaaaagttaggagctcataccggaaaattcatttgtttgatgtggatgtacctggcaacatggtgtataaggaaagccgtttcacgacagcaggtgataccgtcgtagcggtggatagcccttttggacgattgggccttactgtttgctatgatttgagatttccagagctttaccaatgtttgcgttttaagcatcaagctcaggtcttgctcgtaccatctgcattcacaaaggtaactggggaagcacactgggaaattctccttcgtgctcgtgcaattgagacacaatgttatgttattgctgcggctcaagctggaaaacacaatgagaaaagagaaagctatggcgattctataattattgacccatggggaacagttatagctcgacttccagatcgactgtccactggatttgcagtagcagatatcgacttgtcaaaagttgaggctgtgcgaaccaaaatgccaatctctgtgcaccgcaagtttgagagcatctggaagtcctcatcactataatagttgaaggtggtcttgcacgcttcgccgctcttattctcacattccggagattcttcttttgtgtataataactgccattttgttcacaagatggtccagttcgattgggatttccagtgagacatgtcatagaactaaataagctacaactgtagtagcatatctagtaaatagggcatatccaaacatggctcagagcaccttatgacttggtttgagatggcttctacctcagcttatggtccagataaaccagaagccgttccaaacccaaagcttaggaacagcttaggttgtgtttgattgggccttagggtcttttaagccaaaagctcaaccaaatccagcgaatttgatgtttgtgtgtatgttgacatgtacaaatgcatggtagcggtactttcatgagtttgtcacttttt

SEQ ID NO: 15479 - protein, 313 aa, Triticum aestivum
  peptide (1)..(313): Ceres Seq. ID no. 15222147
  misc_feature (37)..(302): NCBI GI NO: 18413157 NR Description: nitrilase 1 like protein [Arabidopsis thaliana]
  misc_feature (37)..(298): NCBI GI NO: 25407452 NR Description: nitrilase 1 like protein
  misc_feature (17)..(303): NCBI GI NO: 5031947 NR Description: nitrilase 1 [Homo sapiens]
  misc_feature (30)..(311): NCBI GI NO: 9367118 NR Description: Nit protein 1 [Xenopus laevis]
  misc_feature (35)..(306): NCBI GI NO: 28828435 NR Description: similar to Y56A3A.13.p
  misc_feature (23)..(303): NCBI GI NO: 3242980 NR Description: nitrilase homolog 1 [Mus musculus]
  misc_feature (23)..(303): NCBI GI NO: 6754856 NR Description: nitrilase 1 [Mus musculus]
  misc_feature (27)..(303): NCBI GI NO: 17556280 NR Description: Nitrilase and fragile histidine triad fusionprotein NitFhiT 1
  misc_feature (23)..(303): NCBI GI NO: 18204913 NR Description: nitrilase 1 [Mus musculus]
  misc_feature (43)..(303): NCBI GI NO: 39584853 NR Description: Hypothetical protein CBG13323
LVMALASFAVSPPIAACAAVLRRAMSFSSVSAASQTRVGVVQMTSVGDLDANYATCSRLTKEAAAAGVKFLCFPEVFSFIGSKDGESVKLAEPLDGPIMQRYCSLANESSIWLSLGGFQERGPDDSHQYNTHVLIDESGKVRSSYRKIHLFDVDVPGNMVYKESRFTTAGDTVVAVDSPFGRLGLTVCYDLRFPELYQCLRFKHQAQVLLVPSAFTKVTGEAHWEILLRARAIETQCYVIAAAQAGKHNEKRESYGDSIIIDPWGTVIARLPDRLSTGFAVADIDLSKVEAVRTKMPISVHRKFESIWKSSSL

SEQ ID NO: 15480 - protein, 311 aa, Triticum aestivum
  peptide (1)..(311): Ceres Seq. ID no. 15222148
  misc_feature (35)..(300): NCBI GI NO: 18413157 NR Description: nitrilase 1 like protein [Arabidopsis thaliana]
  misc_feature (35)..(296): NCBI GI NO: 25407452 NR Description: nitrilase 1 like protein
  misc_feature (15)..(301): NCBI GI NO: 5031947 NR Description: nitrilase 1 [Homo sapiens]
  misc_feature (28)..(309): NCBI GI NO: 9367118 NR Description: Nit protein 1 [Xenopus laevis]
  misc_feature (33)..(304): NCBI GI NO: 28828435 NR Description: similar to Y56A3A.13.p
  misc_feature (21)..(301): NCBI GI NO: 3242980 NR Description: nitrilase homolog 1 [Mus musculus]
  misc_feature (21)..(301): NCBI GI NO: 6754856 NR Description: nitrilase 1 [Mus musculus]
  misc_feature (25)..(301): NCBI GI NO: 17556280 NR Description: Nitrilase and fragile histidine triad fusionprotein NitFhiT 1
  misc_feature (21)..(301): NCBI GI NO: 18204913 NR Description: nitrilase 1 [Mus musculus]
  misc_feature (41)..(301): NCBI GI NO: 39584853 NR Description: Hypothetical protein CBG13323
MALASFAVSPPIAACAAVLRRAMSFSSVSAASQTRVGVVQMTSVGDLDANYATCSRLTKEAAAAGVKFLCFPEVFSFIGSKDGESVKLAEPLDGPIMQRYCSLANESSIWLSLGGFQERGPDDSHQYNTHVLIDESGKVRSSYRKIHLFDVDVPGNMVYKESRFTTAGDTVVAVDSPFGRLGLTVCYDLRFPELYQCLRFKHQAQVLLVPSAFTKVTGEAHWEILLRARAIETQCYVIAAAQAGKHNEKRESYGDSIIIDPWGTVIARLPDRLSTGFAVADIDLSKVEAVRTKMPISVHRKFESIWKSSSL

SEQ ID NO: 15481 - protein, 289 aa, Triticum aestivum
  peptide (1)..(289): Ceres Seq. ID no. 15222149
  misc_feature (13)..(278): NCBI GI NO: 18413157 NR Description: nitrilase 1 like protein [Arabidopsis thaliana]
  misc_feature (13)..(274): NCBI GI NO: 25407452 NR Description: nitrilase 1 like protein
  misc_feature (1)..(279): NCBI GI NO: 5031947 NR Description: nitrilase 1 [Homo sapiens]
  misc_feature (6)..(287): NCBI GI NO: 9367118 NR Description: Nit protein 1 [Xenopus laevis]
  misc_feature (11)..(282): NCBI GI NO: 28828435 NR Description: similar to Y56A3A.13.p
  misc_feature (1)..(279): NCBI GI NO: 3242980 NR Description: nitrilase homolog 1 [Mus musculus]
  misc_feature (1)..(279): NCBI GI NO: 6754856 NR Description: nitrilase 1 [Mus musculus]
  misc_feature (3)..(279): NCBI GI NO: 17556280 NR Description: Nitrilase and fragile histidine triad fusionprotein NitFhiT 1
  misc_feature (1)..(279): NCBI GI NO: 18204913 NR Description: nitrilase 1 [Mus musculus]
  misc_feature (19)..(279): NCBI GI NO: 39584853 NR Description: Hypothetical protein CBG13323
MSFSSVSAASQTRVGVVQMTSVGDLDANYATCSRLTKEAAAAGVKFLCFPEVFSFIGSKDGESVKLAEPLDGPIMQRYCSLANESSIWLSLGGFQERGPDDSHQYNTHVLIDESGKVRSSYRKIHLFDVDVPGNMVYKESRFTTAGDTVVAVDSPFGRLGLTVCYDLRFPELYQCLRFKHQAQVLLVPSAFTKVTGEAHWEILLRARAIETQCYVIAAAQAGKHNEKRESYGDSIIIDPWGTVIARLPDRLSTGFAVADIDLSKVEAVRTKMPISVHRKFESIWKSSSL

SEQ ID NO: 15482 - DNA, 936 bp, Triticum aestivum
  misc_feature (1)..(936): Ceres Seq. ID no. 15178534
gaaatcgcacaatctcagaggccaaaaccctcgcccccaaacaccccaccgccggcgatctcctcctcctcctccgatggatctctcagctgtccacgccgcgctctccgccaagtcctactccgccatcgccaccctctgcgacgacctcctcctccaggttgcgtcccggggcgtcgccaccgacgactggccttacgccgttcatctcctcgcccatctctacctcaacgacctgaacagcgcgaggtttctatggaaaacggtgccgcaggaggtgaaggaagctcatccggagctgggcgccatctggaagattggccagtgcctctggaaccgtgactatgctggggtctatacttccgcacaggggttcgagtgggggcctgaaatcgctgattttgtggccggcttcctagaaagctacagaaagaggatatttgagctgttgacttctgcgtataccacaatcagcattgcagatgtggctcacttcatggggatgagcgaggaggatgctactaactatgcggtgcaaaatggttggagtctggatgtggcaaccaagatgcttactgtcagaaaacagaagccccagactaaccagaagcttgatgcaagcaaactgcagcgtttgaccgaatgtgttttccacctggagcactgatgccatccgttccgcttttaaggcgcctattaatcgtacatggtggtagcttaatactgcacggctagattgtgttttggctggaaaggagagatcgctctgtactgaatatgcgtcttctggttgagcgagcttgccatttctgtcttgtttgcttgttaacaaggagtgcgtgtattgaagttaagcgaatgattactgtgcctatgttgaacctattagttgttttaagtgatgtgaagtttgaaattagaaaaaaaaaaaaaaaa

SEQ ID NO: 15483 - protein, 221 aa, Triticum aestivum
  peptide (1)..(221): Ceres Seq. ID no. 15178535
  misc_feature (26)..(221): NCBI GI NO: 38345448 NR Description: OSJNBa0042L16.3
  misc_feature (26)..(221): NCBI GI NO: 29468343 NR Description: CSN8 [Nicotiana benthamiana]
  misc_feature (26)..(221): NCBI GI NO: 7484675 NR Description: multisubunit regulator protein COP9 - spinach
  misc_feature (26)..(221): NCBI GI NO: 15236410 NR Description: COP9 protein [Arabidopsis thaliana]
  misc_feature (26)..(139): NCBI GI NO: 34897554 NR Description: OSJNBa0042L16.14
  misc_feature (39)..(221): NCBI GI NO: 38566156 NR Description: COP9 signalosome subunit 8 isoform 1
  misc_feature (43)..(221): NCBI GI NO: 28374344 NR Description: Similar to COP9 homolog [Danio rerio]
  misc_feature (36)..(198): NCBI GI NO: 38648875 NR Description: Unknown (protein for MGC:72985)
  misc_feature (34)..(195): NCBI GI NO: 5729779 NR Description: COP9 homolog [Homo sapiens]
KSHNLRGQNPRPQTPHRRRSPPPPPMDLSAVHAALSAKSYSAIATLCDDLLLQVASRGVATDDWPYAVHLLAHLYLNDLNSARFLWKTVPQEVKEAHPELGAIWKIGQCLWNRDYAGVYTSAQGFEWGPEIADFVAGFLESYRKRIFELLTSAYTTISIADVAHFMGMSEEDATNYAVQNGWSLDVATKMLTVRKQKPQTNQKLDASKLQRLTECVFHLEH

SEQ ID NO: 15484 - protein, 196 aa, Triticum aestivum
  peptide (1)..(196): Ceres Seq. ID no. 15178536
  misc_feature (1)..(196): NCBI GI NO: 38345448 NR Description: OSJNBa0042L16.3
  misc_feature (1)..(196): NCBI GI NO: 29468343 NR Description: CSN8 [Nicotiana benthamiana]
  misc_feature (1)..(196): NCBI GI NO: 7484675 NR Description: multisubunit regulator protein COP9 - spinach
  misc_feature (1)..(196): NCBI GI NO: 15236410 NR Description: COP9 protein [Arabidopsis thaliana]
  misc_feature (1)..(114): NCBI GI NO: 34897554 NR Description: OSJNBa0042L16.14
  misc_feature (14)..(196): NCBI GI NO: 38566156 NR Description: COP9 signalosome subunit 8 isoform 1
  misc_feature (18)..(196): NCBI GI NO: 28374344 NR Description: Similar to COP9 homolog [Danio rerio]
  misc_feature (11)..(173): NCBI GI NO: 38648875 NR Description: Unknown (protein for MGC:72985)
  misc_feature (9)..(170): NCBI GI NO: 5729779 NR Description: COP9 homolog [Homo sapiens]
MDLSAVHAALSAKSYSAIATLCDDLLLQVASRGVATDDWPYAVHLLAHLYLNDLNSARFLWKTVPQEVKEAHPELGAIWKIGQCLWNRDYAGVYTSAQGFEWGPEIADFVAGFLESYRKRIFELLTSAYTTISIADVAHFMGMSEEDATNYAVQNGWSLDVATKMLTVRKQKPQTNQKLDASKLQRLTECVFHLEH

SEQ ID NO: 15485 - protein, 113 aa, Triticum aestivum
  peptide (1)..(113): Ceres Seq. ID no. 15178537
EIAQSQRPKPSPPNTPPPAISSSSSDGSLSCPRRALRQVLLRHRHPLRRPPPPGCVPGRRHRRLALRRSSPRPSLPQRPEQREVSMENGAAGGEGSSSGAGRHLEDWPVPLEP

SEQ ID NO: 15486 - DNA, 1130 bp, Triticum aestivum
  misc_feature (1)..(1130): Ceres Seq. ID no. 13656105
atcccagccctacctgccattttcctccgttcgttcatctccttcgcctcgccaccgtccctcctcctctcttccctccctcatccctcatctcgtgtcggctcgaaagtcgaaaccctagaccaaccaccctcccctagtacgtaggaacagggacagagatgtatgcagaccagatctccaccggccgcaagcgctccatccatgaccgccttgacgccgacctcccctccgaccgcggcggcgcggacgccgccggccgggctcgtaacgcgctgtccaagaggcaacgacaaactgatgataaatggaagcatgatctttaccgggatgatgaatcagcttcaagatcagttgatccacgggatttgcgattcaagcttcagaagaaaagctctcagcaagggtttgctggccaaaagggttccggggtacgtgatctacgtgagatgttatctggaacaatgcacgcacaaccatcaaatgttgaccctcaaaagaggaaaccggtgtcagaggttgtgaaagtcacaaggcgtgaaattgttgatgaaaggcctgtacgcctaagtaagaaagtatcaaaaccatcaacatccaagaagacttctcagccaaaggctgaaagtccactcgacagttttctgaaatcacttggacttgagaagtattctattaccttccaggcggaggaggttgacatggcggccctacgtcacatgactgaaagtgatctcaaggcgttgggcatcccgatgggtcctaggaagaagattacccttgccttggaatccagagcgtagggcaatgtccctggagtacaatgtagaaaagcagggagatgtggtaggtttttgctcatctgcaaatttggcatatcttggaaagcagtggtacaggtaaacaatgcggtgtctcttgtaatggcatgttgctgtaagattattagactgctgttgtttatctggtctgcatgctttcctggccagaccagctgatttaactgatgaggtatccgtgctgttgaagctgcggtgatgttctcgctgtatactattattatgccttttttttcattggaaactggcattattagagtaatagagttgagattcttcagttagtatttc

SEQ ID NO: 15487 - protein, 213 aa, Triticum aestivum; identical to SEQ ID NO: 6899
  peptide (1)..(213): Ceres Seq. ID no. 13656106
  misc_feature (153)..(209): Pfam Name: Sterile alpha motif Pfam Description: SAM domain
  misc_feature (1)..(199): NCBI GI NO: 39546279 NR Description: OSJNBa0083D01.12
  misc_feature (1)..(212): NCBI GI NO: 18397861 NR Description: expressed protein [Arabidopsis thaliana]
  misc_feature (1)..(209): NCBI GI NO: 30695517 NR Description: expressed protein [Arabidopsis thaliana]
  misc_feature (140)..(209): NCBI GI NO: 38345636 NR Description: OSJNBb0048E02.6
  misc_feature (143)..(211): NCBI GI NO: 22330538 NR Description: expressed protein [Arabidopsis thaliana]

SEQ ID NO: 15488 - protein, 119 aa, Triticum aestivum; identical to SEQ ID NO: 6900
  peptide (1)..(119): Ceres Seq. ID no. 13656107

SEQ ID NO: 15489 - protein, 117 aa, Triticum aestivum; identical to SEQ ID NO: 6901
  peptide (1)..(117): Ceres Seq. ID no. 13656108
  misc_feature (57)..(113): Pfam Name: Sterile alpha motif Pfam Description: SAM domain
  misc_feature (1)..(103): NCBI GI NO: 39546279 NR Description: OSJNBa0083D01.12
  misc_feature (1)..(116): NCBI GI NO: 18397861 NR Description: expressed protein [Arabidopsis thaliana]
  misc_feature (1)..(113): NCBI GI NO: 30695517 NR Description: expressed protein [Arabidopsis thaliana]
  misc_feature (44)..(113): NCBI GI NO: 38345636 NR Description: OSJNBb0048E02.6
  misc_feature (47)..(115): NCBI GI NO: 22330538 NR Description: expressed protein [Arabidopsis thaliana]

SEQ ID NO: 15490 - DNA, 1128 bp, Triticum aestivum
  misc_feature (1)..(1128): Ceres Seq. ID no. 12617704
ctaggtctaagcagagctctttttttggtcgctcctcgacctcggggtggaaatcgtaaaagctctgggcgaagagaaaccccctttcctccgcaccgatgttctccgctgttcgatcccgagccctcggccgatggcgcccgccgccgcaccttctcccgcgcctcctctcctccgccggcgcctcgtcggcccggccggcggagcttatcgagctctcggaggtggagaaggtgctgcacgacgtccgggcgggggacgtgcgtgtgttccccgtcggcgagggcgggctccacggcggcgcttgtgcggactacatggtcgtcgccaccggccgctccgactggcacgtccgcaacatcgctcaggccatactttacaagataaagcagaaacagaagggttctaatcgaatattgatgccgagtgtagaaggccagcaagctggaaagtgggttgtcattgattctggaagtatcatcatccacgcgcttgaagaaagagcaagagagtactatgatttggaaagtatttggacaaaggcggtgtcccctaacatttctgttcaggagttggagacctcacttgtgaagacgcgccgcagggacctgtcacaaaaacccatgaagagcatttgagttaatgtgctgcggtctgtagtgggtttgttcaaggtttgtcagattggcagcgtcaagcttgtttgtgtcaagaaccttggaaggataggcttgcaaggttgcttgtgaatgagaccgtctggattcatgccagcatgatgtctctctgtcaagtttgcttcagctatcttttatcatgtcgtcgtttgcaagttcaagccaagattgtggactttttttgcttctttcattttgttattcaccccttcgttggatggtaatcataatactatactatcttgaagccaaggtaacacgttggacaatttagggtgtgtttgtttgggctgcaacttctaagttgcaacggctccctctggaaggaggagctgtagttgttaggttgacgatgaggtgcagctgtttggtagttttgttgtagcagctatggctgatgctgaaatgtgccgtcatacttgtagttgcgatcacatttaaatacttagat

SEQ ID NO: 15491 - protein, 179 aa, Triticum aestivum
  peptide (1)..(179): Ceres Seq. ID no. 12617705
  misc_feature (37)..(147): Pfam Name: Pfam Description:  Domain of unknown function DUF143
  misc_feature (1)..(177): NCBI GI NO: 18408812 NR Description: expressed protein; protein id: At1g67620
  misc_feature (1)..(177): NCBI GI NO: 21536608 NR Description: unknown [Arabidopsis thaliana]
  misc_feature (72)..(147): NCBI GI NO: 33519773 NR Description: conserved hypothetical protein
  misc_feature (49)..(149): NCBI GI NO: 39998299 NR Description: iojap-related protein
  misc_feature (1)..(146): NCBI GI NO: 23109914 NR Description: hypothetical protein
  misc_feature (28)..(152): NCBI GI NO: 15890026 NR Description: AGR_C_5039p [Agrobacterium tumefaciens]
  misc_feature (28)..(152): NCBI GI NO: 17936652 NR Description: conserved hypothetical protein
  misc_feature (65)..(152): NCBI GI NO: 22962163 NR Description: hypothetical protein [Rhodopseudomonas palustris]
  misc_feature (40)..(147): NCBI GI NO: 21232046 NR Description: conserved hypothetical protein
  misc_feature (37)..(158): NCBI GI NO: 22983541 NR Description: hypothetical protein [Burkholderia fungorum]
MFSAVRSRALGRWRPPPHLLPRLLSSAGASSARPAELIELSEVEKVLHDVRAGDVRVFPVGEGGLHGGACADYMVVATGRSDWHVRNIAQAILYKIKQKQKGSNRILMPSVEGQQAGKWVVIDSGSIIIHALEERAREYYDLESIWTKAVSPNISVQELETSLVKTRRRDLSQKPMKSI

SEQ ID NO: 15492 - protein, 128 aa, Triticum aestivum
  peptide (1)..(128): Ceres Seq. ID no. 12617706
LGLSRALFLVAPRPRGGNRKSSGRRETPFPPHRCSPLFDPEPSADGARRRTFSRASSPPPAPRRPGRRSLSSSRRWRRCCTTSGRGTCVCSPSARAGSTAALVRTTWSSPPAAPTGTSATSLRPYFTR

SEQ ID NO: 15493 - protein, 106 aa, Triticum aestivum
  peptide (1)..(106): Ceres Seq. ID no. 12617707
  misc_feature (1)..(74): Pfam Name: Pfam Description:  Domain of unknown function DUF143
  misc_feature (1)..(104): NCBI GI NO: 18408812 NR Description: expressed protein; protein id: At1g67620
  misc_feature (1)..(104): NCBI GI NO: 21536608 NR Description: unknown [Arabidopsis thaliana]
  misc_feature (1)..(74): NCBI GI NO: 33519773 NR Description: conserved hypothetical protein
  misc_feature (1)..(76): NCBI GI NO: 39998299 NR Description: iojap-related protein
  misc_feature (1)..(73): NCBI GI NO: 23109914 NR Description: hypothetical protein
  misc_feature (1)..(79): NCBI GI NO: 15890026 NR Description: AGR_C_5039p [Agrobacterium tumefaciens]
  misc_feature (1)..(79): NCBI GI NO: 17936652 NR Description: conserved hypothetical protein
  misc_feature (1)..(79): NCBI GI NO: 22962163 NR Description: hypothetical protein [Rhodopseudomonas palustris]
  misc_feature (1)..(74): NCBI GI NO: 21232046 NR Description: conserved hypothetical protein
  misc_feature (1)..(85): NCBI GI NO: 22983541 NR Description: hypothetical protein [Burkholderia fungorum]
MVVATGRSDWHVRNIAQAILYKIKQKQKGSNRILMPSVEGQQAGKWVVIDSGSIIIHALEERAREYYDLESIWTKAVSPNISVQELETSLVKTRRRDLSQKPMKSI

SEQ ID NO: 15494 - DNA, 1184 bp, Triticum aestivum
  misc_feature (1)..(1184): Ceres Seq. ID no. 14303553
ttttttcttcttgctcagcctcggacgcaatggccgccgttggtcttctcggcgtgcgtccagctccggcgaccggccgccttgagaggcaggcgagggcttcacctgacgcggttagctggggctggcgtgcccgcgcgcgcccccttcggtccgttccgccgcccgggcgagcggggaggggcggggcaagggcggcgaggcccttgcgcgccgcgatgggcggcggcgacctgtacgccctcgacttcgacggcgtcttctgcgacagctgcggcgagagctccctctccgccgtcaaggccgccaaggtgaggtggccgtgggcgtttgagcaggtcgacgccgccatggaagagtggatagtggagcagatgcacacccttcgtccagtgatagaaacaggatatgagaacctgttgcttgtaaggttgcttgttgagatccagataccctctgctcgaaagtcatcagttgcagatgggcttagcatccaagaaatattggacaactggtcaaaactgttgcccactctcatggacgagtggcaagaagatagggaatctcttgtagatctctttggccgtgtaagggatgactggcttgaaaatgatttgtctggctggataggtgctaacaggttttatcctgggacggctgatgcattaaagctttcaagctctgaactttacatagtcacaacaaaacagagtagatttactggagcactacttaaagaattggctggagtagattttccctctgaaaggatatatggccttggcactggtccgaaggtaaaagttctccagcagttgcaggaaatgccacagcaccaaggtcttacacttcatttcgtcgaggaccgactagcaactctgaagaacgtgataaaagaaccagcgctggacaaatggaacctctacctggtgaaatggggatacaacacgcaagaagagagggaagaagcaggggccatatcgaggatccagctcatcgatctcccagatttcagtaagcagctgaaataagtaactggcagacctagatgcagccttcgaaactttgtttttgttggacgcgctcgtaaacagcaacggatttacttgacttttatttattattgtttgcatatttgtgaagtggtttatttcgtcagttctcctagagactgactttaccag

SEQ ID NO: 15495 - protein, 342 aa, Triticum aestivum
  peptide (1)..(342): Ceres Seq. ID no. 14303554
  misc_feature (78)..(273): Pfam Name: Pfam Description:  haloacid dehalogenase-like hydrolase
  misc_feature (75)..(342): NCBI GI NO: 22324441 NR Description: contains ESTsAU091908
  misc_feature (76)..(342): NCBI GI NO: 18406942 NR Description: expressed protein [Arabidopsis thaliana]
  misc_feature (75)..(263): NCBI GI NO: 38194220 NR Description: unknown protein
  misc_feature (260)..(284): NCBI GI NO: 38194220 NR Description: unknown protein
  misc_feature (155)..(303): NCBI GI NO: 16660293 NR Description: hypothetical protein [Musa acuminata]
  misc_feature (78)..(339): NCBI GI NO: 17231355 NR Description: hypothetical protein [Nostoc sp. PCC 7120]
  misc_feature (78)..(339): NCBI GI NO: 23124072 NR Description: hypothetical protein [Nostoc punctiforme]
  misc_feature (77)..(338): NCBI GI NO: 37521612 NR Description: hypothetical protein glr2043
  misc_feature (78)..(338): NCBI GI NO: 16331243 NR Description: unknown protein [Synechocystis sp. PCC 6803]
  misc_feature (78)..(337): NCBI GI NO: 22299234 NR Description: ORF_ID:tlr1691~hypothetical protein
FSSCSASDAMAAVGLLGVRPAPATGRLERQARASPDAVSWGWRARARPLRSVPPPGRAGRGGARAARPLRAAMGGGDLYALDFDGVFCDSCGESSLSAVKAAKVRWPWAFEQVDAAMEEWIVEQMHTLRPVIETGYENLLLVRLLVEIQIPSARKSSVADGLSIQEILDNWSKLLPTLMDEWQEDRESLVDLFGRVRDDWLENDLSGWIGANRFYPGTADALKLSSSELYIVTTKQSRFTGALLKELAGVDFPSERIYGLGTGPKVKVLQQLQEMPQHQGLTLHFVEDRLATLKNVIKEPALDKWNLYLVKWGYNTQEEREEAGAISRIQLIDLPDFSKQLK

SEQ ID NO: 15496 - protein, 333 aa, Triticum aestivum
  peptide (1)..(333): Ceres Seq. ID no. 14303555
  misc_feature (69)..(264): Pfam Name: Pfam Description:  haloacid dehalogenase-like hydrolase
  misc_feature (66)..(333): NCBI GI NO: 22324441 NR Description: contains ESTsAU091908
  misc_feature (67)..(333): NCBI GI NO: 18406942 NR Description: expressed protein [Arabidopsis thaliana]
  misc_feature (66)..(254): NCBI GI NO: 38194220 NR Description: unknown protein
  misc_feature (251)..(275): NCBI GI NO: 38194220 NR Description: unknown protein
  misc_feature (146)..(294): NCBI GI NO: 16660293 NR Description: hypothetical protein [Musa acuminata]
  misc_feature (69)..(330): NCBI GI NO: 17231355 NR Description: hypothetical protein [Nostoc sp. PCC 7120]
  misc_feature (69)..(330): NCBI GI NO: 23124072 NR Description: hypothetical protein [Nostoc punctiforme]
  misc_feature (68)..(329): NCBI GI NO: 37521612 NR Description: hypothetical protein glr2043
  misc_feature (69)..(329): NCBI GI NO: 16331243 NR Description: unknown protein [Synechocystis sp. PCC 6803]
  misc_feature (69)..(328): NCBI GI NO: 22299234 NR Description: ORF_ID:tlr1691~hypothetical protein
MAAVGLLGVRPAPATGRLERQARASPDAVSWGWRARARPLRSVPPPGRAGRGGARAARPLRAAMGGGDLYALDFDGVFCDSCGESSLSAVKAAKVRWPWAFEQVDAAMEEWIVEQMHTLRPVIETGYENLLLVRLLVEIQIPSARKSSVADGLSIQEILDNWSKLLPTLMDEWQEDRESLVDLFGRVRDDWLENDLSGWIGANRFYPGTADALKLSSSELYIVTTKQSRFTGALLKELAGVDFPSERIYGLGTGPKVKVLQQLQEMPQHQGLTLHFVEDRLATLKNVIKEPALDKWNLYLVKWGYNTQEEREEAGAISRIQLIDLPDFSKQLK

SEQ ID NO: 15497 - protein, 270 aa, Triticum aestivum
  peptide (1)..(270): Ceres Seq. ID no. 14303556
  misc_feature (6)..(201): Pfam Name: Pfam Description:  haloacid dehalogenase-like hydrolase
  misc_feature (3)..(270): NCBI GI NO: 22324441 NR Description: contains ESTsAU091908
  misc_feature (4)..(270): NCBI GI NO: 18406942 NR Description: expressed protein [Arabidopsis thaliana]
  misc_feature (3)..(191): NCBI GI NO: 38194220 NR Description: unknown protein
  misc_feature (188)..(212): NCBI GI NO: 38194220 NR Description: unknown protein
  misc_feature (83)..(231): NCBI GI NO: 16660293 NR Description: hypothetical protein [Musa acuminata]
  misc_feature (6)..(267): NCBI GI NO: 17231355 NR Description: hypothetical protein [Nostoc sp. PCC 7120]
  misc_feature (6)..(267): NCBI GI NO: 23124072 NR Description: hypothetical protein [Nostoc punctiforme]
  misc_feature (5)..(266): NCBI GI NO: 37521612 NR Description: hypothetical protein glr2043
  misc_feature (6)..(266): NCBI GI NO: 16331243 NR Description: unknown protein [Synechocystis sp. PCC 6803]
  misc_feature (6)..(265): NCBI GI NO: 22299234 NR Description: ORF_ID:tlr1691~hypothetical protein
MGGGDLYALDFDGVFCDSCGESSLSAVKAAKVRWPWAFEQVDAAMEEWIVEQMHTLRPVIETGYENLLLVRLLVEIQIPSARKSSVADGLSIQEILDNWSKLLPTLMDEWQEDRESLVDLFGRVRDDWLENDLSGWIGANRFYPGTADALKLSSSELYIVTTKQSRFTGALLKELAGVDFPSERIYGLGTGPKVKVLQQLQEMPQHQGLTLHFVEDRLATLKNVIKEPALDKWNLYLVKWGYNTQEEREEAGAISRIQLIDLPDFSKQLK

SEQ ID NO: 15498 - DNA, 1547 bp, Triticum aestivum
  misc_feature (1)..(1547): Ceres Seq. ID no. 13597580
  misc_feature (1132)..(1132): n is a, c, t, g, unknown, or other
atcgaaaaatcgatgcaattcgggaaaaaaaggaaaacgtgggaactggaatatccccacttctccgcggaaccccccaccatttctcctctctgctctcaagctcgctcgcaccaatggccggctcccggctcgtccatctcttccttctcatcctcttcttcccctccctccgcgccgcccccaacaccaccgccgtggtgtccaggatcgcatttggctcctgcgccaaccagagcgcgccccagcccgtgtgggaggccatcgtggggttcgacccgcaggtcttcatctggctcggggacaacgtctacggggacaacaagcgcccgttccgggtgttcgggagggagcgcacggtggggccctggaggaacgtgccgcgcttctacccggcgaccgaggaggagctgcgccggaagtacgagctggccaaggctaacccggggtacgccaagctgagggagagggctagggtcattggaacatgggatgaccatgattatggagtgaatgatgcaggaaaggaatatagtgggaaagtgttatcccaaaggcttctattagatttcctggatgaagacgaagacagtccacggaggaaacaagcaggtgtttatgcctcatacatgtttggccccgaaggaaaacgtgtaaaggtaataatgttggacaccagatatcacagagacccactcttaagtgatggaactatacttggagatcctcagtggcagtggctggagagggagctacgtggtcctcagtcagagatgaccatcattggatcttcaattcaggtggtgtccaatctttctgccaccactcgacctttgttctatgtggagtcttgggcatgctttccgagggaaagagaacggctgtttagactgatcgatagcacaatatttcaatctgttatgagacttctggcttggctgacaccaacccccatgcgagtcttcagccctaactgccgtcacaaatcatgctcatatggtcagccaaattttggagcaatcgaaatagattggaatgcagtaactccacgggttaaaattgaactaagagatttacagggcaattctgttgatggtgtggagttccctatatctgagctgaagccatcaantgcacatgcaaacaaaaaagaagggcattcttttgaagcacattgtagtctcgaaacagagcttccatggctgctacggtaccgccttgcgatgctattctttggcaccattgccgtttttgtcgttgctttggtgcttgtcggaatcgcttgctgttcagctactaaaatgtttactaggaagtgcaagatggcatagctacacatgacagtggacaagagcagagacttttcgatctgactagtgttggacactgaccaggtgagcagggatgttgattggccaaggatcaacatgacacttacttgattgtgaatatggcacgctgtgagcacatactggaaagtgtaacgaagctgtgacgagtcttcatataggtggagaaatgatgccatggaaatccgtttggttggc

SEQ ID NO: 15499 - protein, 442 aa, Triticum aestivum
  peptide (1)..(442): Ceres Seq. ID no. 15222137
  misc_feature (45)..(301): NCBI GI NO: 15238950 NR Description: expressed protein [Arabidopsis thaliana]
  misc_feature (304)..(441): NCBI GI NO: 15238950 NR Description: expressed protein [Arabidopsis thaliana]
  misc_feature (45)..(301): NCBI GI NO: 13430796 NR Description: unknown protein [Arabidopsis thaliana]
  misc_feature (304)..(441): NCBI GI NO: 13430796 NR Description: unknown protein [Arabidopsis thaliana]
  misc_feature (141)..(231): NCBI GI NO: 23613643 NR Description: hypothetical protein, conserved
  misc_feature (234)..(301): NCBI GI NO: 23613643 NR Description: hypothetical protein, conserved
  misc_feature (129)..(231): NCBI GI NO: 23491463 NR Description: Arabidopsis thaliana P42251
  misc_feature (73)..(309): NCBI GI NO: 37519932 NR Description: hypothetical protein gll0363
  misc_feature (377)..(377): Xaa is any aa, unknown or other
RKIDAIREKKENVGTGISPLLRGTPHHFSSLLSSSLAPMAGSRLVHLFLLILFFPSLRAAPNTTAVVSRIAFGSCANQSAPQPVWEAIVGFDPQVFIWLGDNVYGDNKRPFRVFGRERTVGPWRNVPRFYPATEEELRRKYELAKANPGYAKLRERARVIGTWDDHDYGVNDAGKEYSGKVLSQRLLLDFLDEDEDSPRRKQAGVYASYMFGPEGKRVKVIMLDTRYHRDPLLSDGTILGDPQWQWLERELRGPQSEMTIIGSSIQVVSNLSATTRPLFYVESWACFPRERERLFRLIDSTIFQSVMRLLAWLTPTPMRVFSPNCRHKSCSYGQPNFGAIEIDWNAVTPRVKIELRDLQGNSVDGVEFPISELKPSXAHANKKEGHSFEAHCSLETELPWLLRYRLAMLFFGTIAVFVVALVLVGIACCSATKMFTRKCKMA

SEQ ID NO: 15500 - protein, 404 aa, Triticum aestivum
  peptide (1)..(404): Ceres Seq. ID no. 15222138
  misc_feature (7)..(263): NCBI GI NO: 15238950 NR Description: expressed protein [Arabidopsis thaliana]
  misc_feature (266)..(403): NCBI GI NO: 15238950 NR Description: expressed protein [Arabidopsis thaliana]
  misc_feature (7)..(263): NCBI GI NO: 13430796 NR Description: unknown protein [Arabidopsis thaliana]
  misc_feature (266)..(403): NCBI GI NO: 13430796 NR Description: unknown protein [Arabidopsis thaliana]
  misc_feature (103)..(193): NCBI GI NO: 23613643 NR Description: hypothetical protein, conserved
  misc_feature (196)..(263): NCBI GI NO: 23613643 NR Description: hypothetical protein, conserved
  misc_feature (91)..(193): NCBI GI NO: 23491463 NR Description: Arabidopsis thaliana P42251
  misc_feature (35)..(271): NCBI GI NO: 37519932 NR Description: hypothetical protein gll0363
  misc_feature (339)..(339): Xaa is any aa, unknown or other
MAGSRLVHLFLLILFFPSLRAAPNTTAVVSRIAFGSCANQSAPQPVWEAIVGFDPQVFIWLGDNVYGDNKRPFRVFGRERTVGPWRNVPRFYPATEEELRRKYELAKANPGYAKLRERARVIGTWDDHDYGVNDAGKEYSGKVLSQRLLLDFLDEDEDSPRRKQAGVYASYMFGPEGKRVKVIMLDTRYHRDPLLSDGTILGDPQWQWLERELRGPQSEMTIIGSSIQVVSNLSATTRPLFYVESWACFPRERERLFRLIDSTIFQSVMRLLAWLTPTPMRVFSPNCRHKSCSYGQPNFGAIEIDWNAVTPRVKIELRDLQGNSVDGVEFPISELKPSXAHANKKEGHSFEAHCSLETELPWLLRYRLAMLFFGTIAVFVVALVLVGIACCSATKMFTRKCKMA

SEQ ID NO: 15501 - protein, 233 aa, Triticum aestivum
  peptide (1)..(233): Ceres Seq. ID no. 15222139
  misc_feature (1)..(92): NCBI GI NO: 15238950 NR Description: expressed protein [Arabidopsis thaliana]
  misc_feature (95)..(232): NCBI GI NO: 15238950 NR Description: expressed protein [Arabidopsis thaliana]
  misc_feature (1)..(92): NCBI GI NO: 13430796 NR Description: unknown protein [Arabidopsis thaliana]
  misc_feature (95)..(232): NCBI GI NO: 13430796 NR Description: unknown protein [Arabidopsis thaliana]
  misc_feature (1)..(22): NCBI GI NO: 23613643 NR Description: hypothetical protein, conserved
  misc_feature (25)..(92): NCBI GI NO: 23613643 NR Description: hypothetical protein, conserved
  misc_feature (1)..(22): NCBI GI NO: 23491463 NR Description: Arabidopsis thaliana P42251
  misc_feature (1)..(100): NCBI GI NO: 37519932 NR Description: hypothetical protein gll0363
  misc_feature (168)..(168): Xaa is any aa, unknown or other
MFGPEGKRVKVIMLDTRYHRDPLLSDGTILGDPQWQWLERELRGPQSEMTIIGSSIQVVSNLSATTRPLFYVESWACFPRERERLFRLIDSTIFQSVMRLLAWLTPTPMRVFSPNCRHKSCSYGQPNFGAIEIDWNAVTPRVKIELRDLQGNSVDGVEFPISELKPSXAHANKKEGHSFEAHCSLETELPWLLRYRLAMLFFGTIAVFVVALVLVGIACCSATKMFTRKCKMA

SEQ ID NO: 15502 - DNA, 1251 bp, Triticum aestivum
  misc_feature (1)..(1251): Ceres Seq. ID no. 13597706
atcacgcggcgctaacgagtagcgacgcggacaggggttgcgtgacactaccggcactgcagaagcacgggagccatggcgcgggaggaggaaggacccgcaatgatggacgccgcggagcgacgcctccgcgtggtctccgcgcacctcgagccgcaggccggcgccaccgctggcctcgcctctaaccccaccgccggcgagtacgcccacgtgcagggctacagcgttgttcttcctgaaaagttgcaaactggaaagtggaacgtgtaccgatctgcagagtcacctctgcgtttaattaacagatttcctgctactccagacattggaacactgcatgataattttgtgtatgcagtcgagacttttacagattgtaggtatctgggtacaagagtgtgcgctgatggagcagtcggagactacaaatggatgacgtatggagaagctagtacgagcagaactgcaataggttctggtcttatttatcatggaatatctgaaggtgcacgcattggtctgtattttataaacagacctgagtggatcataattgatcatgcttgtgctgcatattcatatgtatctgtaccactttatgatactcttggtccagatgcagttcagttcattgtgaaccatgcaacagtagaaactattttctgtgtgcctcaaacactaagcactctgctaagcttcctaactcaaatgccatgtgtccgccttatagtggtagttggtggagacaatgcaaatacgccatctacaacagcagctgctggagtggaaatcataacttactccaggctacacagccagggaaagatgagttctcaaacttaccgtcctccaaaacctgaagatgttgccactatctgctacacgagtggcactactggcacaccaaagggagctgttctttctcatgagaacttaatcgcgaatgttgcaggatcaagcttgggcgttaagttttacccctccgacgtgtatatctcatacctacctttagctcacatctatgagagagctaaccaaattgcactgcttcactatggagttgccattggattttaccaaggggtatgtagattttgaactatttaagatgagagctagtagtactttgcattgttgtatagaaactgaacgacatgaaggacatgtattgagagaagtaactgataatatgtgatcttgtataagttttactcatctaatgcaatagtttgcacttgagttgttttt

SEQ ID NO: 15503 - protein, 341 aa, Triticum aestivum
  peptide (1)..(341): Ceres Seq. ID no. 13597707
  misc_feature (122)..(337): Pfam Name: Pfam Description:  AMP-binding enzyme
  misc_feature (13)..(337): NCBI GI NO: 13516481 NR Description: long-chain acyl-CoA synthetase
  misc_feature (13)..(337): NCBI GI NO: 18397422 NR Description: AMP-binding protein, putative
  misc_feature (13)..(337): NCBI GI NO: 20805873 NR Description: long chain acyl-CoA synthetase 6
  misc_feature (13)..(337): NCBI GI NO: 7437846 NR Description: probable long-chain-fatty-acid-CoA ligase (EC6
  misc_feature (15)..(337): NCBI GI NO: 20805875 NR Description: long chain acyl-CoA synthetase 7
  misc_feature (15)..(337): NCBI GI NO: 22327099 NR Description: AMP-binding protein, putative
  misc_feature (13)..(337): NCBI GI NO: 6671960 NR Description: putative long-chain-fatty-acid--CoA ligase
  misc_feature (84)..(340): NCBI GI NO: 27882609 NR Description: similar to fatty acid Coenzyme A ligase
  misc_feature (70)..(338): NCBI GI NO: 28565633 NR Description: fatty acyl-CoA synthetase
  misc_feature (84)..(340): NCBI GI NO: 28436862 NR Description: similar to fatty acid Coenzyme A ligase
MAREEEGPAMMDAAERRLRVVSAHLEPQAGATAGLASNPTAGEYAHVQGYSVVLPEKLQTGKWNVYRSAESPLRLINRFPATPDIGTLHDNFVYAVETFTDCRYLGTRVCADGAVGDYKWMTYGEASTSRTAIGSGLIYHGISEGARIGLYFINRPEWIIIDHACAAYSYVSVPLYDTLGPDAVQFIVNHATVETIFCVPQTLSTLLSFLTQMPCVRLIVVVGGDNANTPSTTAAAGVEIITYSRLHSQGKMSSQTYRPPKPEDVATICYTSGTTGTPKGAVLSHENLIANVAGSSLGVKFYPSDVYISYLPLAHIYERANQIALLHYGVAIGFYQGVCRF

SEQ ID NO: 15504 - protein, 332 aa, Triticum aestivum
  peptide (1)..(332): Ceres Seq. ID no. 13597708
  misc_feature (113)..(328): Pfam Name: Pfam Description:  AMP-binding enzyme
  misc_feature (4)..(328): NCBI GI NO: 13516481 NR Description: long-chain acyl-CoA synthetase
  misc_feature (4)..(328): NCBI GI NO: 18397422 NR Description: AMP-binding protein, putative
  misc_feature (4)..(328): NCBI GI NO: 20805873 NR Description: long chain acyl-CoA synthetase 6
  misc_feature (4)..(328): NCBI GI NO: 7437846 NR Description: probable long-chain-fatty-acid-CoA ligase (EC6
  misc_feature (6)..(328): NCBI GI NO: 20805875 NR Description: long chain acyl-CoA synthetase 7
  misc_feature (6)..(328): NCBI GI NO: 22327099 NR Description: AMP-binding protein, putative
  misc_feature (4)..(328): NCBI GI NO: 6671960 NR Description: putative long-chain-fatty-acid--CoA ligase
  misc_feature (75)..(331): NCBI GI NO: 27882609 NR Description: similar to fatty acid Coenzyme A ligase
  misc_feature (61)..(329): NCBI GI NO: 28565633 NR Description: fatty acyl-CoA synthetase
  misc_feature (75)..(331): NCBI GI NO: 28436862 NR Description: similar to fatty acid Coenzyme A ligase
MMDAAERRLRVVSAHLEPQAGATAGLASNPTAGEYAHVQGYSVVLPEKLQTGKWNVYRSAESPLRLINRFPATPDIGTLHDNFVYAVETFTDCRYLGTRVCADGAVGDYKWMTYGEASTSRTAIGSGLIYHGISEGARIGLYFINRPEWIIIDHACAAYSYVSVPLYDTLGPDAVQFIVNHATVETIFCVPQTLSTLLSFLTQMPCVRLIVVVGGDNANTPSTTAAAGVEIITYSRLHSQGKMSSQTYRPPKPEDVATICYTSGTTGTPKGAVLSHENLIANVAGSSLGVKFYPSDVYISYLPLAHIYERANQIALLHYGVAIGFYQGVCRF

SEQ ID NO: 15505 - protein, 331 aa, Triticum aestivum
  peptide (1)..(331): Ceres Seq. ID no. 13597709
  misc_feature (112)..(327): Pfam Name: Pfam Description:  AMP-binding enzyme
  misc_feature (3)..(327): NCBI GI NO: 13516481 NR Description: long-chain acyl-CoA synthetase
  misc_feature (3)..(327): NCBI GI NO: 18397422 NR Description: AMP-binding protein, putative
  misc_feature (3)..(327): NCBI GI NO: 20805873 NR Description: long chain acyl-CoA synthetase 6
  misc_feature (3)..(327): NCBI GI NO: 7437846 NR Description: probable long-chain-fatty-acid-CoA ligase (EC6
  misc_feature (5)..(327): NCBI GI NO: 20805875 NR Description: long chain acyl-CoA synthetase 7
  misc_feature (5)..(327): NCBI GI NO: 22327099 NR Description: AMP-binding protein, putative
  misc_feature (3)..(327): NCBI GI NO: 6671960 NR Description: putative long-chain-fatty-acid--CoA ligase
  misc_feature (74)..(330): NCBI GI NO: 27882609 NR Description: similar to fatty acid Coenzyme A ligase
  misc_feature (60)..(328): NCBI GI NO: 28565633 NR Description: fatty acyl-CoA synthetase
  misc_feature (74)..(330): NCBI GI NO: 28436862 NR Description: similar to fatty acid Coenzyme A ligase
MDAAERRLRVVSAHLEPQAGATAGLASNPTAGEYAHVQGYSVVLPEKLQTGKWNVYRSAESPLRLINRFPATPDIGTLHDNFVYAVETFTDCRYLGTRVCADGAVGDYKWMTYGEASTSRTAIGSGLIYHGISEGARIGLYFINRPEWIIIDHACAAYSYVSVPLYDTLGPDAVQFIVNHATVETIFCVPQTLSTLLSFLTQMPCVRLIVVVGGDNANTPSTTAAAGVEIITYSRLHSQGKMSSQTYRPPKPEDVATICYTSGTTGTPKGAVLSHENLIANVAGSSLGVKFYPSDVYISYLPLAHIYERANQIALLHYGVAIGFYQGVCRF

SEQ ID NO: 15506 - DNA, 1875 bp, Triticum aestivum
  misc_feature (1)..(1875): Ceres Seq. ID no. 13590644
ccctctgaagcctcctcccacccccctcaacgccgccgccgcaacccggaaaccctaaccaaaccccccagcgccacaccatggcgtccgcctacgaccgggaggacggcctcgcgccgccgcagccgcacggcggcggccccgccgacgcctacgatcccaactacgtcccggactcggtgaagaccttcgtggtgcacctgtaccgccacatccgcgacaagaacgtctacgagatccaccagatgtacgagggcggcttccagcgcctctccgaccgcctcttccgcgacacgccctggccgtcggccgaggccgtggcgccctactgcgacggcgaccacgtcttcctcctcctctaccgcgagctctggtaccgccacgcctacgcgcgcctctcccccctcaccgccagccaccgctccgagtcctggaacaactactgcgacctcttcagcgtcgtcctccacggcgtcgtcaacatgcagctgcctaaccagtggctgtgggacatggtggacgagttcgtctaccagttccagagcttctgccagtaccgcgccaagctcaagaacaagacggaagacgagctccagcagctaaagcagtttgacaaggcatggaatgtctatggggttctcaattacctgcaagcactcgttgagaagtccatgatcgcacagattctggagagggagaaagaggggctggagtcgtttaccgccaccgacgggtatgactaccagggtgggagcaatgtgctcaaggtcctgggttactacagcatgattgggcttctcaggatacactgccttcttggtgattaccacactggcctcaagtgcttggcaccgatcaaccttaaccagcagggggtctacaccattgtgattgggagtcacatctcgacaatctatcattatggatttgcaaaccttatgatgcgcaggtatgtcgatgctaccaaggaattcaacaaaattctgctttacattataaagtataagcagtaccatcagaaatcccctcagtatgaccagattctgaagaaaaatgagcagatgtatgcgctgctggcaatttgcctatctctgtgtccgcagaacaaactcatagatgaaaatgttagcgcccagctgaaagaaaagtacaatgacaaaatgacaaagatgcagaggtttgatgatgaagcatatgctgcctacgatgagctattttcgtatgcctgccccaagtttattacgccatcacctccagttctggaccagccacttacaaattataaccaggacgcctatcggcttcaattgaagctgttcctgtatgaagtgaagcagcaacagctgctttctgggatccggagctatctaaagttatactcagcaataactatcaccaaacttgcccagtatatggaaatggatgaggcaacacttaggtctatccttatgacgtacaagcacaaaatgcatgcagttgacagtaatgggaaaattgtatccagtgcagactttgatttctacattaatgaggatgttattcatgtcgtggagtccaagtcgaccaagcgccatggtgactactttttgagacagattttaaagtttgaagaaaccattgctgaattggacaaggtacagcttgactgagcatggtagagatcatggaggagagaaacgtcccaggatcctgttttccttttcttttttcctattgtgagaggcagttgtgatggctactgttagcagagcattagttgtgccttctggtacactttttgactcagtgaagcattggcaattcactgtattatcccgtttctagttcctgtwtgctatttgacgagtaatccgtcggttacgaattgagaacttg

SEQ ID NO: 15507 - protein, 522 aa, Triticum aestivum
  peptide (1)..(522): Ceres Seq. ID no. 15220986
  misc_feature (18)..(498): NCBI GI NO: 34904274 NR Description: Homo sapiens HSPC025-like protein
  misc_feature (1)..(522): NCBI GI NO: 22327068 NR Description: expressed protein [Arabidopsis thaliana]
  misc_feature (1)..(522): NCBI GI NO: 23397253 NR Description: unknown protein [Arabidopsis thaliana]
  misc_feature (47)..(519): NCBI GI NO: 38174413 NR Description: Unknown (protein for MGC:75896)
  misc_feature (47)..(519): NCBI GI NO: 34866934 NR Description: similar to Eukaryotic translation initiation factor3 subunit 6 interacting protein
  misc_feature (47)..(519): NCBI GI NO: 18700307 NR Description: tyrosine-rich heat shock protein [Mus musculus]
  misc_feature (47)..(519): NCBI GI NO: 7705433 NR Description: eukaryotic translation initiation factor 3
  misc_feature (47)..(519): NCBI GI NO: 27503211 NR Description: Similar to eukaryotic translation initiation factor3
  misc_feature (47)..(519): NCBI GI NO: 21553089 NR Description: eukaryotic translation initiation factor 3
  misc_feature (17)..(521): NCBI GI NO: 21358039 NR Description: CG5642-PA [Drosophila melanogaster]
MASAYDREDGLAPPQPHGGGPADAYDPNYVPDSVKTFVVHLYRHIRDKNVYEIHQMYEGGFQRLSDRLFRDTPWPSAEAVAPYCDGDHVFLLLYRELWYRHAYARLSPLTASHRSESWNNYCDLFSVVLHGVVNMQLPNQWLWDMVDEFVYQFQSFCQYRAKLKNKTEDELQQLKQFDKAWNVYGVLNYLQALVEKSMIAQILEREKEGLESFTATDGYDYQGGSNVLKVLGYYSMIGLLRIHCLLGDYHTGLKCLAPINLNQQGVYTIVIGSHISTIYHYGFANLMMRRYVDATKEFNKILLYIIKYKQYHQKSPQYDQILKKNEQMYALLAICLSLCPQNKLIDENVSAQLKEKYNDKMTKMQRFDDEAYAAYDELFSYACPKFITPSPPVLDQPLTNYNQDAYRLQLKLFLYEVKQQQLLSGIRSYLKLYSAITITKLAQYMEMDEATLRSILMTYKHKMHAVDSNGKIVSSADFDFYINEDVIHVVESKSTKRHGDYFLRQILKFEETIAELDKVQLD

SEQ ID NO: 15508 - protein, 467 aa, Triticum aestivum
  peptide (1)..(467): Ceres Seq. ID no. 15220987
  misc_feature (1)..(443): NCBI GI NO: 34904274 NR Description: Homo sapiens HSPC025-like protein
  misc_feature (1)..(467): NCBI GI NO: 22327068 NR Description: expressed protein [Arabidopsis thaliana]
  misc_feature (1)..(467): NCBI GI NO: 23397253 NR Description: unknown protein [Arabidopsis thaliana]
  misc_feature (1)..(464): NCBI GI NO: 38174413 NR Description: Unknown (protein for MGC:75896)
  misc_feature (1)..(464): NCBI GI NO: 34866934 NR Description: similar to Eukaryotic translation initiation factor3 subunit 6 interacting protein
  misc_feature (1)..(464): NCBI GI NO: 18700307 NR Description: tyrosine-rich heat shock protein [Mus musculus]
  misc_feature (1)..(464): NCBI GI NO: 7705433 NR Description: eukaryotic translation initiation factor 3
  misc_feature (1)..(464): NCBI GI NO: 27503211 NR Description: Similar to eukaryotic translation initiation factor3
  misc_feature (1)..(464): NCBI GI NO: 21553089 NR Description: eukaryotic translation initiation factor 3
  misc_feature (1)..(466): NCBI GI NO: 21358039 NR Description: CG5642-PA [Drosophila melanogaster]
MYEGGFQRLSDRLFRDTPWPSAEAVAPYCDGDHVFLLLYRELWYRHAYARLSPLTASHRSESWNNYCDLFSVVLHGVVNMQLPNQWLWDMVDEFVYQFQSFCQYRAKLKNKTEDELQQLKQFDKAWNVYGVLNYLQALVEKSMIAQILEREKEGLESFTATDGYDYQGGSNVLKVLGYYSMIGLLRIHCLLGDYHTGLKCLAPINLNQQGVYTIVIGSHISTIYHYGFANLMMRRYVDATKEFNKILLYIIKYKQYHQKSPQYDQILKKNEQMYALLAICLSLCPQNKLIDENVSAQLKEKYNDKMTKMQRFDDEAYAAYDELFSYACPKFITPSPPVLDQPLTNYNQDAYRLQLKLFLYEVKQQQLLSGIRSYLKLYSAITITKLAQYMEMDEATLRSILMTYKHKMHAVDSNGKIVSSADFDFYINEDVIHVVESKSTKRHGDYFLRQILKFEETIAELDKVQLD

SEQ ID NO: 15509 - protein, 388 aa, Triticum aestivum
  peptide (1)..(388): Ceres Seq. ID no. 15220988
  misc_feature (1)..(364): NCBI GI NO: 34904274 NR Description: Homo sapiens HSPC025-like protein
  misc_feature (1)..(388): NCBI GI NO: 22327068 NR Description: expressed protein [Arabidopsis thaliana]
  misc_feature (1)..(388): NCBI GI NO: 23397253 NR Description: unknown protein [Arabidopsis thaliana]
  misc_feature (1)..(385): NCBI GI NO: 38174413 NR Description: Unknown (protein for MGC:75896)
  misc_feature (1)..(385): NCBI GI NO: 34866934 NR Description: similar to Eukaryotic translation initiation factor3 subunit 6 interacting protein
  misc_feature (1)..(385): NCBI GI NO: 18700307 NR Description: tyrosine-rich heat shock protein [Mus musculus]
  misc_feature (1)..(385): NCBI GI NO: 7705433 NR Description: eukaryotic translation initiation factor 3
  misc_feature (1)..(385): NCBI GI NO: 27503211 NR Description: Similar to eukaryotic translation initiation factor3
  misc_feature (1)..(385): NCBI GI NO: 21553089 NR Description: eukaryotic translation initiation factor 3
  misc_feature (1)..(387): NCBI GI NO: 21358039 NR Description: CG5642-PA [Drosophila melanogaster]
MQLPNQWLWDMVDEFVYQFQSFCQYRAKLKNKTEDELQQLKQFDKAWNVYGVLNYLQALVEKSMIAQILEREKEGLESFTATDGYDYQGGSNVLKVLGYYSMIGLLRIHCLLGDYHTGLKCLAPINLNQQGVYTIVIGSHISTIYHYGFANLMMRRYVDATKEFNKILLYIIKYKQYHQKSPQYDQILKKNEQMYALLAICLSLCPQNKLIDENVSAQLKEKYNDKMTKMQRFDDEAYAAYDELFSYACPKFITPSPPVLDQPLTNYNQDAYRLQLKLFLYEVKQQQLLSGIRSYLKLYSAITITKLAQYMEMDEATLRSILMTYKHKMHAVDSNGKIVSSADFDFYINEDVIHVVESKSTKRHGDYFLRQILKFEETIAELDKVQLD

SEQ ID NO: 15510 - DNA, 1599 bp, Triticum aestivum
  misc_feature (1)..(1599): Ceres Seq. ID no. 13597613
aaatcgaaaacgaaacccaaacccaaatcgcttccgttacgaaattcccccaaatctatcccccgtcggatcgatcgccgccgccgccatgtcgtcgtcggcgccgctcccgctgcagcgctacttctgccaccagtgcgaccgcgccgtcgccatcgccgcgccggcctcccgcgacgacgaggtcttctgcccgctctgcgccggggggttcgtcgaggagctcctcgacgacgaggaccccccaaaccctagcccccaaatccaccccttcttccccctcgccagcttcctcgacctccgcaaccccagcgacctcgccggggtcctcggcccgccctccccctctgcgccccgcgccgcctccgcctccgccaacaaccagttcgacgtcaccgacttcctccacggccacctcggcggcctcctctccggcggcgccaccatccagatcgtcctcgagggttcctccttccccggcggcttcgcctccttcggcgccgggggccccgtccccggcggggtcagcctcggcgactacttcatgggatccggcctcgagcagctcatccagcagctcgccgagaacgaccccagccgctacggcaccccgccagccgccaaggccgccgtcgccgccctgcccgatgtcgccgtctctgctgacatgatggccgccgacgggggcgcccagtgcgccgtctgtatggacgacttccttctcggcgccgccgccaagcagctcccctgcaagcacgtctttcacaaggactgcatcctgccgtggctcaacctccacagctcctgccctgtctgccgccatgagatgcccactgatgaccctgactatgagaaccaccagcgccaggctgctgcccctgctgctgctgcggcagcgcctgcgtcccctggtggcggcccttcgcctagggtcatggagaggaggttcaggatctccctgccgtggcctctcagggccgcttttggcgcgcagcaggcggagagcagcgaccaggatgctgctggctctggtgactacaacgacgatccgaatgcgagcggtcgctcgtatgatgatcttgactgaagcgcctgcaaggaagagggcaacaggggggataaggaggggcaaacggactggctggaagaaggaagggagtctgaatgcgaggaagagaagacaagaagaaggaagacttatgttgttgttgttgatccaaattgaattggaagcttttttggtgatgaagagtggcgccgtccgtctattgatctccgttgcctcctctcccctcccctcccctctttgcctgtcatggttgtagaaagagagagagaaaagtagagatgatattcttttgttgcctggtctggtctggtctggtctggttggtgggttgacttgactgaatatataccttcttgtgggaaggaagaagctccctccttcctaacttgtctgtgttatcatagtacaattgtctgtctgtgtcgattggtcggtcttcctttctctcttgtggggttggaagaaagtaagaaagggaactctagcgatccgatccgaccctcttatatatacataatgtgttatacatg

SEQ ID NO: 15511 - protein, 361 aa, Triticum aestivum
  peptide (1)..(361): Ceres Seq. ID no. 13597614
  misc_feature (232)..(272): Pfam Name: RING finger Pfam Description: Zinc finger, C3HC4 type
  misc_feature (20)..(347): NCBI GI NO: 11994207 NR Description: gene_id:MPN9.20~unknown protein
  misc_feature (20)..(347): NCBI GI NO: 15231003 NR Description: expressed protein [Arabidopsis thaliana]
  misc_feature (83)..(353): NCBI GI NO: 37535546 NR Description: putative zinc finger protein
  misc_feature (171)..(280): NCBI GI NO: 18405411 NR Description: expressed protein [Arabidopsis thaliana]
  misc_feature (40)..(86): NCBI GI NO: 18405411 NR Description: expressed protein [Arabidopsis thaliana]
  misc_feature (174)..(338): NCBI GI NO: 34903272 NR Description: unnamed protein product
  misc_feature (41)..(75): NCBI GI NO: 34903272 NR Description: unnamed protein product
  misc_feature (172)..(356): NCBI GI NO: 15241188 NR Description: expressed protein [Arabidopsis thaliana]
  misc_feature (25)..(279): NCBI GI NO: 14719329 NR Description: putative RING-H2 finger protein [Oryza sativa]
  misc_feature (41)..(349): NCBI GI NO: 18405518 NR Description: RING-H2 finger protein (RHC1a)
NRKRNPNPNRFRYEIPPNLSPVGSIAAAAMSSSAPLPLQRYFCHQCDRAVAIAAPASRDDEVFCPLCAGGFVEELLDDEDPPNPSPQIHPFFPLASFLDLRNPSDLAGVLGPPSPSAPRAASASANNQFDVTDFLHGHLGGLLSGGATIQIVLEGSSFPGGFASFGAGGPVPGGVSLGDYFMGSGLEQLIQQLAENDPSRYGTPPAAKAAVAALPDVAVSADMMAADGGAQCAVCMDDFLLGAAAKQLPCKHVFHKDCILPWLNLHSSCPVCRHEMPTDDPDYENHQRQAAAPAAAAAAPASPGGGPSPRVMERRFRISLPWPLRAAFGAQQAESSDQDAAGSGDYNDDPNASGRSYDDLD

SEQ ID NO: 15512 - protein, 332 aa, Triticum aestivum
  peptide (1)..(332): Ceres Seq. ID no. 13597615
  misc_feature (203)..(243): Pfam Name: RING finger Pfam Description: Zinc finger, C3HC4 type
  misc_feature (1)..(318): NCBI GI NO: 11994207 NR Description: gene_id:MPN9.20~unknown protein
  misc_feature (1)..(318): NCBI GI NO: 15231003 NR Description: expressed protein [Arabidopsis thaliana]
  misc_feature (54)..(324): NCBI GI NO: 37535546 NR Description: putative zinc finger protein
  misc_feature (142)..(251): NCBI GI NO: 18405411 NR Description: expressed protein [Arabidopsis thaliana]
  misc_feature (11)..(57): NCBI GI NO: 18405411 NR Description: expressed protein [Arabidopsis thaliana]
  misc_feature (145)..(309): NCBI GI NO: 34903272 NR Description: unnamed protein product
  misc_feature (12)..(46): NCBI GI NO: 34903272 NR Description: unnamed protein product
  misc_feature (143)..(327): NCBI GI NO: 15241188 NR Description: expressed protein [Arabidopsis thaliana]
  misc_feature (1)..(250): NCBI GI NO: 14719329 NR Description: putative RING-H2 finger protein [Oryza sativa]
  misc_feature (12)..(320): NCBI GI NO: 18405518 NR Description: RING-H2 finger protein (RHC1a)
MSSSAPLPLQRYFCHQCDRAVAIAAPASRDDEVFCPLCAGGFVEELLDDEDPPNPSPQIHPFFPLASFLDLRNPSDLAGVLGPPSPSAPRAASASANNQFDVTDFLHGHLGGLLSGGATIQIVLEGSSFPGGFASFGAGGPVPGGVSLGDYFMGSGLEQLIQQLAENDPSRYGTPPAAKAAVAALPDVAVSADMMAADGGAQCAVCMDDFLLGAAAKQLPCKHVFHKDCILPWLNLHSSCPVCRHEMPTDDPDYENHQRQAAAPAAAAAAPASPGGGPSPRVMERRFRISLPWPLRAAFGAQQAESSDQDAAGSGDYNDDPNASGRSYDDLD

SEQ ID NO: 15513 - protein, 222 aa, Triticum aestivum
  peptide (1)..(222): Ceres Seq. ID no. 13597616
  misc_feature (21)..(222): Pfam Name: Pfam Description:  Extensin-like region
  misc_feature (36)..(222): NCBI GI NO: 11359723 NR Description: proteophosphoglycan, membrane-associated
  misc_feature (11)..(222): NCBI GI NO: 188864 NR Description: mucin
  misc_feature (20)..(222): NCBI GI NO: 188864 NR Description: mucin
  misc_feature (16)..(222): NCBI GI NO: 20138131 NR Description: Vegetative cell wall protein gp1 precursor
  misc_feature (21)..(222): NCBI GI NO: 11359723 NR Description: proteophosphoglycan, membrane-associated
  misc_feature (12)..(222): NCBI GI NO: 13592175 NR Description: ppg3 [Leishmania major]
  misc_feature (11)..(222): NCBI GI NO: 186396 NR Description: mucin
  misc_feature (21)..(222): NCBI GI NO: 13592175 NR Description: ppg3 [Leishmania major]
  misc_feature (12)..(222): NCBI GI NO: 5420387 NR Description: proteophosphoglycan [Leishmania major]
  misc_feature (20)..(222): NCBI GI NO: 186396 NR Description: mucin
IENETQTQIASVTKFPQIYPPSDRSPPPPCRRRRRSRCSATSATSATAPSPSPRRPPATTRSSARSAPGGSSRSSSTTRTPQTLAPKSTPSSPSPASSTSATPATSPGSSARPPPLRPAPPPPPPTTSSTSPTSSTATSAASSPAAPPSRSSSRVPPSPAASPPSAPGAPSPAGSASATTSWDPASSSSSSSSPRTTPAATAPRQPPRPPSPPCPMSPSLLT

SEQ ID NO: 15514 - DNA, 1214 bp, Triticum aestivum
  misc_feature (1)..(1214): Ceres Seq. ID no. 13662799
agctatcatcccgcacccgcacgagctcaaccactctctctctctctctcttctacctctgccccgtcctccatggaggggcgagcgagtgtgtgagttgagtctgacttgcatgtgagccagcctacagcgagcacacggcccatcctagacagagagagagagagagagaggaagtaatcttgcttgcttgcttagttgggttgggttgggttgtgctttgtgtgtgcgtctatggcgctgccggcggagaggcgggcggaggaggccgcgggcgtcggcgggtgccgggcgccggccggccagggcgggctgcccatcgggttccggttccggcccaccgacgaggagctgctgctgcactacctgcgccgcaaggccctctcctgccccctccccgccgacatcatccccgtcgccgacctcgcgcgcctccacccatcggacctgccaggcgaggccgacggcgagcgctacttcttccacctgccggcgacggggtgctggcggaagggcggcggcgcgggcagggcgggcggcagcggcgtgtggagggcctccgggaaggagcggctggtcgtggcgccacgctgcggccggcctatcggcgccaagcggacgctcgtcttctgccgcccaggcggcgcgcgcaccggctgggccatgcacgagtaccgcctgctccccgccggcctcgccgcttacgccacacccaagagcctccacgccgccaaggactgggtggtctgccgcgtgttcaagaaggccacgccagcgcgccacggcacagcggggcggcgtaggggggacgccgacgccgacatgacaccggcgtcaccgtccccggcgtcctcctgcgtgaccgagtcgggcatggaggaggacgatgatgagaccgcctctaacctggcgcggcgagaggattagagcagctgacctgacctcaatcatggtccctgtaattttctaatgagtgcccctttaattcgtcgatctgctaatgtggtactagtccgtagtagcagcagtagtaatcatcagccccaacttatcaggagaaacaaaccgagctcaagcaatcagcaaaccgagctcaagcaatcaaacacctcaccatgtttgacgagtgagctgagactgagagctcactgtgaatcaaagagttcatgttccaacgttaaattggagttcttttgcacaaaaaaaaaaaaaaa

SEQ ID NO: 15515 - protein, 230 aa, Triticum aestivum
  peptide (1)..(230): Ceres Seq. ID no. 13662800
  misc_feature (74)..(150): Pfam Name: NAM Pfam Description: No apical meristem
  misc_feature (74)..(223): NCBI GI NO: 34907026 NR Description: contains EST C27594(C52325)~unknown protein
  misc_feature (9)..(74): NCBI GI NO: 34907026 NR Description: contains EST C27594(C52325)~unknown protein
  misc_feature (27)..(196): NCBI GI NO: 15240042 NR Description: No apical meristem (NAM) protein family
  misc_feature (10)..(183): NCBI GI NO: 15232606 NR Description: No apical meristem (NAM) protein family
  misc_feature (10)..(183): NCBI GI NO: 15219110 NR Description: No apical meristem (NAM) protein family
  misc_feature (10)..(183): NCBI GI NO: 20466640 NR Description: NAM-like protein [Arabidopsis thaliana]
  misc_feature (10)..(183): NCBI GI NO: 21554226 NR Description: NAM-like protein [Arabidopsis thaliana]
  misc_feature (27)..(207): NCBI GI NO: 40786563 NR Description: putative NAC-domain protein
  misc_feature (27)..(230): NCBI GI NO: 15226119 NR Description: No apical meristem (NAM) protein family
  misc_feature (27)..(177): NCBI GI NO: 7489024 NR Description: hypothetical protein SENU5
MALPAERRAEEAAGVGGCRAPAGQGGLPIGFRFRPTDEELLLHYLRRKALSCPLPADIIPVADLARLHPSDLPGEADGERYFFHLPATGCWRKGGGAGRAGGSGVWRASGKERLVVAPRCGRPIGAKRTLVFCRPGGARTGWAMHEYRLLPAGLAAYATPKSLHAAKDWVVCRVFKKATPARHGTAGRRRGDADADMTPASPSPASSCVTESGMEEDDDETASNLARRED

SEQ ID NO: 15516 - DNA, 1180 bp, Triticum aestivum
  misc_feature (1)..(1180): Ceres Seq. ID no. 13584593
aaacaatccagtgaaccgcccatgctcaccctcccgtgcttcaccactcctcctcaacctccaccgacccggccggtccggtccggtccggtcccggctccggaagtctccagaacccggacaaccaccgccacgcgggcccgcatggcagggtcacgtccctcacgcgccgctacctccggcgagacctgctcgcaccaccccctcataaatactggtgcgcccaagcctcgccgcagatcgaccgcgctcgccctctccactttcctgctgctggtgctgttaaccggactccccgacgccgccgtcgccgccaacatgaccgaggtctgcgtcaaggccgccgtcggccaccccgacacgctcggcgactgtcccttctcccagagggtgctgctcacgctggaggagaagaaggtgccctaccagatgaagctcatcgacgtcagcaacaagcccgactggttcctgaagatcaatccagagggcaaggtgcctgtgtataacggtggtgatggcaaatggattgctgattctgatgtgatcactcaagtcattgaggagaagtacccaactccatcacttgtgacccctgctgaatatgcatcagtgggatcaaagatcttctccacctttgtcacgttcttgaagagcaaggatgccagcgatggttcggagaaggcacttgttgatgagctgcaggcgctcgaagagcacctgaaggcccatggaccctacatcaatggggcgaacatctccgctgtcgatctcagcctggctccgaagctctaccatctccaggtcgccctggagcacttcaagggctggaaggtccctgaaaccctgaccagcgtccatgcctacaccgaggctctcttcagccgcgagtcgttcgtcaagaccaaggcgaccaaggagaacctgatcgccgggtgggcgccgaaagtgaacccgtaagccctcccgccgctcggagacccggcccacccccgtcgtgtgagagtagcgacgggcctcatctgtctaggttggaataatgcgagcgagccttgatgtgctctggttgtcgcaagacgtgcacttgctgcctgggctgtgccctgcctggcttgtgtgtgtgggtgtgggtgatatgtgtgtggtctgtcctctttcgtgtgaatgaataatggagctgcgt

SEQ ID NO: 15517 - protein, 318 aa, Triticum aestivum
  peptide (1)..(318): Ceres Seq. ID no. 13584594
  misc_feature (225)..(296): Pfam Name: Pfam Description:  Glutathione S-transferase, C-terminal domain
  misc_feature (107)..(318): NCBI GI NO: 28192421 NR Description: dehydroascorbate reductase [Triticum aestivum]
  misc_feature (109)..(317): NCBI GI NO: 28192425 NR Description: dehydroascorbate reductase [Oryza sativa]
  misc_feature (109)..(317): NCBI GI NO: 6939839 NR Description: GSH-dependent dehydroascorbate reductase 1
  misc_feature (109)..(318): NCBI GI NO: 28192427 NR Description: dehydroascorbate reductase [Nicotiana tabacum]
  misc_feature (109)..(317): NCBI GI NO: 21593056 NR Description: GSH-dependent dehydroascorbate reductase 1
  misc_feature (109)..(317): NCBI GI NO: 15222163 NR Description: dehydroascorbate reductase, putative
  misc_feature (102)..(316): NCBI GI NO: 10952514 NR Description: dehydroascorbate reductase [Arabidopsis thaliana]
  misc_feature (102)..(316): NCBI GI NO: 18418055 NR Description: dehydroascorbate reductase, putative
  misc_feature (109)..(318): NCBI GI NO: 15223576 NR Description: dehydroascorbate reductase, putative
  misc_feature (102)..(316): NCBI GI NO: 22653415 NR Description: dehydroascorbate reductase [Brassica juncea]
KQSSEPPMLTLPCFTTPPQPPPTRPVRSGPVPAPEVSRTRTTTATRARMAGSRPSRAATSGETCSHHPLINTGAPKPRRRSTALALSTFLLLVLLTGLPDAAVAANMTEVCVKAAVGHPDTLGDCPFSQRVLLTLEEKKVPYQMKLIDVSNKPDWFLKINPEGKVPVYNGGDGKWIADSDVITQVIEEKYPTPSLVTPAEYASVGSKIFSTFVTFLKSKDASDGSEKALVDELQALEEHLKAHGPYINGANISAVDLSLAPKLYHLQVALEHFKGWKVPETLTSVHAYTEALFSRESFVKTKATKENLIAGWAPKVNP

SEQ ID NO: 15518 - protein, 311 aa, Triticum aestivum
  peptide (1)..(311): Ceres Seq. ID no. 13584595
  misc_feature (218)..(289): Pfam Name: Pfam Description:  Glutathione S-transferase, C-terminal domain
  misc_feature (100)..(311): NCBI GI NO: 28192421 NR Description: dehydroascorbate reductase [Triticum aestivum]
  misc_feature (102)..(310): NCBI GI NO: 28192425 NR Description: dehydroascorbate reductase [Oryza sativa]
  misc_feature (102)..(310): NCBI GI NO: 6939839 NR Description: GSH-dependent dehydroascorbate reductase 1
  misc_feature (102)..(311): NCBI GI NO: 28192427 NR Description: dehydroascorbate reductase [Nicotiana tabacum]
  misc_feature (102)..(310): NCBI GI NO: 21593056 NR Description: GSH-dependent dehydroascorbate reductase 1
  misc_feature (102)..(310): NCBI GI NO: 15222163 NR Description: dehydroascorbate reductase, putative
  misc_feature (95)..(309): NCBI GI NO: 10952514 NR Description: dehydroascorbate reductase [Arabidopsis thaliana]
  misc_feature (95)..(309): NCBI GI NO: 18418055 NR Description: dehydroascorbate reductase, putative
  misc_feature (102)..(311): NCBI GI NO: 15223576 NR Description: dehydroascorbate reductase, putative
  misc_feature (95)..(309): NCBI GI NO: 22653415 NR Description: dehydroascorbate reductase [Brassica juncea]
MLTLPCFTTPPQPPPTRPVRSGPVPAPEVSRTRTTTATRARMAGSRPSRAATSGETCSHHPLINTGAPKPRRRSTALALSTFLLLVLLTGLPDAAVAANMTEVCVKAAVGHPDTLGDCPFSQRVLLTLEEKKVPYQMKLIDVSNKPDWFLKINPEGKVPVYNGGDGKWIADSDVITQVIEEKYPTPSLVTPAEYASVGSKIFSTFVTFLKSKDASDGSEKALVDELQALEEHLKAHGPYINGANISAVDLSLAPKLYHLQVALEHFKGWKVPETLTSVHAYTEALFSRESFVKTKATKENLIAGWAPKVNP

SEQ ID NO: 15519 - protein, 270 aa, Triticum aestivum
  peptide (1)..(270): Ceres Seq. ID no. 13584596
  misc_feature (177)..(248): Pfam Name: Pfam Description:  Glutathione S-transferase, C-terminal domain
  misc_feature (59)..(270): NCBI GI NO: 28192421 NR Description: dehydroascorbate reductase [Triticum aestivum]
  misc_feature (61)..(269): NCBI GI NO: 28192425 NR Description: dehydroascorbate reductase [Oryza sativa]
  misc_feature (61)..(269): NCBI GI NO: 6939839 NR Description: GSH-dependent dehydroascorbate reductase 1
  misc_feature (61)..(270): NCBI GI NO: 28192427 NR Description: dehydroascorbate reductase [Nicotiana tabacum]
  misc_feature (61)..(269): NCBI GI NO: 21593056 NR Description: GSH-dependent dehydroascorbate reductase 1
  misc_feature (61)..(269): NCBI GI NO: 15222163 NR Description: dehydroascorbate reductase, putative
  misc_feature (54)..(268): NCBI GI NO: 10952514 NR Description: dehydroascorbate reductase [Arabidopsis thaliana]
  misc_feature (54)..(268): NCBI GI NO: 18418055 NR Description: dehydroascorbate reductase, putative
  misc_feature (61)..(270): NCBI GI NO: 15223576 NR Description: dehydroascorbate reductase, putative
  misc_feature (54)..(268): NCBI GI NO: 22653415 NR Description: dehydroascorbate reductase [Brassica juncea]
MAGSRPSRAATSGETCSHHPLINTGAPKPRRRSTALALSTFLLLVLLTGLPDAAVAANMTEVCVKAAVGHPDTLGDCPFSQRVLLTLEEKKVPYQMKLIDVSNKPDWFLKINPEGKVPVYNGGDGKWIADSDVITQVIEEKYPTPSLVTPAEYASVGSKIFSTFVTFLKSKDASDGSEKALVDELQALEEHLKAHGPYINGANISAVDLSLAPKLYHLQVALEHFKGWKVPETLTSVHAYTEALFSRESFVKTKATKENLIAGWAPKVNP

SEQ ID NO: 15520 - DNA, 1444 bp, Triticum aestivum
  misc_feature (1)..(1444): Ceres Seq. ID no. 13597581
acgcaacggtccaatcgacgagtttgaaacctaccctctccccaacggtcggcttcggagcggcacacatggcggtggcggcggcggcgggagacctggcggtgcttgacgcggagactctggcgctgctggggggagggcccgatatggcgccggtggccgtgtgcggcgagtgggagaccttcaaggagaacgtgcggccgctgaaacgcgggcggaacgtcggcctcctcaaccaagccctcaaggcgcacaccgaccccgcccagcgtgccgccctcctcgccgaacgcaggaggatgatcgaagcaatagaagagtaccaaggggaagatccgctccagccatgggtagactgcatcaaatgggttcaggagtcgttcccggccggcggggagttctcagggctggtcgtgatctacgagcagtgtgtgcgtgcattttggcacgatgagcggtacaaggatgatctccggtacctcaaagtctggttagaatatgctgggaactgttcggacgctgaggtgatattcaggttcctggagtccaaccggattggtgagggccatgctgttttctacattcgctatgcattgctaatggagtcgaagaacaaggttaagaaagttgacgagatctttaatcttggaatagctaggamagcaaagcctgtggagaagttggaaactacatacagggcatttcttgggagatcaaccagaaagaaggaacacgaggatgataccgcaagtgatgatccgcccgtacgcaaattcggtagtgacttgaaccgtggtgaaactagaggtcagcatgcagagaattcccacatgttggcaaaacctagggtaaagctgcaaagaatcgatgttaatacaccgatttcaatttacaaagagaacccattgccaagtcagggccttgagagagctaggagcaaagacagggcgtggaacacccttggaacacaagcagatagaaacaaagaaaataacatgatgcctgccagatggacctcgcacaagattccaccaaaggtagcagcacgacaagcagttccgccagctcgtgtcagctccattgaggtctttgtagatgaagaatgtgccgaggaaccagccccgcctcgagtgccaaagagtccaaaaccatctgttctgaagcttaggcaagcaacaagcaaaaaccttaagaaggaatcagaattgcttaaggagaatccgctgcgcaacttcccgctgagcagccttagataattaacagtaatattgttgacgacttgtttgaatctgttcctttatgccaaataagctttagactctaaagcttatagatgcaccaagcattgtaggctcgaatcgattgttgtggtccgtgtacactagtttgattgattaatcctcatcgaggtgaggattgaataaaatcttcagttttgtcacgc

SEQ ID NO: 15521 - protein, 417 aa, Triticum aestivum
  peptide (1)..(417): Ceres Seq. ID no. 15222140
  misc_feature (57)..(415): NCBI GI NO: 18403316 NR Description: expressed protein [Arabidopsis thaliana]
  misc_feature (57)..(415): NCBI GI NO: 21593781 NR Description: unknown [Arabidopsis thaliana]
  misc_feature (20)..(219): NCBI GI NO: 5441887 NR Description: Similar to Arabidopsis thaliana BAC genomicsequence
  misc_feature (167)..(250): NCBI GI NO: 25370767 NR Description: hypothetical protein At2g33560
  misc_feature (57)..(120): NCBI GI NO: 25370767 NR Description: hypothetical protein At2g33560
  misc_feature (59)..(237): NCBI GI NO: 26396196 NR Description: Mitotic spindle checkpoint component mad3
  misc_feature (317)..(371): NCBI GI NO: 26396196 NR Description: Mitotic spindle checkpoint component mad3
  misc_feature (57)..(409): NCBI GI NO: 29725501 NR Description: spindle checkpoint protein BubR1 [Gallus gallus]
  misc_feature (57)..(390): NCBI GI NO: 22128593 NR Description: spindle checkpoint protein BubR1 [Xenopus laevis]
  misc_feature (251)..(370): NCBI GI NO: 25370767 NR Description: hypothetical protein At2g33560
  misc_feature (220)..(220): Xaa is any aa, unknown or other
ATVQSTSLKPTLSPTVGFGAAHMAVAAAAGDLAVLDAETLALLGGGPDMAPVAVCGEWETFKENVRPLKRGRNVGLLNQALKAHTDPAQRAALLAERRRMIEAIEEYQGEDPLQPWVDCIKWVQESFPAGGEFSGLVVIYEQCVRAFWHDERYKDDLRYLKVWLEYAGNCSDAEVIFRFLESNRIGEGHAVFYIRYALLMESKNKVKKVDEIFNLGIARXAKPVEKLETTYRAFLGRSTRKKEHEDDTASDDPPVRKFGSDLNRGETRGQHAENSHMLAKPRVKLQRIDVNTPISIYKENPLPSQGLERARSKDRAWNTLGTQADRNKENNMMPARWTSHKIPPKVAARQAVPPARVSSIEVFVDEECAEEPAPPRVPKSPKPSVLKLRQATSKNLKKESELLKENPLRNFPLSSLR

SEQ ID NO: 15522 - protein, 395 aa, Triticum aestivum
  peptide (1)..(395): Ceres Seq. ID no. 15222141
  misc_feature (35)..(393): NCBI GI NO: 18403316 NR Description: expressed protein [Arabidopsis thaliana]
  misc_feature (35)..(393): NCBI GI NO: 21593781 NR Description: unknown [Arabidopsis thaliana]
  misc_feature (1)..(197): NCBI GI NO: 5441887 NR Description: Similar to Arabidopsis thaliana BAC genomicsequence
  misc_feature (145)..(228): NCBI GI NO: 25370767 NR Description: hypothetical protein At2g33560
  misc_feature (35)..(98): NCBI GI NO: 25370767 NR Description: hypothetical protein At2g33560
  misc_feature (37)..(215): NCBI GI NO: 26396196 NR Description: Mitotic spindle checkpoint component mad3
  misc_feature (295)..(349): NCBI GI NO: 26396196 NR Description: Mitotic spindle checkpoint component mad3
  misc_feature (35)..(387): NCBI GI NO: 29725501 NR Description: spindle checkpoint protein BubR1 [Gallus gallus]
  misc_feature (35)..(368): NCBI GI NO: 22128593 NR Description: spindle checkpoint protein BubR1 [Xenopus laevis]
  misc_feature (229)..(348): NCBI GI NO: 25370767 NR Description: hypothetical protein At2g33560
  misc_feature (198)..(198): Xaa is any aa, unknown or other
MAVAAAAGDLAVLDAETLALLGGGPDMAPVAVCGEWETFKENVRPLKRGRNVGLLNQALKAHTDPAQRAALLAERRRMIEAIEEYQGEDPLQPWVDCIKWVQESFPAGGEFSGLVVIYEQCVRAFWHDERYKDDLRYLKVWLEYAGNCSDAEVIFRFLESNRIGEGHAVFYIRYALLMESKNKVKKVDEIFNLGIARXAKPVEKLETTYRAFLGRSTRKKEHEDDTASDDPPVRKFGSDLNRGETRGQHAENSHMLAKPRVKLQRIDVNTPISIYKENPLPSQGLERARSKDRAWNTLGTQADRNKENNMMPARWTSHKIPPKVAARQAVPPARVSSIEVFVDEECAEEPAPPRVPKSPKPSVLKLRQATSKNLKKESELLKENPLRNFPLSSLR

SEQ ID NO: 15523 - protein, 369 aa, Triticum aestivum
  peptide (1)..(369): Ceres Seq. ID no. 15222142
  misc_feature (9)..(367): NCBI GI NO: 18403316 NR Description: expressed protein [Arabidopsis thaliana]
  misc_feature (9)..(367): NCBI GI NO: 21593781 NR Description: unknown [Arabidopsis thaliana]
  misc_feature (1)..(171): NCBI GI NO: 5441887 NR Description: Similar to Arabidopsis thaliana BAC genomicsequence
  misc_feature (119)..(202): NCBI GI NO: 25370767 NR Description: hypothetical protein At2g33560
  misc_feature (9)..(72): NCBI GI NO: 25370767 NR Description: hypothetical protein At2g33560
  misc_feature (11)..(189): NCBI GI NO: 26396196 NR Description: Mitotic spindle checkpoint component mad3
  misc_feature (269)..(323): NCBI GI NO: 26396196 NR Description: Mitotic spindle checkpoint component mad3
  misc_feature (9)..(361): NCBI GI NO: 29725501 NR Description: spindle checkpoint protein BubR1 [Gallus gallus]
  misc_feature (9)..(342): NCBI GI NO: 22128593 NR Description: spindle checkpoint protein BubR1 [Xenopus laevis]
  misc_feature (203)..(322): NCBI GI NO: 25370767 NR Description: hypothetical protein At2g33560
  misc_feature (172)..(172): Xaa is any aa, unknown or other
MAPVAVCGEWETFKENVRPLKRGRNVGLLNQALKAHTDPAQRAALLAERRRMIEAIEEYQGEDPLQPWVDCIKWVQESFPAGGEFSGLVVIYEQCVRAFWHDERYKDDLRYLKVWLEYAGNCSDAEVIFRFLESNRIGEGHAVFYIRYALLMESKNKVKKVDEIFNLGIARXAKPVEKLETTYRAFLGRSTRKKEHEDDTASDDPPVRKFGSDLNRGETRGQHAENSHMLAKPRVKLQRIDVNTPISIYKENPLPSQGLERARSKDRAWNTLGTQADRNKENNMMPARWTSHKIPPKVAARQAVPPARVSSIEVFVDEECAEEPAPPRVPKSPKPSVLKLRQATSKNLKKESELLKENPLRNFPLSSLR

SEQ ID NO: 15524 - DNA, 1477 bp, Triticum aestivum
  misc_feature (1)..(1477): Ceres Seq. ID no. 13597582
atggatggccaacaagccaaacgccacctaaaggtatccggaccggatatccaggacagataggatgcctcggagatgcccttgctccccgatcccaagtcgtcaagttcgctgcacctcccgtccccgtggtgccctcgccgtgacctcaccggcggccgctatgacctcgccggcttccacctcttcctggttctccggaatcgtgcgcacagcatccggcaatcccccttcttcagccatgcctcccgccggcggcgtcacctccgcccccgtctcccttcccgacacccctgctgccgtgagcggcaagggtggcgtcgttgcccctgtagccaccacaggcgtaggtgctcgcaggaagcagctccagggcacgctgttcaagtacgggcccaagtccgctcaggttgcgtttaggactggtgattttacccgtcaggtgattttcattggtggtttggcagatgggctcttagcaactgattacttggaaccattgtcacttgcgttggaggttgagaaatggtcactggttcaaccattactttcttcatcatatactggatacggaatttccaccttggagcaagatgcattggaacttgatcagctcatcggttacttgataaataaagataattctgaaggagtaatactgctcggtcacagcactggttgccaggatattatacattacatgcggacaaactttgcatgttccaaagcagtttctggggtaattttgcaggccccagtaagtgacagggagtatagggcaactcttccagaaacaggagaaatgatagatctagcagcgaaaatgattagtgcgggccgtggaatggatttgatgcccagagaagcaaattcagatgctccaattactgcctacaggttccactccctttgtgcatatatgggtgatgatgatatgttcagttctgatcttagtgaagatcagctgaagcagagacttggtcatatgtcaaccacacagtgcctggttgttttttcaatggcggatgagtatgtccctgaatacgtcgataagaaggcacttgtagacagactctctcgtgcacttggagattcagagaaagttgaaataaaatggggaaaccatgctctttccaacagggtgcaagaggctgtcgaggttattgtagattttgttaagagggagggacccaaaggatgggacgatccatggagctagatacaatagtcatatgatgcaatctttacccccctttacctgttagaatctttcgtttttgtagttttcttagtcaattttctatgtactaatgttctgatctatttaattttattgtgtaaacccttgtctagtacttgattctcgatctcgtgttcatctgtggacattcagatatgctgtttgaaaattgtaagttgtaatgctactatctctggaatgttcctctttgtctattcagagtgtttttttaaggct

SEQ ID NO: 15525 - protein, 384 aa, Triticum aestivum
  peptide (1)..(384): Ceres Seq. ID no. 15222143
  misc_feature (39)..(384): NCBI GI NO: 34393295 NR Description: unknown protein
  misc_feature (28)..(384): NCBI GI NO: 15239639 NR Description: expressed protein [Arabidopsis thaliana]
  misc_feature (39)..(291): NCBI GI NO: 34900046 NR Description: contains EST C72879
  misc_feature (286)..(384): NCBI GI NO: 34900044 NR Description: hypothetical protein~predicted by GeneMark
  misc_feature (104)..(213): NCBI GI NO: 40741836 NR Description: hypothetical protein AN4948.2
  misc_feature (273)..(351): NCBI GI NO: 40741836 NR Description: hypothetical protein AN4948.2
  misc_feature (120)..(308): NCBI GI NO: 19114904 NR Description: hypothetical protein; sequence orphan
  misc_feature (99)..(374): NCBI GI NO: 19173345 NR Description: hypothetical protein [Encephalitozoon cuniculi]
  misc_feature (99)..(213): NCBI GI NO: 40739421 NR Description: hypothetical protein AN6793.2
  misc_feature (127)..(213): NCBI GI NO: 40739433 NR Description: hypothetical protein AN6239.2
MPRRCPCSPIPSRQVRCTSRPRGALAVTSPAAAMTSPASTSSWFSGIVRTASGNPPSSAMPPAGGVTSAPVSLPDTPAAVSGKGGVVAPVATTGVGARRKQLQGTLFKYGPKSAQVAFRTGDFTRQVIFIGGLADGLLATDYLEPLSLALEVEKWSLVQPLLSSSYTGYGISTLEQDALELDQLIGYLINKDNSEGVILLGHSTGCQDIIHYMRTNFACSKAVSGVILQAPVSDREYRATLPETGEMIDLAAKMISAGRGMDLMPREANSDAPITAYRFHSLCAYMGDDDMFSSDLSEDQLKQRLGHMSTTQCLVVFSMADEYVPEYVDKKALVDRLSRALGDSEKVEIKWGNHALSNRVQEAVEVIVDFVKREGPKGWDDPWS

SEQ ID NO: 15526 - protein, 351 aa, Triticum aestivum
  peptide (1)..(351): Ceres Seq. ID no. 15222144
  misc_feature (6)..(351): NCBI GI NO: 34393295 NR Description: unknown protein
  misc_feature (1)..(351): NCBI GI NO: 15239639 NR Description: expressed protein [Arabidopsis thaliana]
  misc_feature (6)..(258): NCBI GI NO: 34900046 NR Description: contains EST C72879
  misc_feature (253)..(351): NCBI GI NO: 34900044 NR Description: hypothetical protein~predicted by GeneMark
  misc_feature (71)..(180): NCBI GI NO: 40741836 NR Description: hypothetical protein AN4948.2
  misc_feature (240)..(318): NCBI GI NO: 40741836 NR Description: hypothetical protein AN4948.2
  misc_feature (87)..(275): NCBI GI NO: 19114904 NR Description: hypothetical protein; sequence orphan
  misc_feature (66)..(341): NCBI GI NO: 19173345 NR Description: hypothetical protein [Encephalitozoon cuniculi]
  misc_feature (66)..(180): NCBI GI NO: 40739421 NR Description: hypothetical protein AN6793.2
  misc_feature (94)..(180): NCBI GI NO: 40739433 NR Description: hypothetical protein AN6239.2
MTSPASTSSWFSGIVRTASGNPPSSAMPPAGGVTSAPVSLPDTPAAVSGKGGVVAPVATTGVGARRKQLQGTLFKYGPKSAQVAFRTGDFTRQVIFIGGLADGLLATDYLEPLSLALEVEKWSLVQPLLSSSYTGYGISTLEQDALELDQLIGYLINKDNSEGVILLGHSTGCQDIIHYMRTNFACSKAVSGVILQAPVSDREYRATLPETGEMIDLAAKMISAGRGMDLMPREANSDAPITAYRFHSLCAYMGDDDMFSSDLSEDQLKQRLGHMSTTQCLVVFSMADEYVPEYVDKKALVDRLSRALGDSEKVEIKWGNHALSNRVQEAVEVIVDFVKREGPKGWDDPWS

SEQ ID NO: 15527 - protein, 325 aa, Triticum aestivum
  peptide (1)..(325): Ceres Seq. ID no. 15222145
  misc_feature (1)..(325): NCBI GI NO: 34393295 NR Description: unknown protein
  misc_feature (1)..(325): NCBI GI NO: 15239639 NR Description: expressed protein [Arabidopsis thaliana]
  misc_feature (1)..(232): NCBI GI NO: 34900046 NR Description: contains EST C72879
  misc_feature (227)..(325): NCBI GI NO: 34900044 NR Description: hypothetical protein~predicted by GeneMark
  misc_feature (45)..(154): NCBI GI NO: 40741836 NR Description: hypothetical protein AN4948.2
  misc_feature (214)..(292): NCBI GI NO: 40741836 NR Description: hypothetical protein AN4948.2
  misc_feature (61)..(249): NCBI GI NO: 19114904 NR Description: hypothetical protein; sequence orphan
  misc_feature (40)..(315): NCBI GI NO: 19173345 NR Description: hypothetical protein [Encephalitozoon cuniculi]
  misc_feature (40)..(154): NCBI GI NO: 40739421 NR Description: hypothetical protein AN6793.2
  misc_feature (68)..(154): NCBI GI NO: 40739433 NR Description: hypothetical protein AN6239.2
MPPAGGVTSAPVSLPDTPAAVSGKGGVVAPVATTGVGARRKQLQGTLFKYGPKSAQVAFRTGDFTRQVIFIGGLADGLLATDYLEPLSLALEVEKWSLVQPLLSSSYTGYGISTLEQDALELDQLIGYLINKDNSEGVILLGHSTGCQDIIHYMRTNFACSKAVSGVILQAPVSDREYRATLPETGEMIDLAAKMISAGRGMDLMPREANSDAPITAYRFHSLCAYMGDDDMFSSDLSEDQLKQRLGHMSTTQCLVVFSMADEYVPEYVDKKALVDRLSRALGDSEKVEIKWGNHALSNRVQEAVEVIVDFVKREGPKGWDDPWS

SEQ ID NO: 15528 - DNA, 1410 bp, Triticum aestivum
  misc_feature (1)..(1410): Ceres Seq. ID no. 12617729
atccataacccggctgcccctcgcccgtctccgccgcaccccccaaaaccctagctcccctccccaccccgccccccaccgccgccgccgcccgcgaagatgccgccgaacctcgagtgccggatgtacgagccgcggttcccggaggtggacgcggcggtgatgatccaggtgaagcacatcgccgacatgggcgcctacgtctcgctcctcgagtacaacaacatcgagggcatgatcctcttctccgagctctcccgccgccgcatccgctccatctcctccctcatcaaggtcggccgccaggagccctccatggtgctccgcgtcgaccgcgacaagggctacatcgacctctccaagcgccgggtctcggaggaggaggccgccacctgcgaggaccgctacaacaagtccaagctcgtccactccatcatgcgccacgccgccgacaccctcggcgtcgacctcgagcccctctaccagcgcatcggctggccgctctaccgcaggtacggccacgcctttgaggccttcaagctcatcgtcaccgaccccgacggggtgctcgacgtcctcacctacgaggagaccgtcgtcggacccgatggcgaggaggtgactaaagttgtgccggcggtcacccctgaggttaaggatgccctggtcaagaacataaggaggagaatgacaccacagcctcttaagattcgtgctgatgttgagatgaaatgcttccagtttgacggtgttctccacattaaggaagccatgaggaaagctgaagctgctggaaacgctgattgccctgtgaagattaagctagttgctcctccgctttatgttctgaccacacagacacttgacaaagaccaggggatagcagttctgacaaatgcaaccaaaatttgtgccgaggcaattgaaaagcacaaggggaaattggtggtgaaggaagcagctagagctgtgagcgagagagacgacaagctgtttgcggacacgattgagaagctcaagctagcaggtgaggaggtcgacggcgacgacgatagcgaggaggaggactctggcatgggagacgtagacttcacaaaggctggcgctggcgcggactgagcgggtctcctcccaggtgggatgagattgcttgtacagcgccagcaatgaaggggaagaatgtttggctcctcctgtttgtttgaggaggcacgttggatggatggacgagtgtttactctgttattagatattgatgatcagttgtaggctacccgtagtcttacagattgatttgcttttcgctgagcactgattctgaatactgttaattgcgcttttgctacctgttttcatcagcatttatacatggattttgcttatcgttgctcactaagtggaatttggtgc

SEQ ID NO: 15529 - protein, 339 aa, Triticum aestivum
  peptide (1)..(339): Ceres Seq. ID no. 12617730
  misc_feature (14)..(89): Pfam Name: Pfam Description:  S1 RNA binding domain
  misc_feature (3)..(338): NCBI GI NO: 34898218 NR Description: putative eukaryotic translation initiation factor 2 subunit 1
  misc_feature (1)..(337): NCBI GI NO: 18405334 NR Description: putative eukaryotic translation initiation factor 2alpha subunit
  misc_feature (1)..(337): NCBI GI NO: 21537411 NR Description: putative eukaryotic translation initiation factor 2alpha subunit
  misc_feature (1)..(337): NCBI GI NO: 15239135 NR Description: eukaryotic translation initiation factor 2 alpha subunit-like protein
  misc_feature (1)..(337): NCBI GI NO: 13549160 NR Description: protein synthesis initiation factor eIF2 alpha
  misc_feature (1)..(264): NCBI GI NO: 4588003 NR Description: hypothetical EIF-2-Alpha [Arabidopsis thaliana]
  misc_feature (7)..(166): NCBI GI NO: 40744551 NR Description: hypothetical protein AN3156.2
  misc_feature (185)..(326): NCBI GI NO: 40744551 NR Description: hypothetical protein AN3156.2
  misc_feature (7)..(184): NCBI GI NO: 19114993 NR Description: eukaryotic translation initiation factor 2 alpha subunit
  misc_feature (179)..(324): NCBI GI NO: 19114993 NR Description: eukaryotic translation initiation factor 2 alpha subunit
MPPNLECRMYEPRFPEVDAAVMIQVKHIADMGAYVSLLEYNNIEGMILFSELSRRRIRSISSLIKVGRQEPSMVLRVDRDKGYIDLSKRRVSEEEAATCEDRYNKSKLVHSIMRHAADTLGVDLEPLYQRIGWPLYRRYGHAFEAFKLIVTDPDGVLDVLTYEETVVGPDGEEVTKVVPAVTPEVKDALVKNIRRRMTPQPLKIRADVEMKCFQFDGVLHIKEAMRKAEAAGNADCPVKIKLVAPPLYVLTTQTLDKDQGIAVLTNATKICAEAIEKHKGKLVVKEAARAVSERDDKLFADTIEKLKLAGEEVDGDDDSEEEDSGMGDVDFTKAGAGAD

SEQ ID NO: 15530 - protein, 331 aa, Triticum aestivum
  peptide (1)..(331): Ceres Seq. ID no. 12617731
  misc_feature (6)..(81): Pfam Name: Pfam Description:  S1 RNA binding domain
  misc_feature (1)..(330): NCBI GI NO: 34898218 NR Description: putative eukaryotic translation initiation factor 2 subunit 1
  misc_feature (1)..(329): NCBI GI NO: 18405334 NR Description: putative eukaryotic translation initiation factor 2alpha subunit
  misc_feature (1)..(329): NCBI GI NO: 21537411 NR Description: putative eukaryotic translation initiation factor 2alpha subunit
  misc_feature (1)..(329): NCBI GI NO: 15239135 NR Description: eukaryotic translation initiation factor 2 alpha subunit-like protein
  misc_feature (1)..(329): NCBI GI NO: 13549160 NR Description: protein synthesis initiation factor eIF2 alpha
  misc_feature (1)..(256): NCBI GI NO: 4588003 NR Description: hypothetical EIF-2-Alpha [Arabidopsis thaliana]
  misc_feature (1)..(158): NCBI GI NO: 40744551 NR Description: hypothetical protein AN3156.2
  misc_feature (177)..(318): NCBI GI NO: 40744551 NR Description: hypothetical protein AN3156.2
  misc_feature (1)..(176): NCBI GI NO: 19114993 NR Description: eukaryotic translation initiation factor 2 alpha subunit
  misc_feature (171)..(316): NCBI GI NO: 19114993 NR Description: eukaryotic translation initiation factor 2 alpha subunit
MYEPRFPEVDAAVMIQVKHIADMGAYVSLLEYNNIEGMILFSELSRRRIRSISSLIKVGRQEPSMVLRVDRDKGYIDLSKRRVSEEEAATCEDRYNKSKLVHSIMRHAADTLGVDLEPLYQRIGWPLYRRYGHAFEAFKLIVTDPDGVLDVLTYEETVVGPDGEEVTKVVPAVTPEVKDALVKNIRRRMTPQPLKIRADVEMKCFQFDGVLHIKEAMRKAEAAGNADCPVKIKLVAPPLYVLTTQTLDKDQGIAVLTNATKICAEAIEKHKGKLVVKEAARAVSERDDKLFADTIEKLKLAGEEVDGDDDSEEEDSGMGDVDFTKAGAGAD

SEQ ID NO: 15531 - protein, 318 aa, Triticum aestivum
  peptide (1)..(318): Ceres Seq. ID no. 12617732
  misc_feature (1)..(68): Pfam Name: Pfam Description:  S1 RNA binding domain
  misc_feature (1)..(317): NCBI GI NO: 34898218 NR Description: putative eukaryotic translation initiation factor 2 subunit 1
  misc_feature (1)..(316): NCBI GI NO: 18405334 NR Description: putative eukaryotic translation initiation factor 2alpha subunit
  misc_feature (1)..(316): NCBI GI NO: 21537411 NR Description: putative eukaryotic translation initiation factor 2alpha subunit
  misc_feature (1)..(316): NCBI GI NO: 15239135 NR Description: eukaryotic translation initiation factor 2 alpha subunit-like protein
  misc_feature (1)..(316): NCBI GI NO: 13549160 NR Description: protein synthesis initiation factor eIF2 alpha
  misc_feature (1)..(243): NCBI GI NO: 4588003 NR Description: hypothetical EIF-2-Alpha [Arabidopsis thaliana]
  misc_feature (1)..(145): NCBI GI NO: 40744551 NR Description: hypothetical protein AN3156.2
  misc_feature (164)..(305): NCBI GI NO: 40744551 NR Description: hypothetical protein AN3156.2
  misc_feature (1)..(163): NCBI GI NO: 19114993 NR Description: eukaryotic translation initiation factor 2 alpha subunit
  misc_feature (158)..(303): NCBI GI NO: 19114993 NR Description: eukaryotic translation initiation factor 2 alpha subunit
MIQVKHIADMGAYVSLLEYNNIEGMILFSELSRRRIRSISSLIKVGRQEPSMVLRVDRDKGYIDLSKRRVSEEEAATCEDRYNKSKLVHSIMRHAADTLGVDLEPLYQRIGWPLYRRYGHAFEAFKLIVTDPDGVLDVLTYEETVVGPDGEEVTKVVPAVTPEVKDALVKNIRRRMTPQPLKIRADVEMKCFQFDGVLHIKEAMRKAEAAGNADCPVKIKLVAPPLYVLTTQTLDKDQGIAVLTNATKICAEAIEKHKGKLVVKEAARAVSERDDKLFADTIEKLKLAGEEVDGDDDSEEEDSGMGDVDFTKAGAGAD

SEQ ID NO: 15532 - DNA, 1501 bp, Triticum aestivum
  misc_feature (1)..(1501): Ceres Seq. ID no. 14303596
agtttgttaagttaggagcttgtgatcaaggcagcaaggcgagaagctgaagctctagctagctctggcgggcatgtttccggcggaggcgtcgttcgccggcgcggaagcggccatgctgccgcccttcttcgtgggctccatgtggcagtcggcgccaggcggcggcgcggctgccttgtccgaggaggacgaggtagccgccgctgcggctgccgaggcagcgcacgaccgcgcggtggcggcgacgcggaaccaccgcgaggccgagaagcgccgccgcgagcggatcaagtcgcacctcgaccgcctccgcgccgtcctcgcctgcgaccccaagatagacaaggcaacgctgctggccaaggcggtggagagggtgcgggagctgaagcagcgcatggacggcgtcgttggcgaggcggcggcgccggcgagccacctgttccccacggagcacgacgagatcgtggtgctcgcgtcgggaggcggcgccggcggcgcggcggccgtgtttgaggcctccgtctgctgcgacgaccgctccgacctcctcccgggcctcatcgacacgctgcgcgcgctccgcctccgcacgctccgcgccgagatggccaccctcggcggccgcgtccgcaacgtgctcgtcctcgcgcgcgacgccggaggacacgccgacgacgactactccacatcctccgaggacggcggcgccgacttcctcaaggaggccctgagggccctcgtggagaggcagggggctgccgccggcgaccggcccaagaggagacgcgtcgccgacatgaacatgcaagcggctgcttaatgaatcagctagccggccggcggccatagctcatagtatctggtcgatatgattgcatatggcgatggatctcatgcatgccatggtaatggtactactactactactatacagcgtgttaatttgctttcaaggttaattagttttgtgtgatggttaattagttccaattctccatatataccactatatggctagctaactctccttggtgatgccaatatgccatgtataattagggatatatatattactactcttttaccattagggtttgcttgagctttaatcaaatgttgcttcaaagccatggcaaacccagcccctaaaataacagttaatgtcagaatatatgcacaatgcaaagttccagacttgattgccatatgctacatatacattggataactctggaagcatttctgtttacaagatcccacaagtccatttttgatcatgtcagggcatgcagctagctagctagccttatatgcatgcatgcatgtaagacaagtcttcggatcaaacaaagatgtttgcatgcatacatgtagcaatgcatggcaagtcctaagatcaaaacaaagatggttgttccaacgcattgcatagcaatgtagcagcatgcttcctgtctgtccggtcttgtgaatgaatgaaaaaagaatgaatgtc

SEQ ID NO: 15533 - protein, 250 aa, Triticum aestivum
  peptide (1)..(250): Ceres Seq. ID no. 14303597
  misc_feature (58)..(107): Pfam Name: Pfam Description:  Helix-loop-helix DNA-binding domain
  misc_feature (1)..(250): NCBI GI NO: 32129332 NR Description: putative DNA binding protein
  misc_feature (31)..(243): NCBI GI NO: 15226839 NR Description: bHLH protein family [Arabidopsis thaliana]
  misc_feature (31)..(243): NCBI GI NO: 18491261 NR Description: At2g41130/T3K9.10 [Arabidopsis thaliana]
  misc_feature (32)..(245): NCBI GI NO: 18409132 NR Description: bHLH protein family [Arabidopsis thaliana]
  misc_feature (31)..(243): NCBI GI NO: 15229004 NR Description: bHLH protein family [Arabidopsis thaliana]
  misc_feature (39)..(212): NCBI GI NO: 15230869 NR Description: bHLH protein family [Arabidopsis thaliana]
  misc_feature (18)..(198): NCBI GI NO: 34896028 NR Description: ESTs C26093
  misc_feature (20)..(201): NCBI GI NO: 34904034 NR Description: P0665D10.15
  misc_feature (53)..(227): NCBI GI NO: 15225658 NR Description: bHLH protein family [Arabidopsis thaliana]
MFPAEASFAGAEAAMLPPFFVGSMWQSAPGGGAAALSEEDEVAAAAAAEAAHDRAVAATRNHREAEKRRRERIKSHLDRLRAVLACDPKIDKATLLAKAVERVRELKQRMDGVVGEAAAPASHLFPTEHDEIVVLASGGGAGGAAAVFEASVCCDDRSDLLPGLIDTLRALRLRTLRAEMATLGGRVRNVLVLARDAGGHADDDYSTSSEDGGADFLKEALRALVERQGAAAGDRPKRRRVADMNMQAAA

SEQ ID NO: 15534 - protein, 236 aa, Triticum aestivum
  peptide (1)..(236): Ceres Seq. ID no. 14303598
  misc_feature (44)..(93): Pfam Name: Pfam Description:  Helix-loop-helix DNA-binding domain
  misc_feature (1)..(236): NCBI GI NO: 32129332 NR Description: putative DNA binding protein
  misc_feature (17)..(229): NCBI GI NO: 15226839 NR Description: bHLH protein family [Arabidopsis thaliana]
  misc_feature (17)..(229): NCBI GI NO: 18491261 NR Description: At2g41130/T3K9.10 [Arabidopsis thaliana]
  misc_feature (18)..(231): NCBI GI NO: 18409132 NR Description: bHLH protein family [Arabidopsis thaliana]
  misc_feature (17)..(229): NCBI GI NO: 15229004 NR Description: bHLH protein family [Arabidopsis thaliana]
  misc_feature (25)..(198): NCBI GI NO: 15230869 NR Description: bHLH protein family [Arabidopsis thaliana]
  misc_feature (4)..(184): NCBI GI NO: 34896028 NR Description: ESTs C26093
  misc_feature (6)..(187): NCBI GI NO: 34904034 NR Description: P0665D10.15
  misc_feature (39)..(213): NCBI GI NO: 15225658 NR Description: bHLH protein family [Arabidopsis thaliana]
MLPPFFVGSMWQSAPGGGAAALSEEDEVAAAAAAEAAHDRAVAATRNHREAEKRRRERIKSHLDRLRAVLACDPKIDKATLLAKAVERVRELKQRMDGVVGEAAAPASHLFPTEHDEIVVLASGGGAGGAAAVFEASVCCDDRSDLLPGLIDTLRALRLRTLRAEMATLGGRVRNVLVLARDAGGHADDDYSTSSEDGGADFLKEALRALVERQGAAAGDRPKRRRVADMNMQAAA

SEQ ID NO: 15535 - protein, 227 aa, Triticum aestivum
  peptide (1)..(227): Ceres Seq. ID no. 14303599
  misc_feature (35)..(84): Pfam Name: Pfam Description:  Helix-loop-helix DNA-binding domain
  misc_feature (1)..(227): NCBI GI NO: 32129332 NR Description: putative DNA binding protein
  misc_feature (8)..(220): NCBI GI NO: 15226839 NR Description: bHLH protein family [Arabidopsis thaliana]
  misc_feature (8)..(220): NCBI GI NO: 18491261 NR Description: At2g41130/T3K9.10 [Arabidopsis thaliana]
  misc_feature (9)..(222): NCBI GI NO: 18409132 NR Description: bHLH protein family [Arabidopsis thaliana]
  misc_feature (8)..(220): NCBI GI NO: 15229004 NR Description: bHLH protein family [Arabidopsis thaliana]
  misc_feature (16)..(189): NCBI GI NO: 15230869 NR Description: bHLH protein family [Arabidopsis thaliana]
  misc_feature (1)..(175): NCBI GI NO: 34896028 NR Description: ESTs C26093
  misc_feature (1)..(178): NCBI GI NO: 34904034 NR Description: P0665D10.15
  misc_feature (30)..(204): NCBI GI NO: 15225658 NR Description: bHLH protein family [Arabidopsis thaliana]
MWQSAPGGGAAALSEEDEVAAAAAAEAAHDRAVAATRNHREAEKRRRERIKSHLDRLRAVLACDPKIDKATLLAKAVERVRELKQRMDGVVGEAAAPASHLFPTEHDEIVVLASGGGAGGAAAVFEASVCCDDRSDLLPGLIDTLRALRLRTLRAEMATLGGRVRNVLVLARDAGGHADDDYSTSSEDGGADFLKEALRALVERQGAAAGDRPKRRRVADMNMQAAA

SEQ ID NO: 15536 - DNA, 1353 bp, Triticum aestivum
  misc_feature (1)..(1353): Ceres Seq. ID no. 14303564
attaccagttgccgaagagtgagagtgagtaccgagcagttggtgcgctgctctgtcctgacattgcacgcgcttgccaccgagctctgcattgcgtctactagcagctatcctcgatggggctgccgggatgcatcgccgtcattgtgctccttctgatttcatggagagagggggaggcggcgatgttcacgttcgtcaaccggtgcgccgacacggtgtggccgggcgtcctgtccaacgctggcacggctcggctcggcaccacggggttcgagctcccgccgggcgcgtcgcgcgctgtgccggcgccctcggcctggtccggccgcctctgggcccgcaccggatgcgcgcaggacggcgccacggggcggctcgtctgcgccaccggcgactgcggctccggcacggccgagtgcgccggggccggcgcggcgcccccagcgacgctggccgagttcacgctcgacggcacgggcgggctggacttctacgacgtcagcctggtggacgggtacaacctgccggtgctggtggagccgtcctccggggagcgccccggcggcgcgtcgaccgctgggtcctgcgcttcggcggggtgcgcggcggacctgaacgcgatgtgccccgccgagctccggtccggcggcggcgcggcctgccggagcgcgtgcgacgcgttcgggcggcccgagtactgctgcagcggcgcctacgccaaccccgggacgtgccggccgacgtcctactcgcaggtgttcaagatggcctgcccgcgctcctacagctacgccttcgacgaccccacctccaccttcacctgcgccggcggccccgactacaccgtcaccttctgccccggcgccaccccgagccagaagtcgaccacggtgccggcggccacaacgccgacgcaaacgacccccacgccgacgacggtgcctgtgacggatacgccggcgatgatgccggggatgacgttcacggacgccaaccaggacagcatgccgatgccgatgggcggcgaggccgggactggtggtggcggcagcatccaggggcagggcgtgatcctcgggggcaccagcagcgacgcctggctcgccaacatggccaccggcgacgcgacgggcgcggcagcggcagcggcagcctccgggcggctagtcgccgcgccattggtactgctcgcgctccatctgctgcgatagatggaggtcggcggagcactgattgatcggtgcaatgtgtacgggtgaaaagagagattggttgtagggttagattcggagaaaaccattgtaacattccgtgttgatgggattttgttgtacgtagattgttggttag

SEQ ID NO: 15537 - protein, 369 aa, Triticum aestivum
  peptide (1)..(369): Ceres Seq. ID no. 14303565
MHRRHCAPSDFMERGGGGDVHVRQPVRRHGVAGRPVQRWHGSARHHGVRAPAGRVARCAGALGLVRPPLGPHRMRAGRRHGAARLRHRRLRLRHGRVRRGRRGAPSDAGRVHARRHGRAGLLRRQPGGRVQPAGAGGAVLRGAPRRRVDRWVLRFGGVRGGPERDVPRRAPVRRRRGLPERVRRVRAARVLLQRRLRQPRDVPADVLLAGVQDGLPALLQLRLRRPHLHLHLRRRPRLHRHLLPRRHPEPEVDHGAGGHNADANDPHADDGACDGYAGDDAGDDVHGRQPGQHADADGRRGRDWWWRQHPGAGRDPRGHQQRRLARQHGHRRRDGRGSGSGSLRAASRRAIGTARAPSAAIDGGRRSTD

SEQ ID NO: 15538 - protein, 365 aa, Triticum aestivum
  peptide (1)..(365): Ceres Seq. ID no. 14303566
  misc_feature (29)..(249): Pfam Name: Pfam Description:  Thaumatin family
  misc_feature (1)..(365): NCBI GI NO: 37531036 NR Description: putative thaumatin-like protein
  misc_feature (7)..(345): NCBI GI NO: 21592749 NR Description: putative thaumatin-like protein
  misc_feature (7)..(345): NCBI GI NO: 18420282 NR Description: thaumatin-like protein, putative
  misc_feature (25)..(345): NCBI GI NO: 7442168 NR Description: pathogenesis-related protein F20M13
  misc_feature (1)..(258): NCBI GI NO: 37531042 NR Description: putative thaumatin-like protein
  misc_feature (7)..(274): NCBI GI NO: 15233437 NR Description: thaumatin family [Arabidopsis thaliana]
  misc_feature (10)..(249): NCBI GI NO: 15233738 NR Description: thaumatin family [Arabidopsis thaliana]
  misc_feature (25)..(287): NCBI GI NO: 25296204 NR Description: hypothetical protein T20H2.19
  misc_feature (25)..(287): NCBI GI NO: 30686652 NR Description: thaumatin family [Arabidopsis thaliana]
  misc_feature (21)..(249): NCBI GI NO: 2262099 NR Description: thaumatin isolog [Arabidopsis thaliana]
MGLPGCIAVIVLLLISWREGEAAMFTFVNRCADTVWPGVLSNAGTARLGTTGFELPPGASRAVPAPSAWSGRLWARTGCAQDGATGRLVCATGDCGSGTAECAGAGAAPPATLAEFTLDGTGGLDFYDVSLVDGYNLPVLVEPSSGERPGGASTAGSCASAGCAADLNAMCPAELRSGGGAACRSACDAFGRPEYCCSGAYANPGTCRPTSYSQVFKMACPRSYSYAFDDPTSTFTCAGGPDYTVTFCPGATPSQKSTTVPAATTPTQTTPTPTTVPVTDTPAMMPGMTFTDANQDSMPMPMGGEAGTGGGGSIQGQGVILGGTSSDAWLANMATGDATGAAAAAAASGRLVAAPLVLLALHLLR

SEQ ID NO: 15539 - protein, 358 aa, Triticum aestivum
  peptide (1)..(358): Ceres Seq. ID no. 14303567
MERGGGGDVHVRQPVRRHGVAGRPVQRWHGSARHHGVRAPAGRVARCAGALGLVRPPLGPHRMRAGRRHGAARLRHRRLRLRHGRVRRGRRGAPSDAGRVHARRHGRAGLLRRQPGGRVQPAGAGGAVLRGAPRRRVDRWVLRFGGVRGGPERDVPRRAPVRRRRGLPERVRRVRAARVLLQRRLRQPRDVPADVLLAGVQDGLPALLQLRLRRPHLHLHLRRRPRLHRHLLPRRHPEPEVDHGAGGHNADANDPHADDGACDGYAGDDAGDDVHGRQPGQHADADGRRGRDWWWRQHPGAGRDPRGHQQRRLARQHGHRRRDGRGSGSGSLRAASRRAIGTARAPSAAIDGGRRSTD

SEQ ID NO: 15540 - DNA, 1786 bp, Triticum aestivum
  misc_feature (1)..(1786): Ceres Seq. ID no. 14303568
acccgacagtgaacagacagcgcacggcaacgacgcaccatcagtcacgcaccctccacccaagtcgccgactcccgccgtcgcgatcgcggcggccgccggcaatgtcttggctcgcgcgctccatcgccaactccctcctatcccccgacagccccgaggccgacggcgaagacccccgcgcctccgactccacctccccgggctcaccccctcgcggcgtccgcgaggatctctcggagctcactgacgccctcgcccaccggttccagggccttgcctccttcctcgcggcgcccactcccgcaggaagcggcggcgcaccccgcgggctgaacccgtccgagattgcggggcgcttccgcctggggctcgcgcggctcccgggccgccaggccgtggcagatctcgccaagaacgcgtcctctctactgcacccggacgaatactggggcgggtcggaggccgccggggctaccgaggacgtggtcgccttcgcgcgggacgccgccatgcggcccgagctctggctggacttcccccttctccccgacgacgcggactcggacgattttgacattagtgatgcgcagcaagatcacgcgctggccgtcgagagcatggcgccggagctggcagatctgaggatcgaactctgcccaagccacatgagcgagggctgcttctggaagatatactttgtgctactgcaccctaagctcacaaaggaggaagccgagcttctttctactcctcagattttggaagctagagggaagttgtcacaaaattcgcaacatcggacaaagctagagagcaacgaagacacagtggctctgactttcagtaatggagatggtactgtacctatacctgtagaggtggtcagcgtagtaaaagatcaagatgcttccggcaggcccacagctttgggcaatgtagattatggtatacttgaatcgattcctctggaagagctagcaaaagatacagtcagtgatgctggagctgttccttcagataaaatcagcagtggcgtgcctgtacagctattgccggtattaagagatgccactgagttctcagtctcacaatcaaggatgggagaaaccattcacactccctctaaagaacatcccactgggttctcacaatctagcattgaagaaagaacacccgactcaattacagatgatgttgtagcaaatgagcagtgtgtaccatttgtagacagtgctccatcggaagaagatcaacataaatggtcattgagtgacctcagcgagcaatcaagagttgtcactcaaaagtcccataacgatggcactgatgatgatggggatgaatggctggaagaggacacggctggtccaggaagcacgcacattccaatagtaggcgacgatgaggatatatctttcagtgatctggaggaagatgactgatgtagcatgatatcaatggcgagcttggtcatcaccgtcttggtgcttctggttcgaagcgatatgtatatgtgggtttgggttctgtccactgtatggtctcatggatctgctatgatcaatgcccactgcagcaggattgttcaccttctgctcatatctctgtgccgccaagatcagttttgcggtctagttctcccttgtggcaactatgcctgttgtacagtgtgtagagagcacatacttgtgcatgtggttgtttggatcaacactttgattcttggatcaagcgtgtgtcctgacaatgatgatgggaactcgagtattcttatgtttcggtg

SEQ ID NO: 15541 - protein, 480 aa, Triticum aestivum
  peptide (1)..(480): Ceres Seq. ID no. 14303569
  misc_feature (190)..(236): Pfam Name: Pfam Description:  BSD domain
  misc_feature (114)..(445): NCBI GI NO: 18425006 NR Description: expressed protein [Arabidopsis thaliana]
  misc_feature (35)..(144): NCBI GI NO: 18425006 NR Description: expressed protein [Arabidopsis thaliana]
  misc_feature (147)..(307): NCBI GI NO: 28273391 NR Description: putative BSD domain containing protein
  misc_feature (375)..(480): NCBI GI NO: 28273391 NR Description: putative BSD domain containing protein
  misc_feature (44)..(128): NCBI GI NO: 28273391 NR Description: putative BSD domain containing protein
  misc_feature (115)..(341): NCBI GI NO: 15229611 NR Description: expressed protein [Arabidopsis thaliana]
  misc_feature (35)..(107): NCBI GI NO: 15229611 NR Description: expressed protein [Arabidopsis thaliana]
  misc_feature (190)..(445): NCBI GI NO: 7486518 NR Description: hypothetical protein F6H11
  misc_feature (35)..(144): NCBI GI NO: 7486518 NR Description: hypothetical protein F6H11
  misc_feature (155)..(274): NCBI GI NO: 21555533 NR Description: unknown [Arabidopsis thaliana]
PTVNRQRTATTHHQSRTLHPSRRLPPSRSRRPPAMSWLARSIANSLLSPDSPEADGEDPRASDSTSPGSPPRGVREDLSELTDALAHRFQGLASFLAAPTPAGSGGAPRGLNPSEIAGRFRLGLARLPGRQAVADLAKNASSLLHPDEYWGGSEAAGATEDVVAFARDAAMRPELWLDFPLLPDDADSDDFDISDAQQDHALAVESMAPELADLRIELCPSHMSEGCFWKIYFVLLHPKLTKEEAELLSTPQILEARGKLSQNSQHRTKLESNEDTVALTFSNGDGTVPIPVEVVSVVKDQDASGRPTALGNVDYGILESIPLEELAKDTVSDAGAVPSDKISSGVPVQLLPVLRDATEFSVSQSRMGETIHTPSKEHPTGFSQSSIEERTPDSITDDVVANEQCVPFVDSAPSEEDQHKWSLSDLSEQSRVVTQKSHNDGTDDDGDEWLEEDTAGPGSTHIPIVGDDEDISFSDLEEDD

SEQ ID NO: 15542 - protein, 446 aa, Triticum aestivum
  peptide (1)..(446): Ceres Seq. ID no. 14303570
  misc_feature (156)..(202): Pfam Name: Pfam Description:  BSD domain
  misc_feature (80)..(411): NCBI GI NO: 18425006 NR Description: expressed protein [Arabidopsis thaliana]
  misc_feature (1)..(110): NCBI GI NO: 18425006 NR Description: expressed protein [Arabidopsis thaliana]
  misc_feature (113)..(273): NCBI GI NO: 28273391 NR Description: putative BSD domain containing protein
  misc_feature (341)..(446): NCBI GI NO: 28273391 NR Description: putative BSD domain containing protein
  misc_feature (10)..(94): NCBI GI NO: 28273391 NR Description: putative BSD domain containing protein
  misc_feature (81)..(307): NCBI GI NO: 15229611 NR Description: expressed protein [Arabidopsis thaliana]
  misc_feature (1)..(73): NCBI GI NO: 15229611 NR Description: expressed protein [Arabidopsis thaliana]
  misc_feature (156)..(411): NCBI GI NO: 7486518 NR Description: hypothetical protein F6H11
  misc_feature (1)..(110): NCBI GI NO: 7486518 NR Description: hypothetical protein F6H11
  misc_feature (121)..(240): NCBI GI NO: 21555533 NR Description: unknown [Arabidopsis thaliana]
MSWLARSIANSLLSPDSPEADGEDPRASDSTSPGSPPRGVREDLSELTDALAHRFQGLASFLAAPTPAGSGGAPRGLNPSEIAGRFRLGLARLPGRQAVADLAKNASSLLHPDEYWGGSEAAGATEDVVAFARDAAMRPELWLDFPLLPDDADSDDFDISDAQQDHALAVESMAPELADLRIELCPSHMSEGCFWKIYFVLLHPKLTKEEAELLSTPQILEARGKLSQNSQHRTKLESNEDTVALTFSNGDGTVPIPVEVVSVVKDQDASGRPTALGNVDYGILESIPLEELAKDTVSDAGAVPSDKISSGVPVQLLPVLRDATEFSVSQSRMGETIHTPSKEHPTGFSQSSIEERTPDSITDDVVANEQCVPFVDSAPSEEDQHKWSLSDLSEQSRVVTQKSHNDGTDDDGDEWLEEDTAGPGSTHIPIVGDDEDISFSDLEEDD

SEQ ID NO: 15543 - protein, 310 aa, Triticum aestivum
  peptide (1)..(310): Ceres Seq. ID no. 14303571
  misc_feature (20)..(66): Pfam Name: Pfam Description:  BSD domain
  misc_feature (1)..(275): NCBI GI NO: 18425006 NR Description: expressed protein [Arabidopsis thaliana]
  misc_feature (1)..(137): NCBI GI NO: 28273391 NR Description: putative BSD domain containing protein
  misc_feature (205)..(310): NCBI GI NO: 28273391 NR Description: putative BSD domain containing protein
  misc_feature (1)..(171): NCBI GI NO: 15229611 NR Description: expressed protein [Arabidopsis thaliana]
  misc_feature (20)..(275): NCBI GI NO: 7486518 NR Description: hypothetical protein F6H11
  misc_feature (1)..(104): NCBI GI NO: 21555533 NR Description: unknown [Arabidopsis thaliana]
  misc_feature (1)..(104): NCBI GI NO: 18391195 NR Description: expressed protein [Arabidopsis thaliana]
  misc_feature (1)..(23): NCBI GI NO: 7486518 NR Description: hypothetical protein F6H11
  misc_feature (1)..(83): NCBI GI NO: 34909848 NR Description: OSJNBb0053G03.5
  misc_feature (20)..(104): NCBI GI NO: 6573740 NR Description: F20B24.15 [Arabidopsis thaliana]
MRPELWLDFPLLPDDADSDDFDISDAQQDHALAVESMAPELADLRIELCPSHMSEGCFWKIYFVLLHPKLTKEEAELLSTPQILEARGKLSQNSQHRTKLESNEDTVALTFSNGDGTVPIPVEVVSVVKDQDASGRPTALGNVDYGILESIPLEELAKDTVSDAGAVPSDKISSGVPVQLLPVLRDATEFSVSQSRMGETIHTPSKEHPTGFSQSSIEERTPDSITDDVVANEQCVPFVDSAPSEEDQHKWSLSDLSEQSRVVTQKSHNDGTDDDGDEWLEEDTAGPGSTHIPIVGDDEDISFSDLEEDD

SEQ ID NO: 15544 - DNA, 1346 bp, Triticum aestivum
  misc_feature (1)..(1346): Ceres Seq. ID no. 14302780
cttttccccgtcagacgccagcaagctgcttgctttgcttcggttagctcgctgcgcggcgccgctctcggctcccccgcggccaggctgctcggatggcggggcggccggggtacgtcacgctgccgataatctcggtgttcgccgcgatcgggtacgtctactacaccgcggtgttcctcgcgatccccgcgtggctggggctcgccacggcggcgggggtcgccaacgtcgcggcctacaccgcgctcgcgctcgcctgcgtcgccgcctacggcctcgtcgtcacgcgcgacccgggccgcgtgccgcccgccttcgtgcccgacgtcgaggacacggagacccccctccatgagatcaagcgcaagggtggtgatttgagatactgccagaagtgttttcattataaacctcctcgcgcgcatcattgtcgtgtctgcaagagatgtattctgaaaatggatcaccactgtatttggattaacaattgtgttgggcatgagaattacaaaattttcctcgtctttgtgttgtatgctgcaaccgcaagcttctattctttggctctgatgattggaggcgtagtgcatagtgtgcctacagatgaacaatcaggaattgattctccaagaaaatcgttagttatttgtggcgtctttgtgggtgtaatgactttggcgttgtctatcctcttggtctggcatgtttacctcatcttacataataagactactattgagtaccatgaaggagttagggcaatgtggttggcagaaaaggctggaaatctttaccatcatccatatgatctcggtgtctatcataatattgtttcggtcctaggccccaacatgctatgctggttctgccctgtatcgaggaacataggcgacggcgttcgtttccgcacatcgtatgatattccgctatcgacaccaccatccaaagcagaaaagcatctggcaatgtcttgagctcttgcattgagagcgtatattgtgggatcaaatctgtgaatcatgccgcaagtgtaaggtacatagcgagggctgaggagcttcaagagtagttcctccaggccccagggatgtatctggagttagaaaccctaatctagctagttattccattatactttttggccagcttgatgagaagaatcaccgatgggcctcaatagatctggagtgacctggctcgcctgtactcatacaaaaagtctgaactgaagagtcaaagactgctctgttgtaaagtacgtgcctgtagtgtcgtttaccctgaagtccgtatattgcgtttttgtgtcagagagagttaagggacaaatgtcctatttactc

SEQ ID NO: 15545 - protein, 293 aa, Triticum aestivum
  peptide (1)..(293): Ceres Seq. ID no. 14302781
  misc_feature (88)..(152): Pfam Name: Pfam Description:  DHHC zinc finger domain
  misc_feature (120)..(283): NCBI GI NO: 34908228 NR Description: P0406G08.29
  misc_feature (1)..(102): NCBI GI NO: 34908228 NR Description: P0406G08.29
  misc_feature (9)..(289): NCBI GI NO: 18398471 NR Description: DHHC-type zinc finger domain-containing protein
  misc_feature (9)..(289): NCBI GI NO: 6478924 NR Description: unknown protein [Arabidopsis thaliana]
  misc_feature (95)..(276): NCBI GI NO: 15237665 NR Description: DHHC-type zinc finger domain-containing protein
  misc_feature (19)..(101): NCBI GI NO: 15237665 NR Description: DHHC-type zinc finger domain-containing protein
  misc_feature (9)..(261): NCBI GI NO: 21593364 NR Description: unknown [Arabidopsis thaliana]
  misc_feature (9)..(261): NCBI GI NO: 18416000 NR Description: DHHC-type zinc finger domain-containing protein
  misc_feature (6)..(277): NCBI GI NO: 39645517 NR Description: Unknown (protein for MGC:77880) [Danio rerio]
  misc_feature (42)..(275): NCBI GI NO: 23613303 NR Description: cell cycle regulator with zn-finger domain
MAGRPGYVTLPIISVFAAIGYVYYTAVFLAIPAWLGLATAAGVANVAAYTALALACVAAYGLVVTRDPGRVPPAFVPDVEDTETPLHEIKRKGGDLRYCQKCFHYKPPRAHHCRVCKRCILKMDHHCIWINNCVGHENYKIFLVFVLYAATASFYSLALMIGGVVHSVPTDEQSGIDSPRKSLVICGVFVGVMTLALSILLVWHVYLILHNKTTIEYHEGVRAMWLAEKAGNLYHHPYDLGVYHNIVSVLGPNMLCWFCPVSRNIGDGVRFRTSYDIPLSTPPSKAEKHLAMS

SEQ ID NO: 15546 - protein, 171 aa, Triticum aestivum
  peptide (1)..(171): Ceres Seq. ID no. 14302782
  misc_feature (1)..(161): NCBI GI NO: 34908228 NR Description: P0406G08.29
  misc_feature (1)..(167): NCBI GI NO: 18398471 NR Description: DHHC-type zinc finger domain-containing protein
  misc_feature (1)..(167): NCBI GI NO: 6478924 NR Description: unknown protein [Arabidopsis thaliana]
  misc_feature (1)..(154): NCBI GI NO: 15237665 NR Description: DHHC-type zinc finger domain-containing protein
  misc_feature (1)..(139): NCBI GI NO: 21593364 NR Description: unknown [Arabidopsis thaliana]
  misc_feature (1)..(139): NCBI GI NO: 18416000 NR Description: DHHC-type zinc finger domain-containing protein
  misc_feature (1)..(155): NCBI GI NO: 39645517 NR Description: Unknown (protein for MGC:77880) [Danio rerio]
  misc_feature (1)..(153): NCBI GI NO: 23613303 NR Description: cell cycle regulator with zn-finger domain
  misc_feature (1)..(170): NCBI GI NO: 24652286 NR Description: CG1407-PA [Drosophila melanogaster]
  misc_feature (1)..(138): NCBI GI NO: 22331887 NR Description: DHHC-type zinc finger domain-containing protein
MDHHCIWINNCVGHENYKIFLVFVLYAATASFYSLALMIGGVVHSVPTDEQSGIDSPRKSLVICGVFVGVMTLALSILLVWHVYLILHNKTTIEYHEGVRAMWLAEKAGNLYHHPYDLGVYHNIVSVLGPNMLCWFCPVSRNIGDGVRFRTSYDIPLSTPPSKAEKHLAMS

SEQ ID NO: 15547 - DNA, 1216 bp, Triticum aestivum
  misc_feature (1)..(1216): Ceres Seq. ID no. 13589061
atcgaaaagttgctcttatcttatcccatttcttcctctttcctctccctctctctctctcttacacaagttgctgctgagttggtgctgtccttgttcctggacggacacatcctacatgtcgacggcggtggcgcggccctacggcggcggcttccccggatcggggagggccaagggggacgagctgctcggcaagaagatgagcgacgggttcttcatcgaggaggaggaggaggaggaggaggaggaggcggaggaggtgctcacggagagctcctccatcggcgcgccgtcgccgtcgagctcctccatcggcgaggactcctcgtcggaggttggcggcgacggggaggacgaggaggtggagagcaagctcaaggaggagcccgggctcgggtgcctggacgccctggaggactccttgcccatcaagaacgggctgtcgagcttctacgccggaaagtcgaagtcattcaccagcctcgcggaggcggcggcgcgggacgccgtgaaggagctcgccaagccggagaaccccttcaacaagcgccgccgcatcctggccacctggtcccgccgcgcctcctgcagctcgctggccaccgccacctacctgcccccgctcctcgcccccgaccacgccctccccgagggggaggaaggcgaggaggacgacgactccgactccggctccgacgagcagcaccgcggcaagaacgggtgggaggcaccggcattgccgcccccgaggctgagcgtgaacacccagatgggcgcggcggcggcgaggaagggcggcagcttcagatcgccgaggtcctactcgctctcagatcttcgaaatggcggcgatgcgagatacaaccagtagctgcgaattcgcagccattgatctgtcttgtgtcccgtagatctgttactactacttactccttaattatatataagcaagtaatcgcaagagcatgtgtaagtgtctaagctaaattcgtcgtgctcttgtatccgtcagttggatcccgttgacctcgctcacccgacccgatgtacgcagacatgtatgaactgctccggcgaactgagttcaccgaactgatccaacaccccggccatcattaactaatgatgaaccgtcctcaagataagattagttagtttaatggcattgctcccgatccctttgtgtacaaacatatatacaatttgttgatcc

SEQ ID NO: 15548 - protein, 327 aa, Triticum aestivum
  peptide (1)..(327): Ceres Seq. ID no. 13589062
IEKLLLSYPISSSFLSLSLSLTQVAAELVLSLFLDGHILHVDGGGAALRRRLPRIGEGQGGRAARQEDERRVLHRGGGGGGGGGGGGGAHGELLHRRAVAVELLHRRGLLVGGWRRRGGRGGGEQAQGGARARVPGRPGGLLAHQERAVELLRRKVEVIHQPRGGGGAGRREGARQAGEPLQQAPPHPGHLVPPRLLQLAGHRHLPAPAPRPRPRPPRGGGRRGGRRLRLRLRRAAPRQERVGGTGIAAPEAEREHPDGRGGGEEGRQLQIAEVLLALRSSKWRRCEIQPVAANSQPLICLVSRRSVTTTYSLIIYKQVIARACVSV

SEQ ID NO: 15549 - protein, 290 aa, Triticum aestivum
  peptide (1)..(290): Ceres Seq. ID no. 13589063
  misc_feature (40)..(289): NCBI GI NO: 34905120 NR Description: P0686C03.43
  misc_feature (69)..(280): NCBI GI NO: 15238642 NR Description: expressed protein [Arabidopsis thaliana]
  misc_feature (40)..(237): NCBI GI NO: 15724184 NR Description: At2g24550/F25P17.15 [Arabidopsis thaliana]
  misc_feature (69)..(280): NCBI GI NO: 28393161 NR Description: unknown protein [Arabidopsis thaliana]
  misc_feature (98)..(235): NCBI GI NO: 15235970 NR Description: expressed protein [Arabidopsis thaliana]
  misc_feature (44)..(237): NCBI GI NO: 25412223 NR Description: hypothetical protein At2g24550
  misc_feature (40)..(205): NCBI GI NO: 18400574 NR Description: expressed protein [Arabidopsis thaliana]
  misc_feature (101)..(282): NCBI GI NO: 9294810 NR Description: MTD1 [Medicago truncatula]
  misc_feature (92)..(188): NCBI GI NO: 22326936 NR Description: expressed protein [Arabidopsis thaliana]
  misc_feature (99)..(237): NCBI GI NO: 15229793 NR Description: hypothetical protein [Arabidopsis thaliana]
SKSCSYLIPFLPLSSPSLSLLHKLLLSWCCPCSWTDTSYMSTAVARPYGGGFPGSGRAKGDELLGKKMSDGFFIEEEEEEEEEEAEEVLTESSSIGAPSPSSSSIGEDSSSEVGGDGEDEEVESKLKEEPGLGCLDALEDSLPIKNGLSSFYAGKSKSFTSLAEAAARDAVKELAKPENPFNKRRRILATWSRRASCSSLATATYLPPLLAPDHALPEGEEGEEDDDSDSGSDEQHRGKNGWEAPALPPPRLSVNTQMGAAAARKGGSFRSPRSYSLSDLRNGGDARYNQ

SEQ ID NO: 15550 - protein, 251 aa, Triticum aestivum
  peptide (1)..(251): Ceres Seq. ID no. 13589064
  misc_feature (1)..(250): NCBI GI NO: 34905120 NR Description: P0686C03.43
  misc_feature (30)..(241): NCBI GI NO: 15238642 NR Description: expressed protein [Arabidopsis thaliana]
  misc_feature (1)..(198): NCBI GI NO: 15724184 NR Description: At2g24550/F25P17.15 [Arabidopsis thaliana]
  misc_feature (30)..(241): NCBI GI NO: 28393161 NR Description: unknown protein [Arabidopsis thaliana]
  misc_feature (59)..(196): NCBI GI NO: 15235970 NR Description: expressed protein [Arabidopsis thaliana]
  misc_feature (5)..(198): NCBI GI NO: 25412223 NR Description: hypothetical protein At2g24550
  misc_feature (1)..(166): NCBI GI NO: 18400574 NR Description: expressed protein [Arabidopsis thaliana]
  misc_feature (62)..(243): NCBI GI NO: 9294810 NR Description: MTD1 [Medicago truncatula]
  misc_feature (53)..(149): NCBI GI NO: 22326936 NR Description: expressed protein [Arabidopsis thaliana]
  misc_feature (60)..(198): NCBI GI NO: 15229793 NR Description: hypothetical protein [Arabidopsis thaliana]
MSTAVARPYGGGFPGSGRAKGDELLGKKMSDGFFIEEEEEEEEEEAEEVLTESSSIGAPSPSSSSIGEDSSSEVGGDGEDEEVESKLKEEPGLGCLDALEDSLPIKNGLSSFYAGKSKSFTSLAEAAARDAVKELAKPENPFNKRRRILATWSRRASCSSLATATYLPPLLAPDHALPEGEEGEEDDDSDSGSDEQHRGKNGWEAPALPPPRLSVNTQMGAAAARKGGSFRSPRSYSLSDLRNGGDARYNQ

SEQ ID NO: 15551 - DNA, 2073 bp, Triticum aestivum
  misc_feature (1)..(2073): Ceres Seq. ID no. 13597678
  misc_feature (1652)..(1652): n is a, c, t, g, unknown, or other
  misc_feature (1654)..(1654): n is a, c, t, g, unknown, or other
  misc_feature (3)..(3): n is a, c, t, g, unknown, or other
  misc_feature (4)..(4): n is a, c, t, g, unknown, or other
  misc_feature (1653)..(1653): n is a, c, t, g, unknown, or other
  misc_feature (5)..(5): n is a, c, t, g, unknown, or other
gannntgatctccatccacactccaaaacagagcaggcaccacaccacagtcgagagcagaggaggcaccattctccggcacagcagagcaggcacacaccgctcgtcgtcggccggatggacggtgccgcagccgcctggacgccccggaagcaggtggtgctgtacccttcgcccggcatgggccacctggtgtccatgatcgagctcggcaaggtcctcgcggctcgtggcctcgccatcaccatcgtcatcgtgagcctgccgttcgtggacaccggggccagggggccgttcctggccggcgtcaccgcggccaacccctccatctccttccactgcctcccgcaggtcgacgtcccgccgctcgactccgaccaccccgaggcggtcacctacgaggtcgccggcctctccatcccacacctccgcggcttcctcgccagggcctcaccgaccgtcctcgtcgtcgactttttttgcagcatcgcgctcgacgtggccgcggagctcggcgtccccgggtactgtttcttcacgtctcccgcggaggtcctggctttttccctgtatttgccggtcctgcatgctaggagcgcggccagctttkgggagatgggggaggagctcgtgcacgtgccggggatccccgcgctgscggcgacgcacttccccaagccgctcatggaccgtgacgacccggcatacatatggtcgctgagagtgtcccccgacctctgccgctcccagggaatcatcgtcaacaccttccgctcgctcgagccacgcgcggtggacaccatcgccgccgggctctgcacgcctcccggcctcccgacgccgccggtctactgcatcgggccgctgataaagtcggaggaggtgggcgtgaagcgcggccacgagtgcctggcgtggctggacacgcagccgacggccagcgtggtgttcctctgcttcggcagcctcggcgtgttcaacgcagagcagatcaggcaggtggccatcggcctggaggccagcggcaagaggttcctgtgggtcgtgcggagcccgccgagcgacgacccgacaaagaagttcgaggagccgccggagccggacctcgatgctctcctcccggagggcttcctggaccggaccaagggcacgggtctcgtcgtcaagtcatgggcgccgcagcggsacgtgctggtgcatggcgcggtgggcggtttcgtgacgcactgcgggtggaactccgtgctcgaggtgatcatggccggcgtgcccatgctggcctggccgctgtaggcggagcagcggatgaacagagtgttcctggaaaaggagctgggtctggctgtggcggtggatgaatatgacaaggaggtggtggacgccgacgaagtggcggcaaaggtgaggtggctgatggactccgacggcggcagggtgctccgggagtggacgcaggcggctatgcgacgggccaagcaggcgctgggcgagggtggggagtcgaatttgacgttgacgcgactggtccagggctggatgcttgacgtgggcaatgacgtgagttcggctgagaaaagatagtgcaactcatggtcacgggagaaaagcaattctcccattcatggctcaaccgttgaatttagatggagatnnngatgcatgcacacctcttctaattgtatttcacccattaatgaacccacactctcccatgcagcacactacacccatgctttttcatgtgatttcaaagtttgaaataattttatcktttaaacwcaatraasykggaamwrraggggggaaagraaaaaaaaaaaaaaaaaaaaaaaaaaaaaaaaaaaaaaaaaaaaaaaaaarraaaaaaaaaaaaaaaaaaaaaargaaaaaaaaaaaaaaaaaggtttaycgatcccsccaaccccaagggggggcccggaacccaattccccccaaaagggagccraawaacscscscccmmgggccgccgtttaaaaacgscggracgggaaaamcccgggggtamcccaaytaaaycgcctggaaraaaaccccccttyccccagtggggg

SEQ ID NO: 15552 - protein, 430 aa, Triticum aestivum
  peptide (1)..(430): Ceres Seq. ID no. 15222165
  misc_feature (53)..(430): Pfam Name: Pfam Description:  UDP-glucoronosyl and UDP-glucosyl transferase
  misc_feature (40)..(430): NCBI GI NO: 22535568 NR Description: putative glucosyltransferase
  misc_feature (48)..(430): NCBI GI NO: 34910208 NR Description: putative flavonol glucosyltransferase
  misc_feature (49)..(430): NCBI GI NO: 34910228 NR Description: putative flavonol glucosyltransferase
  misc_feature (51)..(430): NCBI GI NO: 34910204 NR Description: putative flavonol glucosyltransferase
  misc_feature (50)..(430): NCBI GI NO: 34910218 NR Description: putative flavonol glucosyltransferase
  misc_feature (50)..(430): NCBI GI NO: 34910206 NR Description: putative flavonol glucosyltransferase
  misc_feature (53)..(430): NCBI GI NO: 18401158 NR Description: glycosyltransferase family [Arabidopsis thaliana]
  misc_feature (53)..(430): NCBI GI NO: 21593785 NR Description: putative glucosyltransferase
  misc_feature (53)..(430): NCBI GI NO: 18401155 NR Description: glycosyltransferase family [Arabidopsis thaliana]
  misc_feature (52)..(430): NCBI GI NO: 11994646 NR Description: UTP-glucose glucosyltransferase
  misc_feature (1)..(1): Xaa is any aa, unknown or other
  misc_feature (2)..(2): Xaa is any aa, unknown or other
  misc_feature (204)..(204): Xaa is any aa, unknown or other
  misc_feature (220)..(220): Xaa is any aa, unknown or other
  misc_feature (396)..(396): Xaa is any aa, unknown or other
XXDLHPHSKTEQAPHHSREQRRHHSPAQQSRHTPLVVGRMDGAAAAWTPRKQVVLYPSPGMGHLVSMIELGKVLAARGLAITIVIVSLPFVDTGARGPFLAGVTAANPSISFHCLPQVDVPPLDSDHPEAVTYEVAGLSIPHLRGFLARASPTVLVVDFFCSIALDVAAELGVPGYCFFTSPAEVLAFSLYLPVLHARSAASFXEMGEELVHVPGIPALXATHFPKPLMDRDDPAYIWSLRVSPDLCRSQGIIVNTFRSLEPRAVDTIAAGLCTPPGLPTPPVYCIGPLIKSEEVGVKRGHECLAWLDTQPTASVVFLCFGSLGVFNAEQIRQVAIGLEASGKRFLWVVRSPPSDDPTKKFEEPPEPDLDALLPEGFLDRTKGTGLVVKSWAPQRXVLVHGAVGGFVTHCGWNSVLEVIMAGVPMLAWPL

SEQ ID NO: 15553 - protein, 391 aa, Triticum aestivum
  peptide (1)..(391): Ceres Seq. ID no. 15222166
  misc_feature (14)..(391): Pfam Name: Pfam Description:  UDP-glucoronosyl and UDP-glucosyl transferase
  misc_feature (1)..(391): NCBI GI NO: 22535568 NR Description: putative glucosyltransferase
  misc_feature (9)..(391): NCBI GI NO: 34910208 NR Description: putative flavonol glucosyltransferase
  misc_feature (10)..(391): NCBI GI NO: 34910228 NR Description: putative flavonol glucosyltransferase
  misc_feature (12)..(391): NCBI GI NO: 34910204 NR Description: putative flavonol glucosyltransferase
  misc_feature (11)..(391): NCBI GI NO: 34910218 NR Description: putative flavonol glucosyltransferase
  misc_feature (11)..(391): NCBI GI NO: 34910206 NR Description: putative flavonol glucosyltransferase
  misc_feature (14)..(391): NCBI GI NO: 18401158 NR Description: glycosyltransferase family [Arabidopsis thaliana]
  misc_feature (14)..(391): NCBI GI NO: 21593785 NR Description: putative glucosyltransferase
  misc_feature (14)..(391): NCBI GI NO: 18401155 NR Description: glycosyltransferase family [Arabidopsis thaliana]
  misc_feature (13)..(391): NCBI GI NO: 11994646 NR Description: UTP-glucose glucosyltransferase
  misc_feature (165)..(165): Xaa is any aa, unknown or other
  misc_feature (181)..(181): Xaa is any aa, unknown or other
  misc_feature (357)..(357): Xaa is any aa, unknown or other
MDGAAAAWTPRKQVVLYPSPGMGHLVSMIELGKVLAARGLAITIVIVSLPFVDTGARGPFLAGVTAANPSISFHCLPQVDVPPLDSDHPEAVTYEVAGLSIPHLRGFLARASPTVLVVDFFCSIALDVAAELGVPGYCFFTSPAEVLAFSLYLPVLHARSAASFXEMGEELVHVPGIPALXATHFPKPLMDRDDPAYIWSLRVSPDLCRSQGIIVNTFRSLEPRAVDTIAAGLCTPPGLPTPPVYCIGPLIKSEEVGVKRGHECLAWLDTQPTASVVFLCFGSLGVFNAEQIRQVAIGLEASGKRFLWVVRSPPSDDPTKKFEEPPEPDLDALLPEGFLDRTKGTGLVVKSWAPQRXVLVHGAVGGFVTHCGWNSVLEVIMAGVPMLAWPL

SEQ ID NO: 15554 - protein, 370 aa, Triticum aestivum
  peptide (1)..(370): Ceres Seq. ID no. 15222167
  misc_feature (1)..(370): Pfam Name: Pfam Description:  UDP-glucoronosyl and UDP-glucosyl transferase
  misc_feature (1)..(370): NCBI GI NO: 22535568 NR Description: putative glucosyltransferase
  misc_feature (1)..(370): NCBI GI NO: 34910208 NR Description: putative flavonol glucosyltransferase
  misc_feature (1)..(370): NCBI GI NO: 34910228 NR Description: putative flavonol glucosyltransferase
  misc_feature (1)..(370): NCBI GI NO: 34910204 NR Description: putative flavonol glucosyltransferase
  misc_feature (1)..(370): NCBI GI NO: 34910218 NR Description: putative flavonol glucosyltransferase
  misc_feature (1)..(370): NCBI GI NO: 34910206 NR Description: putative flavonol glucosyltransferase
  misc_feature (1)..(370): NCBI GI NO: 18401158 NR Description: glycosyltransferase family [Arabidopsis thaliana]
  misc_feature (1)..(370): NCBI GI NO: 21593785 NR Description: putative glucosyltransferase
  misc_feature (1)..(370): NCBI GI NO: 18401155 NR Description: glycosyltransferase family [Arabidopsis thaliana]
  misc_feature (1)..(370): NCBI GI NO: 11994646 NR Description: UTP-glucose glucosyltransferase
  misc_feature (144)..(144): Xaa is any aa, unknown or other
  misc_feature (160)..(160): Xaa is any aa, unknown or other
  misc_feature (336)..(336): Xaa is any aa, unknown or other
MGHLVSMIELGKVLAARGLAITIVIVSLPFVDTGARGPFLAGVTAANPSISFHCLPQVDVPPLDSDHPEAVTYEVAGLSIPHLRGFLARASPTVLVVDFFCSIALDVAAELGVPGYCFFTSPAEVLAFSLYLPVLHARSAASFXEMGEELVHVPGIPALXATHFPKPLMDRDDPAYIWSLRVSPDLCRSQGIIVNTFRSLEPRAVDTIAAGLCTPPGLPTPPVYCIGPLIKSEEVGVKRGHECLAWLDTQPTASVVFLCFGSLGVFNAEQIRQVAIGLEASGKRFLWVVRSPPSDDPTKKFEEPPEPDLDALLPEGFLDRTKGTGLVVKSWAPQRXVLVHGAVGGFVTHCGWNSVLEVIMAGVPMLAWPL

SEQ ID NO: 15555 - DNA, 1477 bp, Triticum aestivum
  misc_feature (1)..(1477): Ceres Seq. ID no. 14302844
acactccaactcagtggcaacagcatctcccctgttccgcccgcccgctcgcctctgtttcttttctttctttccacagcggctctgctccgctcctcacctccctcgatcgcacataccatatttggtagctcagcacagccatggtggttcttgccagcacgcccgccgtcgatcacatcccgctcctcaggtcccccgaccccggggactacttctccggcatgccggttgtcgacctctccagccctggcgcgccgcgggccatcgccgacgcctgcgagcgcttcgggttcttcaagctcgtcaaccacggggtgccagcggacacgatggacaggctcgagtcagaggccgtcaggttcttctcgctgccgcaggccgacaaggaccgctccggcccggcctacccgttcggctacggcagcaagcgcatcgggctcaatggcgacatgggctggctcgagtacctcctcctcgccgtcgagtccgcgtcgctctccggcgcctgcaccgtcccgtcctgcgcgctcttccgggcggcgctgaacgagtacatcgcggcggtgcggaaggtggcggtgcgggtgatggaggcgatggcggaggggctgggcattgcgcccgttgacgcgctgagcgcgatggtgacggcgggggggagcgaccaggtgttccgggtgaaccactacccgccgtgccacgcgctgcaagggctgggctgcagcgccacaggcttcggcgagcacaccgacccgcagctcatctccgtgctgcgctccaacggcacgtccggcctgcagatcgcgctccagaacgggcagtgggtgtccgtgccctcggaccgcgacgccttcttcgtcaacgtcggcgactcgttgcaggtgctgaccaacgggaggttcaagagcgtgaagcacagggtggtggccaacagcctaaagtctagggtttccatgatctactttggagggccagcgatgacacagaggattgcaccattgccgcagctgctgggcgcgggagagcagagcctgtacaaggacttcacatggggcgagtacaagaaggctgcctacaactcgaggctcggggacaacaggctggctcagttccacaggtagcctcgcctgccgcctgggcctgctcaaggagcagcttttaccaagccagctagctctagcttagctagctctgccgtggcttgtatttcccacacgatcgatgaagatcaagagggggggaagctactactagaaaagaaaaagaaacagggctaaaagaagatgatttcaagattcacatgcagtagtagagctgcggaggtagctagatcctttttgcgtgtgcgcgtgcgtgtgtgttcatagttgctaaaactcgcctttcctattcgggaatgccggacgaacgatgaacagataagttaacttgatgaatagttagtgtgaaccagatacagcagaggattggcatc

SEQ ID NO: 15556 - protein, 326 aa, Triticum aestivum
  peptide (1)..(326): Ceres Seq. ID no. 14302845
  misc_feature (174)..(278): Pfam Name: II Pfam Description: 2OG-Fe
  misc_feature (1)..(326): NCBI GI NO: 34909676 NR Description: putative GA 2-oxidase
  misc_feature (1)..(326): NCBI GI NO: 4678586 NR Description: GA 2-oxidase [Phaseolus coccineus]
  misc_feature (26)..(326): NCBI GI NO: 1666096 NR Description: dioxygenase [Marah macrocarpus]
  misc_feature (24)..(326): NCBI GI NO: 32127337 NR Description: Gibberellin 2-oxidase [Cucurbita maxima]
  misc_feature (24)..(326): NCBI GI NO: 27123665 NR Description: gibberellin 2-oxidase [Cucurbita maxima]
  misc_feature (2)..(326): NCBI GI NO: 6446413 NR Description: gibberellin 2-beta-hydroxylase [Pisum sativum]
  misc_feature (2)..(326): NCBI GI NO: 6478202 NR Description: gibberellin 2 beta-hydroxylase [Pisum sativum]
  misc_feature (8)..(326): NCBI GI NO: 5579094 NR Description: gibberellin 2-oxidase [Pisum sativum]
  misc_feature (1)..(326): NCBI GI NO: 9971227 NR Description: gibberellin 2-oxidase No1 [Lactuca sativa]
  misc_feature (1)..(324): NCBI GI NO: 27261177 NR Description: gibberellin 2-oxidase 1 [Spinacia oleracea]
MVVLASTPAVDHIPLLRSPDPGDYFSGMPVVDLSSPGAPRAIADACERFGFFKLVNHGVPADTMDRLESEAVRFFSLPQADKDRSGPAYPFGYGSKRIGLNGDMGWLEYLLLAVESASLSGACTVPSCALFRAALNEYIAAVRKVAVRVMEAMAEGLGIAPVDALSAMVTAGGSDQVFRVNHYPPCHALQGLGCSATGFGEHTDPQLISVLRSNGTSGLQIALQNGQWVSVPSDRDAFFVNVGDSLQVLTNGRFKSVKHRVVANSLKSRVSMIYFGGPAMTQRIAPLPQLLGAGEQSLYKDFTWGEYKKAAYNSRLGDNRLAQFHR

SEQ ID NO: 15557 - protein, 299 aa, Triticum aestivum
  peptide (1)..(299): Ceres Seq. ID no. 14302846
  misc_feature (147)..(251): Pfam Name: II Pfam Description: 2OG-Fe
  misc_feature (1)..(299): NCBI GI NO: 34909676 NR Description: putative GA 2-oxidase
  misc_feature (1)..(299): NCBI GI NO: 4678586 NR Description: GA 2-oxidase [Phaseolus coccineus]
  misc_feature (1)..(299): NCBI GI NO: 1666096 NR Description: dioxygenase [Marah macrocarpus]
  misc_feature (1)..(299): NCBI GI NO: 32127337 NR Description: Gibberellin 2-oxidase [Cucurbita maxima]
  misc_feature (1)..(299): NCBI GI NO: 27123665 NR Description: gibberellin 2-oxidase [Cucurbita maxima]
  misc_feature (1)..(299): NCBI GI NO: 6446413 NR Description: gibberellin 2-beta-hydroxylase [Pisum sativum]
  misc_feature (1)..(299): NCBI GI NO: 6478202 NR Description: gibberellin 2 beta-hydroxylase [Pisum sativum]
  misc_feature (1)..(299): NCBI GI NO: 5579094 NR Description: gibberellin 2-oxidase [Pisum sativum]
  misc_feature (1)..(299): NCBI GI NO: 9971227 NR Description: gibberellin 2-oxidase No1 [Lactuca sativa]
  misc_feature (1)..(297): NCBI GI NO: 27261177 NR Description: gibberellin 2-oxidase 1 [Spinacia oleracea]
MPVVDLSSPGAPRAIADACERFGFFKLVNHGVPADTMDRLESEAVRFFSLPQADKDRSGPAYPFGYGSKRIGLNGDMGWLEYLLLAVESASLSGACTVPSCALFRAALNEYIAAVRKVAVRVMEAMAEGLGIAPVDALSAMVTAGGSDQVFRVNHYPPCHALQGLGCSATGFGEHTDPQLISVLRSNGTSGLQIALQNGQWVSVPSDRDAFFVNVGDSLQVLTNGRFKSVKHRVVANSLKSRVSMIYFGGPAMTQRIAPLPQLLGAGEQSLYKDFTWGEYKKAAYNSRLGDNRLAQFHR

SEQ ID NO: 15558 - protein, 263 aa, Triticum aestivum
  peptide (1)..(263): Ceres Seq. ID no. 14302847
  misc_feature (111)..(215): Pfam Name: II Pfam Description: 2OG-Fe
  misc_feature (1)..(263): NCBI GI NO: 34909676 NR Description: putative GA 2-oxidase
  misc_feature (1)..(263): NCBI GI NO: 4678586 NR Description: GA 2-oxidase [Phaseolus coccineus]
  misc_feature (1)..(263): NCBI GI NO: 1666096 NR Description: dioxygenase [Marah macrocarpus]
  misc_feature (1)..(263): NCBI GI NO: 32127337 NR Description: Gibberellin 2-oxidase [Cucurbita maxima]
  misc_feature (1)..(263): NCBI GI NO: 27123665 NR Description: gibberellin 2-oxidase [Cucurbita maxima]
  misc_feature (1)..(263): NCBI GI NO: 6446413 NR Description: gibberellin 2-beta-hydroxylase [Pisum sativum]
  misc_feature (1)..(263): NCBI GI NO: 6478202 NR Description: gibberellin 2 beta-hydroxylase [Pisum sativum]
  misc_feature (1)..(263): NCBI GI NO: 5579094 NR Description: gibberellin 2-oxidase [Pisum sativum]
  misc_feature (1)..(263): NCBI GI NO: 9971227 NR Description: gibberellin 2-oxidase No1 [Lactuca sativa]
  misc_feature (1)..(261): NCBI GI NO: 27261177 NR Description: gibberellin 2-oxidase 1 [Spinacia oleracea]
MDRLESEAVRFFSLPQADKDRSGPAYPFGYGSKRIGLNGDMGWLEYLLLAVESASLSGACTVPSCALFRAALNEYIAAVRKVAVRVMEAMAEGLGIAPVDALSAMVTAGGSDQVFRVNHYPPCHALQGLGCSATGFGEHTDPQLISVLRSNGTSGLQIALQNGQWVSVPSDRDAFFVNVGDSLQVLTNGRFKSVKHRVVANSLKSRVSMIYFGGPAMTQRIAPLPQLLGAGEQSLYKDFTWGEYKKAAYNSRLGDNRLAQFHR

SEQ ID NO: 15559 - DNA, 961 bp, Triticum aestivum
  misc_feature (1)..(961): Ceres Seq. ID no. 13597620
ccacgcagcacctcctctcctcgccccccgagatcggaatcggcgcccccctccctccgccgccgccgccgccgccgccatgtcgccgtctctgctcggggggctcaccaagtcgctggccatgaccgtgctctccgaggtcggcgacaagaccttcttcgccgccgcgattctggccatgcgccatccccggaagctcgtccttgctggctgtctatcggcgttaacagtgatgaccgctttatctgcttctctcggctgggctgcaccaaatctgatatcacgtaaatggactcatcatatcaccactctgctgttctttgtgtttggcatctggtcattgtgggaaggcttcaaagaagaaggagagtcagaagatctggctgaattggaagcaaagctggatgcggactttaagactaacaaaggggaatcgaaaaataaatcaaaggcaactgaagatacaaagaaaaagcaaaggccatttctcatgcagttcttctcgccaatttttataaaggcattttccatcactttctttggtgagtggggtgacaagagccagattgctacaattggcttggctgctgatgaaaacccattcggtgtcgtcatcgggggagtcatagctcaagcactctgcactaccgctgccgtgatgggagggaagagcctggcctctcagatatccgagaagatggttgaattgtcgagcggggtgctattcctgttgtttggcataatgtccttgttgtcagggccagaagggcaattgtaatttccccaggaacttcggcaggactctgccagactcctggagtagttaccaagcttaccttatttgatgggtgatggcgacgaaagccggccgtccttcaccaactggatggcgattcattagtttagtcaacacatcattgtaacacttggcttgccactcataaataacttgatgttactg

SEQ ID NO: 15560 - protein, 258 aa, Triticum aestivum
  peptide (1)..(258): Ceres Seq. ID no. 13597621
  misc_feature (36)..(110): Pfam Name: Pfam Description:  Uncharacterized protein family UPF0016
  misc_feature (30)..(252): NCBI GI NO: 15221462 NR Description: transmembrane protein -related
  misc_feature (30)..(255): NCBI GI NO: 15222613 NR Description: transmembrane protein -related
  misc_feature (30)..(255): NCBI GI NO: 21593636 NR Description: transmembrane protein, putative
  misc_feature (23)..(255): NCBI GI NO: 6755853 NR Description: TPA regulated locus [Mus musculus]
  misc_feature (23)..(255): NCBI GI NO: 7684611 NR Description: TPARDL [Mus musculus]
  misc_feature (28)..(250): NCBI GI NO: 15420543 NR Description: putative membrane protein [Crithidia fasciculata]
  misc_feature (26)..(254): NCBI GI NO: 18421551 NR Description: transmembrane protein FT27/PFT27-related
  misc_feature (38)..(255): NCBI GI NO: 20385488 NR Description: transmembrane protein HTP-1 [Danio rerio]
  misc_feature (18)..(255): NCBI GI NO: 21357589 NR Description: CG4196-PC [Drosophila melanogaster]
  misc_feature (30)..(250): NCBI GI NO: 17556152 NR Description: Uncharacterized protein family UPF0016 (32.1 kD)
HAAPPLLAPRDRNRRPPPSAAAAAAAMSPSLLGGLTKSLAMTVLSEVGDKTFFAAAILAMRHPRKLVLAGCLSALTVMTALSASLGWAAPNLISRKWTHHITTLLFFVFGIWSLWEGFKEEGESEDLAELEAKLDADFKTNKGESKNKSKATEDTKKKQRPFLMQFFSPIFIKAFSITFFGEWGDKSQIATIGLAADENPFGVVIGGVIAQALCTTAAVMGGKSLASQISEKMVELSSGVLFLLFGIMSLLSGPEGQL

SEQ ID NO: 15561 - protein, 232 aa, Triticum aestivum
  peptide (1)..(232): Ceres Seq. ID no. 13597622
  misc_feature (10)..(84): Pfam Name: Pfam Description:  Uncharacterized protein family UPF0016
  misc_feature (4)..(226): NCBI GI NO: 15221462 NR Description: transmembrane protein -related
  misc_feature (4)..(229): NCBI GI NO: 15222613 NR Description: transmembrane protein -related
  misc_feature (4)..(229): NCBI GI NO: 21593636 NR Description: transmembrane protein, putative
  misc_feature (1)..(229): NCBI GI NO: 6755853 NR Description: TPA regulated locus [Mus musculus]
  misc_feature (1)..(229): NCBI GI NO: 7684611 NR Description: TPARDL [Mus musculus]
  misc_feature (2)..(224): NCBI GI NO: 15420543 NR Description: putative membrane protein [Crithidia fasciculata]
  misc_feature (1)..(228): NCBI GI NO: 18421551 NR Description: transmembrane protein FT27/PFT27-related
  misc_feature (12)..(229): NCBI GI NO: 20385488 NR Description: transmembrane protein HTP-1 [Danio rerio]
  misc_feature (1)..(229): NCBI GI NO: 21357589 NR Description: CG4196-PC [Drosophila melanogaster]
  misc_feature (4)..(224): NCBI GI NO: 17556152 NR Description: Uncharacterized protein family UPF0016 (32.1 kD)
MSPSLLGGLTKSLAMTVLSEVGDKTFFAAAILAMRHPRKLVLAGCLSALTVMTALSASLGWAAPNLISRKWTHHITTLLFFVFGIWSLWEGFKEEGESEDLAELEAKLDADFKTNKGESKNKSKATEDTKKKQRPFLMQFFSPIFIKAFSITFFGEWGDKSQIATIGLAADENPFGVVIGGVIAQALCTTAAVMGGKSLASQISEKMVELSSGVLFLLFGIMSLLSGPEGQL

SEQ ID NO: 15562 - protein, 218 aa, Triticum aestivum
  peptide (1)..(218): Ceres Seq. ID no. 13597623
  misc_feature (1)..(70): Pfam Name: Pfam Description:  Uncharacterized protein family UPF0016
  misc_feature (1)..(212): NCBI GI NO: 15221462 NR Description: transmembrane protein -related
  misc_feature (1)..(215): NCBI GI NO: 15222613 NR Description: transmembrane protein -related
  misc_feature (1)..(215): NCBI GI NO: 21593636 NR Description: transmembrane protein, putative
  misc_feature (1)..(215): NCBI GI NO: 6755853 NR Description: TPA regulated locus [Mus musculus]
  misc_feature (1)..(215): NCBI GI NO: 7684611 NR Description: TPARDL [Mus musculus]
  misc_feature (1)..(210): NCBI GI NO: 15420543 NR Description: putative membrane protein [Crithidia fasciculata]
  misc_feature (1)..(214): NCBI GI NO: 18421551 NR Description: transmembrane protein FT27/PFT27-related
  misc_feature (1)..(215): NCBI GI NO: 20385488 NR Description: transmembrane protein HTP-1 [Danio rerio]
  misc_feature (1)..(215): NCBI GI NO: 21357589 NR Description: CG4196-PC [Drosophila melanogaster]
  misc_feature (1)..(210): NCBI GI NO: 17556152 NR Description: Uncharacterized protein family UPF0016 (32.1 kD)
MTVLSEVGDKTFFAAAILAMRHPRKLVLAGCLSALTVMTALSASLGWAAPNLISRKWTHHITTLLFFVFGIWSLWEGFKEEGESEDLAELEAKLDADFKTNKGESKNKSKATEDTKKKQRPFLMQFFSPIFIKAFSITFFGEWGDKSQIATIGLAADENPFGVVIGGVIAQALCTTAAVMGGKSLASQISEKMVELSSGVLFLLFGIMSLLSGPEGQL

SEQ ID NO: 15563 - DNA, 1133 bp, Triticum aestivum
  misc_feature (1)..(1133): Ceres Seq. ID no. 12618069
agatcacgcgccgctcctcccggtcgccctagcgccgccaccgaacgatcccccgaccccccagaccacgagaccacccgcggcggttggccggcgcagggatgggcgacgaggcgaagtacctggagactgcgcgggcggaccgctccgtgtggctcatgaagtgcccccccgtcgtctcccaggcctggcagggcgcctcctcctcctccggcgatgctaaccctaacccggtcgtcgccaaggtcgtgctgtccctcgaccccctcagctccgccgagccctccctccagttcaagatggagatgtctcaaactagtgtagccagcacttgcaatctaccaaagagttactccttgaatatgttcaaggattttgtacccatgtgtgttttctctgagactaatcagggaaaactctcatgtgaaggaaaagtcgagcataaattcgacatggaacctcacaaggataacttattaaactacgcgaagttatgccgtgaaagaacacaaaagtcgatggttaaaactagaaaagtgcaggtacttgataatgaccatggaatgagcatgagacccatgcctggcatggttggtctgatatcttctagttccaaggagaagaggaagccaacgccaaccaaaccatccgatgtcaaaaggacacgtagggaccgtcgggaactggaaaacattatcttcaagcttttcgaaaagcagcctaactgggcactgaaggctctagtgcaagagactgaccagccagagcaattcctcaaggagatattgaacgacctctgtatgtacaacaaacgaggtccgaaccagggcacgcacgagctcaagcccgagtacaagaagtcgtcggaggacgccgccggtgctgctccgtgaagacgatttgcgtatccgactgctgttgtataaccgagtacctgttggctttgatgtgcggaacgatgagttgtctatctgaagcctccgatcatgcctgggctgcatttgtttgctttttattaagaaggcactgttgtaactgtatgggtataagatgatacatatactgatatacaacacatgtcacagaagggaacgaatctactgataaaccacatgaaaagatcgtttgatttc

SEQ ID NO: 15564 - protein, 263 aa, Triticum aestivum
  peptide (1)..(263): Ceres Seq. ID no. 12618070
  misc_feature (8)..(260): Pfam Name: Pfam Description:  Transcription initiation factor IIF
  misc_feature (1)..(262): NCBI GI NO: 34909946 NR Description: putative transcription initiation factor
  misc_feature (8)..(260): NCBI GI NO: 15222264 NR Description: transcription initiation factor, putative
  misc_feature (62)..(257): NCBI GI NO: 15231173 NR Description: transcription initiation factor IIF
  misc_feature (38)..(257): NCBI GI NO: 11285686 NR Description: hypothetical protein T25B15
  misc_feature (3)..(259): NCBI GI NO: 19111874 NR Description: transcription initiation factor iif, beta subunit
  misc_feature (6)..(252): NCBI GI NO: 450771 NR Description: dTFIIF30
  misc_feature (6)..(252): NCBI GI NO: 24645751 NR Description: Transcription factor TFIIFbeta CG6538-PA
  misc_feature (8)..(252): NCBI GI NO: 39930425 NR Description: general transcription factor IIF, polypeptide 2
  misc_feature (8)..(252): NCBI GI NO: 4758488 NR Description: general transcription factor IIF, polypeptide 2
  misc_feature (8)..(257): NCBI GI NO: 38174399 NR Description: Unknown (protein for MGC:75790)
MGDEAKYLETARADRSVWLMKCPPVVSQAWQGASSSSGDANPNPVVAKVVLSLDPLSSAEPSLQFKMEMSQTSVASTCNLPKSYSLNMFKDFVPMCVFSETNQGKLSCEGKVEHKFDMEPHKDNLLNYAKLCRERTQKSMVKTRKVQVLDNDHGMSMRPMPGMVGLISSSSKEKRKPTPTKPSDVKRTRRDRRELENIIFKLFEKQPNWALKALVQETDQPEQFLKEILNDLCMYNKRGPNQGTHELKPEYKKSSEDAAGAAP

SEQ ID NO: 15565 - protein, 244 aa, Triticum aestivum
  peptide (1)..(244): Ceres Seq. ID no. 12618071
  misc_feature (1)..(241): Pfam Name: Pfam Description:  Transcription initiation factor IIF
  misc_feature (1)..(243): NCBI GI NO: 34909946 NR Description: putative transcription initiation factor
  misc_feature (1)..(241): NCBI GI NO: 15222264 NR Description: transcription initiation factor, putative
  misc_feature (43)..(238): NCBI GI NO: 15231173 NR Description: transcription initiation factor IIF
  misc_feature (19)..(238): NCBI GI NO: 11285686 NR Description: hypothetical protein T25B15
  misc_feature (1)..(240): NCBI GI NO: 19111874 NR Description: transcription initiation factor iif, beta subunit
  misc_feature (1)..(233): NCBI GI NO: 450771 NR Description: dTFIIF30
  misc_feature (1)..(233): NCBI GI NO: 24645751 NR Description: Transcription factor TFIIFbeta CG6538-PA
  misc_feature (1)..(233): NCBI GI NO: 39930425 NR Description: general transcription factor IIF, polypeptide 2
  misc_feature (1)..(233): NCBI GI NO: 4758488 NR Description: general transcription factor IIF, polypeptide 2
  misc_feature (1)..(238): NCBI GI NO: 38174399 NR Description: Unknown (protein for MGC:75790)
MKCPPVVSQAWQGASSSSGDANPNPVVAKVVLSLDPLSSAEPSLQFKMEMSQTSVASTCNLPKSYSLNMFKDFVPMCVFSETNQGKLSCEGKVEHKFDMEPHKDNLLNYAKLCRERTQKSMVKTRKVQVLDNDHGMSMRPMPGMVGLISSSSKEKRKPTPTKPSDVKRTRRDRRELENIIFKLFEKQPNWALKALVQETDQPEQFLKEILNDLCMYNKRGPNQGTHELKPEYKKSSEDAAGAAP

SEQ ID NO: 15566 - protein, 197 aa, Triticum aestivum
  peptide (1)..(197): Ceres Seq. ID no. 12618072
  misc_feature (1)..(194): Pfam Name: Pfam Description:  Transcription initiation factor IIF
  misc_feature (1)..(196): NCBI GI NO: 34909946 NR Description: putative transcription initiation factor
  misc_feature (1)..(194): NCBI GI NO: 15222264 NR Description: transcription initiation factor, putative
  misc_feature (1)..(191): NCBI GI NO: 15231173 NR Description: transcription initiation factor IIF
  misc_feature (1)..(191): NCBI GI NO: 11285686 NR Description: hypothetical protein T25B15
  misc_feature (1)..(193): NCBI GI NO: 19111874 NR Description: transcription initiation factor iif, beta subunit
  misc_feature (1)..(186): NCBI GI NO: 450771 NR Description: dTFIIF30
  misc_feature (1)..(186): NCBI GI NO: 24645751 NR Description: Transcription factor TFIIFbeta CG6538-PA
  misc_feature (1)..(186): NCBI GI NO: 39930425 NR Description: general transcription factor IIF, polypeptide 2
  misc_feature (1)..(186): NCBI GI NO: 4758488 NR Description: general transcription factor IIF, polypeptide 2
  misc_feature (1)..(191): NCBI GI NO: 38174399 NR Description: Unknown (protein for MGC:75790)
MEMSQTSVASTCNLPKSYSLNMFKDFVPMCVFSETNQGKLSCEGKVEHKFDMEPHKDNLLNYAKLCRERTQKSMVKTRKVQVLDNDHGMSMRPMPGMVGLISSSSKEKRKPTPTKPSDVKRTRRDRRELENIIFKLFEKQPNWALKALVQETDQPEQFLKEILNDLCMYNKRGPNQGTHELKPEYKKSSEDAAGAAP

SEQ ID NO: 15567 - DNA, 1004 bp, Triticum aestivum
  misc_feature (1)..(1004): Ceres Seq. ID no. 13598617
ctgtttttccccgtcgtcaacaatatcttctatcccgaaaatcaagctggttttccccttctctcgccaccccttcttctccaccgtccctcccctggagcgagcgagccctcgtctcactccccgcgatggcttcctccactgctctctccccggtggccttcaagtcctccttctcgccgctcccctccagaccagctcgtactaggataaatgtacaaggcgcattctgtttgccatgttccacttggaaaagagctaataatagatcgttccgggtatacagtttatttggaggaaagaaggagaaagatgagaatggtgacgaggcaccatcaaagggaggaatctttggaaacattggaaatatgcaaaacctttatgaaactgtgaagaaggcccaaatggttgtccaagtggaggctgtgcgggtgcaaaaggagcttgcagcgactgagattgagggttattgtgaaggcgaactaatcaaggttacactatctgggaaccaacaacctataaatgttgaaatcacggaagctgcaatggagttgggtgctgaaaaagtctccgagctggtcaatgaagcctacaaggatgcacaccagaggagcgtccaggcaatgaaggaaaggatggctgatctagcgcagagcataggaatgcctgcagggctcggcgacggtctcaagtgataaaaggcctggtacttgaatgctttccaataatgaaagaagcgtctctcaattttgtattctagctgtgtcgggtcatggttaaacccctccgcagcatcggttagctgtgcatgaactgtaactgtggacacctgtttccttgctcatttgcacatcatagttacagcattagttctaatgtgttgttttacaccaaacagatgttgcttttgtgctagtagaccggcagcctggagaacatttgtaaactaataactgcagagtgaaatatgtttacgttgcgaatagagtactctttggttatgg

SEQ ID NO: 15568 - protein, 230 aa, Triticum aestivum
  peptide (1)..(230): Ceres Seq. ID no. 15222384
  misc_feature (130)..(222): Pfam Name: Pfam Description:  Uncharacterised BCR, YbaB family COG0718
  misc_feature (45)..(230): NCBI GI NO: 15234797 NR Description: expressed protein [Arabidopsis thaliana]
  misc_feature (43)..(230): NCBI GI NO: 18400436 NR Description: expressed protein [Arabidopsis thaliana]
  misc_feature (45)..(230): NCBI GI NO: 21553866 NR Description: unknown [Arabidopsis thaliana]
  misc_feature (83)..(230): NCBI GI NO: 25412184 NR Description: hypothetical protein At2g24020
  misc_feature (114)..(222): NCBI GI NO: 28207763 NR Description: CR084 protein [Chlamydomonas reinhardtii]
  misc_feature (117)..(225): NCBI GI NO: 24414799 NR Description: hypothetical protein [Synechococcus sp. PCC 7942]
  misc_feature (113)..(222): NCBI GI NO: 17232559 NR Description: hypothetical protein [Nostoc sp. PCC 7120]
  misc_feature (105)..(222): NCBI GI NO: 23040346 NR Description: hypothetical protein
  misc_feature (110)..(226): NCBI GI NO: 22298265 NR Description: ORF_ID:tlr0723~hypothetical protein
  misc_feature (113)..(222): NCBI GI NO: 23124992 NR Description: hypothetical protein [Nostoc punctiforme]
VFPRRQQYLLSRKSSWFSPSLATPSSPPSLPWSERALVSLPAMASSTALSPVAFKSSFSPLPSRPARTRINVQGAFCLPCSTWKRANNRSFRVYSLFGGKKEKDENGDEAPSKGGIFGNIGNMQNLYETVKKAQMVVQVEAVRVQKELAATEIEGYCEGELIKVTLSGNQQPINVEITEAAMELGAEKVSELVNEAYKDAHQRSVQAMKERMADLAQSIGMPAGLGDGLK

SEQ ID NO: 15569 - protein, 188 aa, Triticum aestivum
  peptide (1)..(188): Ceres Seq. ID no. 15222385
  misc_feature (88)..(180): Pfam Name: Pfam Description:  Uncharacterised BCR, YbaB family COG0718
  misc_feature (3)..(188): NCBI GI NO: 15234797 NR Description: expressed protein [Arabidopsis thaliana]
  misc_feature (1)..(188): NCBI GI NO: 18400436 NR Description: expressed protein [Arabidopsis thaliana]
  misc_feature (3)..(188): NCBI GI NO: 21553866 NR Description: unknown [Arabidopsis thaliana]
  misc_feature (41)..(188): NCBI GI NO: 25412184 NR Description: hypothetical protein At2g24020
  misc_feature (72)..(180): NCBI GI NO: 28207763 NR Description: CR084 protein [Chlamydomonas reinhardtii]
  misc_feature (75)..(183): NCBI GI NO: 24414799 NR Description: hypothetical protein [Synechococcus sp. PCC 7942]
  misc_feature (71)..(180): NCBI GI NO: 17232559 NR Description: hypothetical protein [Nostoc sp. PCC 7120]
  misc_feature (63)..(180): NCBI GI NO: 23040346 NR Description: hypothetical protein
  misc_feature (68)..(184): NCBI GI NO: 22298265 NR Description: ORF_ID:tlr0723~hypothetical protein
  misc_feature (71)..(180): NCBI GI NO: 23124992 NR Description: hypothetical protein [Nostoc punctiforme]
MASSTALSPVAFKSSFSPLPSRPARTRINVQGAFCLPCSTWKRANNRSFRVYSLFGGKKEKDENGDEAPSKGGIFGNIGNMQNLYETVKKAQMVVQVEAVRVQKELAATEIEGYCEGELIKVTLSGNQQPINVEITEAAMELGAEKVSELVNEAYKDAHQRSVQAMKERMADLAQSIGMPAGLGDGLK

SEQ ID NO: 15570 - DNA, 1457 bp, Triticum aestivum
  misc_feature (1)..(1457): Ceres Seq. ID no. 13662804
atccgtccatatatcgcttcttccgccgctccgcttcccttccacgcgcaccaaccgccgcctgctcttcgattcccccgaggccccagcaggagcagcaaccccttcttctgcttcttgttcttggtgcggtgcgcgggcatggccatcgaccacgagtcgcccttcaaggagctccgcctcaagaacaggaggatcatgggaggcggcgcccctgagccggacgaagaggaggcggaggcgcaggtggcggcggcggcgggggaggaggagcagtggccgcagtggctgcgcccgctgctgtccgcgcgcttcttcgcgcaatgcaagacgcacaccgagtcgcaccggagcggcgagtgcaacatgttctgcctcgactgcgccgccggggcggccgccggcgcggcggcgctctgctcgctgtgcctcgcgcacgcgcaccgcggccaccacaccatccagatccgccgctcctcctaccacgacgtcatccgggtgtcggacatccagcgcttcatggacatcgccggcgtgcagacctacgtcatcaacagcgcgcgcgtcgtcttcctcaacgagcgcccccagcagaagcagcccggcaaggccggcggcggcgccggcggcgccaacctctgcgaggtctgcagccgcagcctcctcgacaacttccgcttctgctccctcggctgcaaggtcgccggctgctcctccgacgggggcggcaacgacaaggcgaggatgatgcgggccagcaggcccggccgcgccaagggctcgtcggactccgaggcggcctcctcctcctctcctctgcgcaatgccgccaggcagagcttcacgccgtccacgccgccgccgcctccgcctccagcggccaagcggcgcaagggcatcccgcaccgcgcgccgttcggcaacctcatcatcgactgctaggcgcgcaccaccccgccattgacaaagctgcgacccacacgcccagttgcagagtgaatggagcgagaaagcggccaccacttcggtgcccgccattgccttcggttgtgcttctcgatgtggattccaccattagcttttcagggagaaagcaggcaggcaagaaagggaggtggatggatggaaacacagctgaaaaagcaccagccttttcttactgcttataatcatcatcatcatcactaggacagaaaccaaaaattaccacaccacagagagattactgtatatgattatggccctgctctactatttctaccacactagacttgagttttgtgataaatgttttgaggtaataccaggcaatgcgccagtggtcagctagctagagtaataagcaattgccacttgttaatcaggttttgtgatagcttgtgctttcttcatctgtaaatatggagtgctgggagaggatgactgcttgttagaaaatatggtgttgctcaaccttc

SEQ ID NO: 15571 - protein, 313 aa, Triticum aestivum
  peptide (1)..(313): Ceres Seq. ID no. 13662805
  misc_feature (91)..(300): Pfam Name: Pfam Description:  Protein of unknown function, DUF597
  misc_feature (48)..(312): NCBI GI NO: 37537092 NR Description: unknown protein
  misc_feature (89)..(312): NCBI GI NO: 38346725 NR Description: OSJNBa0086O06.23
  misc_feature (88)..(312): NCBI GI NO: 18398555 NR Description: expressed protein [Arabidopsis thaliana]
  misc_feature (89)..(312): NCBI GI NO: 6714272 NR Description: F6N18.8 [Arabidopsis thaliana]
  misc_feature (88)..(312): NCBI GI NO: 21554139 NR Description: unknown [Arabidopsis thaliana]
  misc_feature (89)..(307): NCBI GI NO: 15236696 NR Description: expressed protein [Arabidopsis thaliana]
  misc_feature (90)..(306): NCBI GI NO: 15237491 NR Description: expressed protein [Arabidopsis thaliana]
  misc_feature (89)..(274): NCBI GI NO: 18394936 NR Description: expressed protein [Arabidopsis thaliana]
  misc_feature (89)..(274): NCBI GI NO: 25337907 NR Description: hypothetical protein F9H16
  misc_feature (260)..(306): NCBI GI NO: 18394936 NR Description: expressed protein [Arabidopsis thaliana]
IRPYIASSAAPLPFHAHQPPPALRFPRGPSRSSNPFFCFLFLVRCAGMAIDHESPFKELRLKNRRIMGGGAPEPDEEEAEAQVAAAAGEEEQWPQWLRPLLSARFFAQCKTHTESHRSGECNMFCLDCAAGAAAGAAALCSLCLAHAHRGHHTIQIRRSSYHDVIRVSDIQRFMDIAGVQTYVINSARVVFLNERPQQKQPGKAGGGAGGANLCEVCSRSLLDNFRFCSLGCKVAGCSSDGGGNDKARMMRASRPGRAKGSSDSEAASSSSPLRNAARQSFTPSTPPPPPPPAAKRRKGIPHRAPFGNLIIDC

SEQ ID NO: 15572 - protein, 281 aa, Triticum aestivum
  peptide (1)..(281): Ceres Seq. ID no. 13662806
MQDAHRVAPERRVQHVLPRLRRRGGRRRGGALLAVPRARAPRPPHHPDPPLLLPRRHPGVGHPALHGHRRRADLRHQQRARRLPQRAPPAEAARQGRRRRRRRQPLRGLQPQPPRQLPLLLPRLQGRRLLLRRGRQRQGEDDAGQQARPRQGLVGLRGGLLLLSSAQCRQAELHAVHAAAASASSGQAAQGHPAPRAVRQPHHRLLGAHHPAIDKAATHTPSCRVNGARKRPPLRCPPLPSVVLLDVDSTISFSGRKQAGKKGRWMDGNTAEKAPAFSYCL

SEQ ID NO: 15573 - protein, 266 aa, Triticum aestivum
  peptide (1)..(266): Ceres Seq. ID no. 13662807
  misc_feature (44)..(253): Pfam Name: Pfam Description:  Protein of unknown function, DUF597
  misc_feature (1)..(265): NCBI GI NO: 37537092 NR Description: unknown protein
  misc_feature (42)..(265): NCBI GI NO: 38346725 NR Description: OSJNBa0086O06.23
  misc_feature (41)..(265): NCBI GI NO: 18398555 NR Description: expressed protein [Arabidopsis thaliana]
  misc_feature (42)..(265): NCBI GI NO: 6714272 NR Description: F6N18.8 [Arabidopsis thaliana]
  misc_feature (41)..(265): NCBI GI NO: 21554139 NR Description: unknown [Arabidopsis thaliana]
  misc_feature (42)..(260): NCBI GI NO: 15236696 NR Description: expressed protein [Arabidopsis thaliana]
  misc_feature (43)..(259): NCBI GI NO: 15237491 NR Description: expressed protein [Arabidopsis thaliana]
  misc_feature (42)..(227): NCBI GI NO: 18394936 NR Description: expressed protein [Arabidopsis thaliana]
  misc_feature (42)..(227): NCBI GI NO: 25337907 NR Description: hypothetical protein F9H16
  misc_feature (213)..(259): NCBI GI NO: 18394936 NR Description: expressed protein [Arabidopsis thaliana]
MAIDHESPFKELRLKNRRIMGGGAPEPDEEEAEAQVAAAAGEEEQWPQWLRPLLSARFFAQCKTHTESHRSGECNMFCLDCAAGAAAGAAALCSLCLAHAHRGHHTIQIRRSSYHDVIRVSDIQRFMDIAGVQTYVINSARVVFLNERPQQKQPGKAGGGAGGANLCEVCSRSLLDNFRFCSLGCKVAGCSSDGGGNDKARMMRASRPGRAKGSSDSEAASSSSPLRNAARQSFTPSTPPPPPPPAAKRRKGIPHRAPFGNLIIDC

SEQ ID NO: 15574 - DNA, 1736 bp, Triticum aestivum
  misc_feature (1)..(1736): Ceres Seq. ID no. 12593464
actgctattgttggccatggccgcctatgctgggctgttgcgcgtcgccctcgtcctcatcgccgccgccgcgacctgggcggcggcgctagacgacccggcggggcttctgcgacgggccaaggaggcggagttcatggactggatggtgggggtgcgccggcggatccacgagaaccctgagctcggctacgaggagtttgacaccagtgagctcgtgcggcgcgagctcgatgccatggggatcccctacaggcatcccttcgcggtcaccggcgtcgtcgccaccgtcggcacaggcggcccgcccttcgtcgcgcttcgggccgacatggacgcgctccctatgcaggaaagcgtggaatgggaacataagagcaaagtgcctgggaagatgcatggatgtggccatgatgcacatgttgctatgctattgggttctgctaagattcttcaggagcaccgtgacgagttgaagggtactgtagcccttcttttccaaccagctgaggaaggtggtggtggagccaagaaaatggtagaagccggagctgtggaaaacatagaggtcatgtttggacttcatgtagctgacagtgtgccgattggtgtgctggcatccagacctgggcctataatggcagggagtggattctttgaggcagtaataagtggaaagggagggcatgctgcacttcctcatcacactattgatccaatactggctgcatccaatgttattgtaagccttcagcaacttgtttcccgagaagctgaccccttggactcacaggtagtaacggttggaaagtttcaaggtggtggagccttcaatgttatccctgattcagtgacaataggtggtaccttccgagcctttatgaaggagagttttaatcaattgaagcagcgaattgaagaggtcatagtcacacaggcatctgtccagcgctgcagcgcagttgtggacttccttgacaaagataagcctttcttccctccaacaatcaacaatcctgagcttcacgatttctttgcgaaggtgtgcagtgagatggttggccccaacaacgtgagagagaagcagccactgatgggtgccgaggacttctccttctacaccgaggccgttcccaagacatactactactttgtggggatgctcaacgagactcgtggaccgcaggcgcctcatcactccccctacttcaccatcaacgaggatgcactgccctacggtgcagccatgcaagcatcgttggctgctcgctatctgcttgagcaccagcccgctaccgctgctaaggtggaacctcgcgacgagctgtagatggtgtccatgttgaatgaaacggtggaaggacaaggacgtgcacagcaattgttggttaaaaagggacgaggacctctgtatcgccaggtgattatgcaactgtttgtacataatttcctgatttcagcgcattccaagcgagcagatgaccttgtgacggcattgaagcactgcgaacatgtgtttctgtggtaggtctcgttcgttttcgcatctgcacttatccgggtctatgtgtaatctttaagtgcagtggtgagacaaaataaaacaccccgtggatgatgaatgtattgggttgttaagagttgggacagacaggaattttatagcatgattccatcctttagtagcaagaaatggtcgaaaatatattccagcaaaaagaaaaaagaaacggttg

SEQ ID NO: 15575 - protein, 442 aa, Triticum aestivum
  peptide (1)..(442): Ceres Seq. ID no. 12593465
  misc_feature (47)..(426): Pfam Name: Pfam Description:  Peptidase family M20/M25/M40
  misc_feature (4)..(442): NCBI GI NO: 34914096 NR Description: putative IAA-Ala hydrolase
  misc_feature (4)..(442): NCBI GI NO: 27948556 NR Description: IAA-amino acid hydrolase
  misc_feature (33)..(442): NCBI GI NO: 15218027 NR Description: IAA-Ala hydrolase (IAR3); protein id: At1g51760
  misc_feature (33)..(442): NCBI GI NO: 2181184 NR Description: JR3 protein [Arabidopsis thaliana]
  misc_feature (33)..(427): NCBI GI NO: 15218029 NR Description: auxin conjugate hydrolase
  misc_feature (15)..(442): NCBI GI NO: 34910396 NR Description: putative IAA-Ala hydrolase
  misc_feature (13)..(427): NCBI GI NO: 902791 NR Description: ILL2
  misc_feature (13)..(427): NCBI GI NO: 15241894 NR Description: IAA-amino acid hydrolase (gb|AAC04866
  misc_feature (13)..(427): NCBI GI NO: 18175667 NR Description: IAA-amino acid hydrolase [Arabidopsis thaliana]
  misc_feature (13)..(425): NCBI GI NO: 15241892 NR Description: IAA-amino acid hydrolase homolog 1 precursor
LLLLAMAAYAGLLRVALVLIAAAATWAAALDDPAGLLRRAKEAEFMDWMVGVRRRIHENPELGYEEFDTSELVRRELDAMGIPYRHPFAVTGVVATVGTGGPPFVALRADMDALPMQESVEWEHKSKVPGKMHGCGHDAHVAMLLGSAKILQEHRDELKGTVALLFQPAEEGGGGAKKMVEAGAVENIEVMFGLHVADSVPIGVLASRPGPIMAGSGFFEAVISGKGGHAALPHHTIDPILAASNVIVSLQQLVSREADPLDSQVVTVGKFQGGGAFNVIPDSVTIGGTFRAFMKESFNQLKQRIEEVIVTQASVQRCSAVVDFLDKDKPFFPPTINNPELHDFFAKVCSEMVGPNNVREKQPLMGAEDFSFYTEAVPKTYYYFVGMLNETRGPQAPHHSPYFTINEDALPYGAAMQASLAARYLLEHQPATAAKVEPRDEL

SEQ ID NO: 15576 - protein, 437 aa, Triticum aestivum
  peptide (1)..(437): Ceres Seq. ID no. 12593466
  misc_feature (42)..(421): Pfam Name: Pfam Description:  Peptidase family M20/M25/M40
  misc_feature (1)..(437): NCBI GI NO: 34914096 NR Description: putative IAA-Ala hydrolase
  misc_feature (1)..(437): NCBI GI NO: 27948556 NR Description: IAA-amino acid hydrolase
  misc_feature (28)..(437): NCBI GI NO: 15218027 NR Description: IAA-Ala hydrolase (IAR3); protein id: At1g51760
  misc_feature (28)..(437): NCBI GI NO: 2181184 NR Description: JR3 protein [Arabidopsis thaliana]
  misc_feature (28)..(422): NCBI GI NO: 15218029 NR Description: auxin conjugate hydrolase
  misc_feature (10)..(437): NCBI GI NO: 34910396 NR Description: putative IAA-Ala hydrolase
  misc_feature (8)..(422): NCBI GI NO: 902791 NR Description: ILL2
  misc_feature (8)..(422): NCBI GI NO: 15241894 NR Description: IAA-amino acid hydrolase (gb|AAC04866
  misc_feature (8)..(422): NCBI GI NO: 18175667 NR Description: IAA-amino acid hydrolase [Arabidopsis thaliana]
  misc_feature (8)..(420): NCBI GI NO: 15241892 NR Description: IAA-amino acid hydrolase homolog 1 precursor
MAAYAGLLRVALVLIAAAATWAAALDDPAGLLRRAKEAEFMDWMVGVRRRIHENPELGYEEFDTSELVRRELDAMGIPYRHPFAVTGVVATVGTGGPPFVALRADMDALPMQESVEWEHKSKVPGKMHGCGHDAHVAMLLGSAKILQEHRDELKGTVALLFQPAEEGGGGAKKMVEAGAVENIEVMFGLHVADSVPIGVLASRPGPIMAGSGFFEAVISGKGGHAALPHHTIDPILAASNVIVSLQQLVSREADPLDSQVVTVGKFQGGGAFNVIPDSVTIGGTFRAFMKESFNQLKQRIEEVIVTQASVQRCSAVVDFLDKDKPFFPPTINNPELHDFFAKVCSEMVGPNNVREKQPLMGAEDFSFYTEAVPKTYYYFVGMLNETRGPQAPHHSPYFTINEDALPYGAAMQASLAARYLLEHQPATAAKVEPRDEL

SEQ ID NO: 15577 - protein, 397 aa, Triticum aestivum
  peptide (1)..(397): Ceres Seq. ID no. 12593467
  misc_feature (2)..(381): Pfam Name: Pfam Description:  Peptidase family M20/M25/M40
  misc_feature (1)..(397): NCBI GI NO: 34914096 NR Description: putative IAA-Ala hydrolase
  misc_feature (1)..(397): NCBI GI NO: 27948556 NR Description: IAA-amino acid hydrolase
  misc_feature (1)..(397): NCBI GI NO: 15218027 NR Description: IAA-Ala hydrolase (IAR3); protein id: At1g51760
  misc_feature (1)..(397): NCBI GI NO: 2181184 NR Description: JR3 protein [Arabidopsis thaliana]
  misc_feature (1)..(382): NCBI GI NO: 15218029 NR Description: auxin conjugate hydrolase
  misc_feature (1)..(397): NCBI GI NO: 34910396 NR Description: putative IAA-Ala hydrolase
  misc_feature (1)..(382): NCBI GI NO: 902791 NR Description: ILL2
  misc_feature (1)..(382): NCBI GI NO: 15241894 NR Description: IAA-amino acid hydrolase (gb|AAC04866
  misc_feature (1)..(382): NCBI GI NO: 18175667 NR Description: IAA-amino acid hydrolase [Arabidopsis thaliana]
  misc_feature (1)..(380): NCBI GI NO: 15241892 NR Description: IAA-amino acid hydrolase homolog 1 precursor
MDWMVGVRRRIHENPELGYEEFDTSELVRRELDAMGIPYRHPFAVTGVVATVGTGGPPFVALRADMDALPMQESVEWEHKSKVPGKMHGCGHDAHVAMLLGSAKILQEHRDELKGTVALLFQPAEEGGGGAKKMVEAGAVENIEVMFGLHVADSVPIGVLASRPGPIMAGSGFFEAVISGKGGHAALPHHTIDPILAASNVIVSLQQLVSREADPLDSQVVTVGKFQGGGAFNVIPDSVTIGGTFRAFMKESFNQLKQRIEEVIVTQASVQRCSAVVDFLDKDKPFFPPTINNPELHDFFAKVCSEMVGPNNVREKQPLMGAEDFSFYTEAVPKTYYYFVGMLNETRGPQAPHHSPYFTINEDALPYGAAMQASLAARYLLEHQPATAAKVEPRDEL

SEQ ID NO: 15578 - DNA, 1489 bp, Triticum aestivum
  misc_feature (1)..(1489): Ceres Seq. ID no. 14302787
aaccaatcacccccatcccccctccatctcgcgtggattaatggatctccgccccgccccgccctgctctctcgcttgctaggaaccgtagctgccgccagcccagcccaccccgcccgattcggagccgcgccgagggagagggagcgacatggggctccgcaggagaggccctctgctgctgctcctcctcctcggcctcgtggtggccacggccgcggcggcggcggacgacgcctccgcctccgagggcgacgccgatccgctctacagagcttgcttcgaagaatgtcaaaggactggcaccctgaaagaggattctattaaacactgtgttgtgccgaccgatgaccagcctgctgacaaggcatggtacgcgcacgagccattgtacctgcagtggaaggagtggaactgcaacagcgaatgccgataccattgtatgatggaaagagagcaggaaagggaagagcttgggctagggcccgtcaagtatcatggcaaatggcctctcaaacgtgcttctgtatttcaggaacctctttctgcagctctgtctgccctgactcttctcgtgcaatttaacggatggctatcgtttttcctcttgctttcttacaagctgcctcttaggccagaaactcatgccacatactacgaatacaccgggttatggcacattaacgcgctcttggccttgaattcatggttctggtgtgccatatatcacagttgtgatactgcttggacagaaaagctgtacctgtcatcagctgctgcttttcttggctactccctcatcttggccatactgcgaacttcgaatctgagggatgaagcttcaagagtgatggttgcagctccaattctggcttttgtgacaacccacattttgtacctcaacttctatgaactcgacaaaggcctgaacatgaaggtttgcactgttattagcgttgctcagctccttctgtggacagtgtgggctgctatcacaaggcatccttcacgcctgaaggtcgtctttgttgccatcggcggtgtcctctcactatacctggaagcccatgatgtccctccgcgatggggatatgttgatggacacgcaatctgcctcgccatggctatccccctgtcatacctctggtggagcttcgccaaggaagacgctgagatgcgcacggcggcaattatgaagaagaaacgataacgggcttcgccagaccaaatacttccatctttggtggcgaatctgtgaaaacttgtctccactcatccaatgtaaagatgagtttttcattgtaaatttaggagatctcgtatgtgaattactgttttttccatgctactttttgcctcagctcaggaggtttacatggtttgaaacttgtgatagccctttgtatttctctcatttacaagccaattgagtgtgtgctaggtttgttttcatctcttttagatgcacttactggaagcagttctgatc

SEQ ID NO: 15579 - protein, 352 aa, Triticum aestivum
  peptide (1)..(352): Ceres Seq. ID no. 14302788
  misc_feature (77)..(348): Pfam Name: Pfam Description:  Per1-like
  misc_feature (13)..(352): NCBI GI NO: 37536224 NR Description: unknown protein
  misc_feature (29)..(352): NCBI GI NO: 15219283 NR Description: expressed protein [Arabidopsis thaliana]
  misc_feature (17)..(352): NCBI GI NO: 18424554 NR Description: expressed protein [Arabidopsis thaliana]
  misc_feature (78)..(352): NCBI GI NO: 10176931 NR Description: gene_id:MTG10.16~unknown protein
  misc_feature (46)..(194): NCBI GI NO: 20260110 NR Description: unknown protein [Arabidopsis thaliana]
  misc_feature (54)..(340): NCBI GI NO: 32949296 NR Description: CAB2 protein [Homo sapiens]
  misc_feature (17)..(340): NCBI GI NO: 28372501 NR Description: CAB2 [Homo sapiens]
  misc_feature (12)..(341): NCBI GI NO: 32418510 NR Description: hypothetical protein [Neurospora crassa]
  misc_feature (21)..(335): NCBI GI NO: 19114746 NR Description: similar to yeast protein involved in Mn2+homeostasis
  misc_feature (86)..(339): NCBI GI NO: 19921698 NR Description: CG3271-PB [Drosophila melanogaster]
MGLRRRGPLLLLLLLGLVVATAAAAADDASASEGDADPLYRACFEECQRTGTLKEDSIKHCVVPTDDQPADKAWYAHEPLYLQWKEWNCNSECRYHCMMEREQEREELGLGPVKYHGKWPLKRASVFQEPLSAALSALTLLVQFNGWLSFFLLLSYKLPLRPETHATYYEYTGLWHINALLALNSWFWCAIYHSCDTAWTEKLYLSSAAAFLGYSLILAILRTSNLRDEASRVMVAAPILAFVTTHILYLNFYELDKGLNMKVCTVISVAQLLLWTVWAAITRHPSRLKVVFVAIGGVLSLYLEAHDVPPRWGYVDGHAICLAMAIPLSYLWWSFAKEDAEMRTAAIMKKKR

SEQ ID NO: 15580 - protein, 255 aa, Triticum aestivum
  peptide (1)..(255): Ceres Seq. ID no. 14302789
  misc_feature (1)..(251): Pfam Name: Pfam Description:  Per1-like
  misc_feature (1)..(255): NCBI GI NO: 37536224 NR Description: unknown protein
  misc_feature (1)..(255): NCBI GI NO: 15219283 NR Description: expressed protein [Arabidopsis thaliana]
  misc_feature (1)..(255): NCBI GI NO: 18424554 NR Description: expressed protein [Arabidopsis thaliana]
  misc_feature (1)..(255): NCBI GI NO: 10176931 NR Description: gene_id:MTG10.16~unknown protein
  misc_feature (1)..(97): NCBI GI NO: 20260110 NR Description: unknown protein [Arabidopsis thaliana]
  misc_feature (1)..(243): NCBI GI NO: 32949296 NR Description: CAB2 protein [Homo sapiens]
  misc_feature (1)..(243): NCBI GI NO: 28372501 NR Description: CAB2 [Homo sapiens]
  misc_feature (1)..(244): NCBI GI NO: 32418510 NR Description: hypothetical protein [Neurospora crassa]
  misc_feature (1)..(238): NCBI GI NO: 19114746 NR Description: similar to yeast protein involved in Mn2+homeostasis
  misc_feature (1)..(242): NCBI GI NO: 19921698 NR Description: CG3271-PB [Drosophila melanogaster]
MMEREQEREELGLGPVKYHGKWPLKRASVFQEPLSAALSALTLLVQFNGWLSFFLLLSYKLPLRPETHATYYEYTGLWHINALLALNSWFWCAIYHSCDTAWTEKLYLSSAAAFLGYSLILAILRTSNLRDEASRVMVAAPILAFVTTHILYLNFYELDKGLNMKVCTVISVAQLLLWTVWAAITRHPSRLKVVFVAIGGVLSLYLEAHDVPPRWGYVDGHAICLAMAIPLSYLWWSFAKEDAEMRTAAIMKKKR

SEQ ID NO: 15581 - protein, 254 aa, Triticum aestivum
  peptide (1)..(254): Ceres Seq. ID no. 14302790
  misc_feature (1)..(250): Pfam Name: Pfam Description:  Per1-like
  misc_feature (1)..(254): NCBI GI NO: 37536224 NR Description: unknown protein
  misc_feature (1)..(254): NCBI GI NO: 15219283 NR Description: expressed protein [Arabidopsis thaliana]
  misc_feature (1)..(254): NCBI GI NO: 18424554 NR Description: expressed protein [Arabidopsis thaliana]
  misc_feature (1)..(254): NCBI GI NO: 10176931 NR Description: gene_id:MTG10.16~unknown protein
  misc_feature (1)..(96): NCBI GI NO: 20260110 NR Description: unknown protein [Arabidopsis thaliana]
  misc_feature (1)..(242): NCBI GI NO: 32949296 NR Description: CAB2 protein [Homo sapiens]
  misc_feature (1)..(242): NCBI GI NO: 28372501 NR Description: CAB2 [Homo sapiens]
  misc_feature (1)..(243): NCBI GI NO: 32418510 NR Description: hypothetical protein [Neurospora crassa]
  misc_feature (1)..(237): NCBI GI NO: 19114746 NR Description: similar to yeast protein involved in Mn2+homeostasis
  misc_feature (1)..(241): NCBI GI NO: 19921698 NR Description: CG3271-PB [Drosophila melanogaster]
MEREQEREELGLGPVKYHGKWPLKRASVFQEPLSAALSALTLLVQFNGWLSFFLLLSYKLPLRPETHATYYEYTGLWHINALLALNSWFWCAIYHSCDTAWTEKLYLSSAAAFLGYSLILAILRTSNLRDEASRVMVAAPILAFVTTHILYLNFYELDKGLNMKVCTVISVAQLLLWTVWAAITRHPSRLKVVFVAIGGVLSLYLEAHDVPPRWGYVDGHAICLAMAIPLSYLWWSFAKEDAEMRTAAIMKKKR

SEQ ID NO: 15582 - DNA, 1465 bp, Triticum aestivum
  misc_feature (1)..(1465): Ceres Seq. ID no. 13503573
aatacatacgggagcgcaaaatccccaacgaaacagggctgacagcgcgagatcgggcagagagagcgcgacagatggcgatcggcggcgttggcgctgggggcggggctgggggcgccgaggcgcaggggaggagcgtgctggtgacgggcggcgcggggttcatcggcacccacaccgtgctgcagctgctggagaagggctacgccgtcaccgtggtggataacttccacaactccgtccccgaggcgctcgaccgcgtccgccacatcgtcggccccgccctctccgcccgcctccaattcatcttcggggacctgacgatcaaggatgacctcgagaaggtgttcgccgccaagaggtacgacgccgtgatacacttcgccgggctgaaggcggtggcggagagcgtggcgcacccggagatgtacaaccgcaacaacatcgtcggcaccgtcaacctatacgacgtcatgaagaagcacggatgcaacaagttggtgttctcgtcgtcggcgaccgtgtacggccagccggagaaggtgccctgcttcgaggactcccccctcaaggccctcaacccgtacggcaggaccaagctgtacctggaggagatgctgcgcgactaccagcacgcgaacccggagtggaggacgatcctgctgcgctacttcaaccccatcggcgcccacgagagcggcgacatcggggaggaccccaagggcgtccccaacaacctgctcccctacatccagcaggtggccgtcggccgccgccccgagctcaacgtctacggccacgactaccgcacccgggacggcaccgccgtcagggactacatccacgtggtcgacctcgccgacggccacatcgcggcgctcgagaagctcttcgccacccctgacatcggctgtgtggcgtacaacctggggacggggcgcgggacgacggtgctggagatggtgagcgcgttcgagaaggcatacggcaagaaaatcccggtgaagatgtgccccaggaggccgggcgattcggagcaggtgtacgcgtccaccgccaaggccgaagaggagctcggctggagggccaagtacgggatcgaggagatgtgcagggaccagtggaactgggccaagaagaacccctatggctactgcggaaacgctgaaaacaaagactgattcggtggcccatcgggagccttgtagcgtgaaagaaagatgttgtcaataagcccagggcgttaaagtgtgcccagaaaatgtttcctgttgtagtattattcgtaagatggaacttgagttgggtgggttagactggactctcactcggccgggctggtgcttgccacagaattttggtctggtttcaaacatgggtcgtcatctgcttccttcttttttccttccaattatagagcgagaccgatgaagcgaatcattacaaactttttactgcttgcggg

SEQ ID NO: 15583 - protein, 392 aa, Triticum aestivum
  peptide (1)..(392): Ceres Seq. ID no. 15223239
  misc_feature (46)..(381): Pfam Name: Pfam Description:  NAD dependent epimerase/dehydratase family
  misc_feature (30)..(389): NCBI GI NO: 26106014 NR Description: putative UDP-glucose 4-epimerase
  misc_feature (41)..(386): NCBI GI NO: 11386762 NR Description: UDP-glucose 4-epimerase
  misc_feature (44)..(384): NCBI GI NO: 15222072 NR Description: UDP-glucose 4-epimerase
  misc_feature (44)..(384): NCBI GI NO: 2129759 NR Description: UDPglucose 4-epimerase (EC 5
  misc_feature (44)..(384): NCBI GI NO: 18407751 NR Description: UDP-glucose 4-epimerase
  misc_feature (44)..(384): NCBI GI NO: 25292327 NR Description: hypothetical protein F16M19.8
  misc_feature (41)..(386): NCBI GI NO: 11386774 NR Description: UDP-glucose 4-epimerase GEPI42
  misc_feature (44)..(392): NCBI GI NO: 11386775 NR Description: UDP-glucose 4-epimerase GEPI48
  misc_feature (44)..(390): NCBI GI NO: 12643850 NR Description: Probable UDP-glucose 4-epimerase At4g10960
  misc_feature (44)..(390): NCBI GI NO: 15236988 NR Description: UDP-glucose 4-epimerase
YIRERKIPNETGLTARDRAERARQMAIGGVGAGGGAGGAEAQGRSVLVTGGAGFIGTHTVLQLLEKGYAVTVVDNFHNSVPEALDRVRHIVGPALSARLQFIFGDLTIKDDLEKVFAAKRYDAVIHFAGLKAVAESVAHPEMYNRNNIVGTVNLYDVMKKHGCNKLVFSSSATVYGQPEKVPCFEDSPLKALNPYGRTKLYLEEMLRDYQHANPEWRTILLRYFNPIGAHESGDIGEDPKGVPNNLLPYIQQVAVGRRPELNVYGHDYRTRDGTAVRDYIHVVDLADGHIAALEKLFATPDIGCVAYNLGTGRGTTVLEMVSAFEKAYGKKIPVKMCPRRPGDSEQVYASTAKAEEELGWRAKYGIEEMCRDQWNWAKKNPYGYCGNAENKD

SEQ ID NO: 15584 - protein, 368 aa, Triticum aestivum
  peptide (1)..(368): Ceres Seq. ID no. 15223240
  misc_feature (22)..(357): Pfam Name: Pfam Description:  NAD dependent epimerase/dehydratase family
  misc_feature (6)..(365): NCBI GI NO: 26106014 NR Description: putative UDP-glucose 4-epimerase
  misc_feature (17)..(362): NCBI GI NO: 11386762 NR Description: UDP-glucose 4-epimerase
  misc_feature (20)..(360): NCBI GI NO: 15222072 NR Description: UDP-glucose 4-epimerase
  misc_feature (20)..(360): NCBI GI NO: 2129759 NR Description: UDPglucose 4-epimerase (EC 5
  misc_feature (20)..(360): NCBI GI NO: 18407751 NR Description: UDP-glucose 4-epimerase
  misc_feature (20)..(360): NCBI GI NO: 25292327 NR Description: hypothetical protein F16M19.8
  misc_feature (17)..(362): NCBI GI NO: 11386774 NR Description: UDP-glucose 4-epimerase GEPI42
  misc_feature (20)..(368): NCBI GI NO: 11386775 NR Description: UDP-glucose 4-epimerase GEPI48
  misc_feature (20)..(366): NCBI GI NO: 12643850 NR Description: Probable UDP-glucose 4-epimerase At4g10960
  misc_feature (20)..(366): NCBI GI NO: 15236988 NR Description: UDP-glucose 4-epimerase
MAIGGVGAGGGAGGAEAQGRSVLVTGGAGFIGTHTVLQLLEKGYAVTVVDNFHNSVPEALDRVRHIVGPALSARLQFIFGDLTIKDDLEKVFAAKRYDAVIHFAGLKAVAESVAHPEMYNRNNIVGTVNLYDVMKKHGCNKLVFSSSATVYGQPEKVPCFEDSPLKALNPYGRTKLYLEEMLRDYQHANPEWRTILLRYFNPIGAHESGDIGEDPKGVPNNLLPYIQQVAVGRRPELNVYGHDYRTRDGTAVRDYIHVVDLADGHIAALEKLFATPDIGCVAYNLGTGRGTTVLEMVSAFEKAYGKKIPVKMCPRRPGDSEQVYASTAKAEEELGWRAKYGIEEMCRDQWNWAKKNPYGYCGNAENKD

SEQ ID NO: 15585 - protein, 251 aa, Triticum aestivum
  peptide (1)..(251): Ceres Seq. ID no. 15223241
  misc_feature (1)..(240): Pfam Name: Pfam Description:  NAD dependent epimerase/dehydratase family
  misc_feature (1)..(248): NCBI GI NO: 26106014 NR Description: putative UDP-glucose 4-epimerase
  misc_feature (1)..(245): NCBI GI NO: 11386762 NR Description: UDP-glucose 4-epimerase
  misc_feature (1)..(243): NCBI GI NO: 15222072 NR Description: UDP-glucose 4-epimerase
  misc_feature (1)..(243): NCBI GI NO: 2129759 NR Description: UDPglucose 4-epimerase (EC 5
  misc_feature (1)..(243): NCBI GI NO: 18407751 NR Description: UDP-glucose 4-epimerase
  misc_feature (1)..(243): NCBI GI NO: 25292327 NR Description: hypothetical protein F16M19.8
  misc_feature (1)..(245): NCBI GI NO: 11386774 NR Description: UDP-glucose 4-epimerase GEPI42
  misc_feature (1)..(251): NCBI GI NO: 11386775 NR Description: UDP-glucose 4-epimerase GEPI48
  misc_feature (1)..(249): NCBI GI NO: 12643850 NR Description: Probable UDP-glucose 4-epimerase At4g10960
  misc_feature (1)..(249): NCBI GI NO: 15236988 NR Description: UDP-glucose 4-epimerase
MYNRNNIVGTVNLYDVMKKHGCNKLVFSSSATVYGQPEKVPCFEDSPLKALNPYGRTKLYLEEMLRDYQHANPEWRTILLRYFNPIGAHESGDIGEDPKGVPNNLLPYIQQVAVGRRPELNVYGHDYRTRDGTAVRDYIHVVDLADGHIAALEKLFATPDIGCVAYNLGTGRGTTVLEMVSAFEKAYGKKIPVKMCPRRPGDSEQVYASTAKAEEELGWRAKYGIEEMCRDQWNWAKKNPYGYCGNAENKD

SEQ ID NO: 15586 - DNA, 1422 bp, Triticum aestivum
  misc_feature (1)..(1422): Ceres Seq. ID no. 13591068
ctagaacatcctaatcgaaaaatatatctacccgtagcgtgcccacgaaccacaccacagcacaccaaccgcgcgccactgatccatcaactccactccactagctacgtaccttccgaccgagcagccagagagatggagaggatggtgatgaggctggtgaggaacaagcagtccctccgccagctgcaaggggccgccgccggcggcctagcgtcgtcgtcctccgcctcctcgaccgccggcgccgccgcgtcctccttctccaccctgcagcagcagcaggaggaccaccccggagtgctcaacatcagggacaccgccgcccacctcatcggccggacgccgctggtgtacctgaacaaggtgacggaggggtgcggcgcccgcgtcgccgccaagctcgagttcctccagccttccttcagcgtcaaggacaggccagcaatctccatgatcgaagacgcggagaagaaggggctgataaccccaggcaagacgacgctgatcgagcccacatccgggaacatgggcatcggcctggcgttcatggcagcactcaaagggtacgagctcgtgctgacgatgccatcatacaccagcctcgagaggagggtggtcatgaaggccttcggtgcgcagctcgtgctcactgacccggccaaggggatgggaggcaccgtcaggaaagcaacccagctctatgagaaccatcccagcgccttcatgctccagcagttcgagaatcccgccaacgtccaggtgcactacgagactaccggtccggagatatgggaggacacgctcgggcaggtcgacatcttcgtcatgggaatcggcagcggcggcaccgtcaccggcgtcggcaagtacctcaaggagaagaaccccaacgcaaagatctatggagttgaacctgccgaagcaaatgtcctgaacggtggcaagccagggcctcacctcatcactggaaatggagttggatttaagccagatattttggatatggatataatggagaaggttctagaggtgaaaagcgaggacgccgttacgatggcgcaacagttggcactgcaggagggcctgctggtggggatatcatcaggagccaacacagtggctgcgatcgaactcgcaaagaggccagaaaacaaagggaagctcatcgtgactgttcatccgagcgcgggagagcgatacttatcgtcggcgctattcgagggtctgaggaaggaggctgaggcaatgcagccagtgccagtggactaagttggagctatacaatgcatgtagaataaattcactgcaaccatgttgcaagtgctagtcatacctcatttgtgattcttcagtttgttcatcatgtggaagtcgtgtaaacaacagttcaaatggttgaaaaaaggactttacctctcc

SEQ ID NO: 15587 - protein, 423 aa, Triticum aestivum
  peptide (1)..(423): Ceres Seq. ID no. 13591069
  misc_feature (108)..(396): Pfam Name: Pfam Description:  Pyridoxal-phosphate dependent enzyme
  misc_feature (46)..(423): NCBI GI NO: 10241630 NR Description: cysteine synthase
  misc_feature (46)..(423): NCBI GI NO: 38346461 NR Description: OSJNBa0019G23.9
  misc_feature (103)..(423): NCBI GI NO: 1071913 NR Description: cysteine synthase (EC 4
  misc_feature (87)..(423): NCBI GI NO: 30840956 NR Description: beta-cyanoalanine synthase [Betula pendula]
  misc_feature (86)..(423): NCBI GI NO: 11559260 NR Description: beta-cyanoalanine synthase [Solanum tuberosum]
  misc_feature (79)..(423): NCBI GI NO: 15233111 NR Description: cysteine synthase
  misc_feature (103)..(423): NCBI GI NO: 11995005 NR Description: beta-cyanoalanine synthase like protein
  misc_feature (102)..(419): NCBI GI NO: 12081919 NR Description: plastidic cysteine synthase 1 [Solanum tuberosum]
  misc_feature (56)..(419): NCBI GI NO: 303902 NR Description: cysteine synthase [Spinacia oleracea]
  misc_feature (56)..(419): NCBI GI NO: 12644209 NR Description: CYSTEINE SYNTHASE, CHLOROPLAST PRECURSOR
LEHPNRKIYLPVACPRTTPQHTNRAPLIHQLHSTSYVPSDRAAREMERMVMRLVRNKQSLRQLQGAAAGGLASSSSASSTAGAAASSFSTLQQQQEDHPGVLNIRDTAAHLIGRTPLVYLNKVTEGCGARVAAKLEFLQPSFSVKDRPAISMIEDAEKKGLITPGKTTLIEPTSGNMGIGLAFMAALKGYELVLTMPSYTSLERRVVMKAFGAQLVLTDPAKGMGGTVRKATQLYENHPSAFMLQQFENPANVQVHYETTGPEIWEDTLGQVDIFVMGIGSGGTVTGVGKYLKEKNPNAKIYGVEPAEANVLNGGKPGPHLITGNGVGFKPDILDMDIMEKVLEVKSEDAVTMAQQLALQEGLLVGISSGANTVAAIELAKRPENKGKLIVTVHPSAGERYLSSALFEGLRKEAEAMQPVPVD

SEQ ID NO: 15588 - protein, 378 aa, Triticum aestivum
  peptide (1)..(378): Ceres Seq. ID no. 13591070
  misc_feature (63)..(351): Pfam Name: Pfam Description:  Pyridoxal-phosphate dependent enzyme
  misc_feature (1)..(378): NCBI GI NO: 10241630 NR Description: cysteine synthase
  misc_feature (1)..(378): NCBI GI NO: 38346461 NR Description: OSJNBa0019G23.9
  misc_feature (58)..(378): NCBI GI NO: 1071913 NR Description: cysteine synthase (EC 4
  misc_feature (42)..(378): NCBI GI NO: 30840956 NR Description: beta-cyanoalanine synthase [Betula pendula]
  misc_feature (41)..(378): NCBI GI NO: 11559260 NR Description: beta-cyanoalanine synthase [Solanum tuberosum]
  misc_feature (34)..(378): NCBI GI NO: 15233111 NR Description: cysteine synthase
  misc_feature (58)..(378): NCBI GI NO: 11995005 NR Description: beta-cyanoalanine synthase like protein
  misc_feature (57)..(374): NCBI GI NO: 12081919 NR Description: plastidic cysteine synthase 1 [Solanum tuberosum]
  misc_feature (11)..(374): NCBI GI NO: 303902 NR Description: cysteine synthase [Spinacia oleracea]
  misc_feature (11)..(374): NCBI GI NO: 12644209 NR Description: CYSTEINE SYNTHASE, CHLOROPLAST PRECURSOR
MERMVMRLVRNKQSLRQLQGAAAGGLASSSSASSTAGAAASSFSTLQQQQEDHPGVLNIRDTAAHLIGRTPLVYLNKVTEGCGARVAAKLEFLQPSFSVKDRPAISMIEDAEKKGLITPGKTTLIEPTSGNMGIGLAFMAALKGYELVLTMPSYTSLERRVVMKAFGAQLVLTDPAKGMGGTVRKATQLYENHPSAFMLQQFENPANVQVHYETTGPEIWEDTLGQVDIFVMGIGSGGTVTGVGKYLKEKNPNAKIYGVEPAEANVLNGGKPGPHLITGNGVGFKPDILDMDIMEKVLEVKSEDAVTMAQQLALQEGLLVGISSGANTVAAIELAKRPENKGKLIVTVHPSAGERYLSSALFEGLRKEAEAMQPVPVD

SEQ ID NO: 15589 - protein, 375 aa, Triticum aestivum
  peptide (1)..(375): Ceres Seq. ID no. 13591071
  misc_feature (60)..(348): Pfam Name: Pfam Description:  Pyridoxal-phosphate dependent enzyme
  misc_feature (1)..(375): NCBI GI NO: 10241630 NR Description: cysteine synthase
  misc_feature (1)..(375): NCBI GI NO: 38346461 NR Description: OSJNBa0019G23.9
  misc_feature (55)..(375): NCBI GI NO: 1071913 NR Description: cysteine synthase (EC 4
  misc_feature (39)..(375): NCBI GI NO: 30840956 NR Description: beta-cyanoalanine synthase [Betula pendula]
  misc_feature (38)..(375): NCBI GI NO: 11559260 NR Description: beta-cyanoalanine synthase [Solanum tuberosum]
  misc_feature (31)..(375): NCBI GI NO: 15233111 NR Description: cysteine synthase
  misc_feature (55)..(375): NCBI GI NO: 11995005 NR Description: beta-cyanoalanine synthase like protein
  misc_feature (54)..(371): NCBI GI NO: 12081919 NR Description: plastidic cysteine synthase 1 [Solanum tuberosum]
  misc_feature (8)..(371): NCBI GI NO: 303902 NR Description: cysteine synthase [Spinacia oleracea]
  misc_feature (8)..(371): NCBI GI NO: 12644209 NR Description: CYSTEINE SYNTHASE, CHLOROPLAST PRECURSOR
MVMRLVRNKQSLRQLQGAAAGGLASSSSASSTAGAAASSFSTLQQQQEDHPGVLNIRDTAAHLIGRTPLVYLNKVTEGCGARVAAKLEFLQPSFSVKDRPAISMIEDAEKKGLITPGKTTLIEPTSGNMGIGLAFMAALKGYELVLTMPSYTSLERRVVMKAFGAQLVLTDPAKGMGGTVRKATQLYENHPSAFMLQQFENPANVQVHYETTGPEIWEDTLGQVDIFVMGIGSGGTVTGVGKYLKEKNPNAKIYGVEPAEANVLNGGKPGPHLITGNGVGFKPDILDMDIMEKVLEVKSEDAVTMAQQLALQEGLLVGISSGANTVAAIELAKRPENKGKLIVTVHPSAGERYLSSALFEGLRKEAEAMQPVPVD

SEQ ID NO: 15590 - DNA, 1454 bp, Triticum aestivum
  misc_feature (1)..(1454): Ceres Seq. ID no. 13598618
aaaaaccgtgcctttccaatcccccggatccagtctcgctcccagcacaagtcctcccacccagccgctgcccggggcggcaatccgtcgagcaccagccgcgcgcgcgctccactccgctgcgcctgcggccgccgccgtccatggcgtccgccgcgcgggctctgggcgcgctcctccacagggcctcgtcgctttcgtcctccgcctctgctctcaggagcgcctcccttgtacacaggaatagcccaactggtggcgccagcttgttccaggggcacgtggctaggcggaggatttggacgttccagccgctctgtatggggcggcgctcctgcaagatcgccgggaggaagggtgctcagaatttgaaaaagatgaagcgcaacagcaaaatcggaaaagaaatcgttgctgccatcaagaagggtggtccaagtccttcgtccaacacagctttagcagcgatactagagaaagtaagagagcttgatgtccccaaggaagttgttgagcgtaacatcaaaagagcttcagaaaagggtcaagatacttacacagaaaagatttatgaggtctatggttttggtggagtaggtatggtcgttgaggtccttacagacaaaattacaagatctattgcggatattagaaatgttgtaaaagactgtggagcaaaattggctgatcctggatctgttacattcagattcagacaagctcgagtggttaacataaaagttacagatgccgataaggaccaactactctctgttgctttggatgctggcgccgatgatgttattgaaccaaattttgatgatgaagatgactctgaagaggttctagagaggttttacaagatagttactacatctgaaaactatcctgttgtgctatcaaagctacaagaggaagggctgaaatttgaaacggataacggttatgaactgctgcctctcaatccgattgaggtggatgacgaggccatggaacttaacaaggaccttgtattgaagttgcttgaattggatgatgttgatgctgtctacacagaccagaagtgagccaatttggaacccacaggctctctcagctctcaagacgctgctcgatgactccatttgggtagggcttgttttcaacttcgtgtccattaaggatttcttatcagcactgtttgcgccgattacgaagcctgcactcgtaacatcagcttcaagtgtccaaaatgaaaattggtgaacgcagcagtttccttttgggggtacttttccccacattctgccgtctcatagttttttaccttacgtttgttgtccctgatctcttcaccttgtccgtgtctcagtgagctgctagacgctgctcatataacgaatgttgtagctgcatcttttcatgtgattgtaagcaatacaagtaaaactgacctatgcatggactttggagtc

SEQ ID NO: 15591 - protein, 354 aa, Triticum aestivum
  peptide (1)..(354): Ceres Seq. ID no. 13598619
  misc_feature (109)..(354): Pfam Name: Pfam Description:  Domain of unknown function DUF28
  misc_feature (63)..(354): NCBI GI NO: 18400953 NR Description: expressed protein [Arabidopsis thaliana]
  misc_feature (63)..(354): NCBI GI NO: 15810383 NR Description: unknown protein [Arabidopsis thaliana]
  misc_feature (63)..(354): NCBI GI NO: 25407817 NR Description: hypothetical protein At2g25830
  misc_feature (117)..(350): NCBI GI NO: 15835357 NR Description: conserved hypothetical protein
  misc_feature (117)..(350): NCBI GI NO: 15618484 NR Description: YebC family hypothetical protein
  misc_feature (117)..(350): NCBI GI NO: 29839936 NR Description: conserved hypothetical protein TIGR01033
  misc_feature (117)..(350): NCBI GI NO: 15605184 NR Description: YebC family [Chlamydia trachomatis]
  misc_feature (114)..(351): NCBI GI NO: 23002536 NR Description: hypothetical protein [Lactobacillus gasseri]
  misc_feature (114)..(351): NCBI GI NO: 23024593 NR Description: hypothetical protein
  misc_feature (114)..(350): NCBI GI NO: 28378848 NR Description: unknown [Lactobacillus plantarum WCFS1]
KPCLSNPPDPVSLPAQVLPPSRCPGRQSVEHQPRARSTPLRLRPPPSMASAARALGALLHRASSLSSSASALRSASLVHRNSPTGGASLFQGHVARRRIWTFQPLCMGRRSCKIAGRKGAQNLKKMKRNSKIGKEIVAAIKKGGPSPSSNTALAAILEKVRELDVPKEVVERNIKRASEKGQDTYTEKIYEVYGFGGVGMVVEVLTDKITRSIADIRNVVKDCGAKLADPGSVTFRFRQARVVNIKVTDADKDQLLSVALDAGADDVIEPNFDDEDDSEEVLERFYKIVTTSENYPVVLSKLQEEGLKFETDNGYELLPLNPIEVDDEAMELNKDLVLKLLELDDVDAVYTDQK

SEQ ID NO: 15592 - protein, 307 aa, Triticum aestivum
  peptide (1)..(307): Ceres Seq. ID no. 13598620
  misc_feature (62)..(307): Pfam Name: Pfam Description:  Domain of unknown function DUF28
  misc_feature (16)..(307): NCBI GI NO: 18400953 NR Description: expressed protein [Arabidopsis thaliana]
  misc_feature (16)..(307): NCBI GI NO: 15810383 NR Description: unknown protein [Arabidopsis thaliana]
  misc_feature (16)..(307): NCBI GI NO: 25407817 NR Description: hypothetical protein At2g25830
  misc_feature (70)..(303): NCBI GI NO: 15835357 NR Description: conserved hypothetical protein
  misc_feature (70)..(303): NCBI GI NO: 15618484 NR Description: YebC family hypothetical protein
  misc_feature (70)..(303): NCBI GI NO: 29839936 NR Description: conserved hypothetical protein TIGR01033
  misc_feature (70)..(303): NCBI GI NO: 15605184 NR Description: YebC family [Chlamydia trachomatis]
  misc_feature (67)..(304): NCBI GI NO: 23002536 NR Description: hypothetical protein [Lactobacillus gasseri]
  misc_feature (67)..(304): NCBI GI NO: 23024593 NR Description: hypothetical protein
  misc_feature (67)..(303): NCBI GI NO: 28378848 NR Description: unknown [Lactobacillus plantarum WCFS1]
MASAARALGALLHRASSLSSSASALRSASLVHRNSPTGGASLFQGHVARRRIWTFQPLCMGRRSCKIAGRKGAQNLKKMKRNSKIGKEIVAAIKKGGPSPSSNTALAAILEKVRELDVPKEVVERNIKRASEKGQDTYTEKIYEVYGFGGVGMVVEVLTDKITRSIADIRNVVKDCGAKLADPGSVTFRFRQARVVNIKVTDADKDQLLSVALDAGADDVIEPNFDDEDDSEEVLERFYKIVTTSENYPVVLSKLQEEGLKFETDNGYELLPLNPIEVDDEAMELNKDLVLKLLELDDVDAVYTDQK

SEQ ID NO: 15593 - protein, 248 aa, Triticum aestivum
  peptide (1)..(248): Ceres Seq. ID no. 13598621
  misc_feature (3)..(248): Pfam Name: Pfam Description:  Domain of unknown function DUF28
  misc_feature (1)..(248): NCBI GI NO: 18400953 NR Description: expressed protein [Arabidopsis thaliana]
  misc_feature (1)..(248): NCBI GI NO: 15810383 NR Description: unknown protein [Arabidopsis thaliana]
  misc_feature (1)..(248): NCBI GI NO: 25407817 NR Description: hypothetical protein At2g25830
  misc_feature (11)..(244): NCBI GI NO: 15835357 NR Description: conserved hypothetical protein
  misc_feature (11)..(244): NCBI GI NO: 15618484 NR Description: YebC family hypothetical protein
  misc_feature (11)..(244): NCBI GI NO: 29839936 NR Description: conserved hypothetical protein TIGR01033
  misc_feature (11)..(244): NCBI GI NO: 15605184 NR Description: YebC family [Chlamydia trachomatis]
  misc_feature (8)..(245): NCBI GI NO: 23002536 NR Description: hypothetical protein [Lactobacillus gasseri]
  misc_feature (8)..(245): NCBI GI NO: 23024593 NR Description: hypothetical protein
  misc_feature (8)..(244): NCBI GI NO: 28378848 NR Description: unknown [Lactobacillus plantarum WCFS1]
MGRRSCKIAGRKGAQNLKKMKRNSKIGKEIVAAIKKGGPSPSSNTALAAILEKVRELDVPKEVVERNIKRASEKGQDTYTEKIYEVYGFGGVGMVVEVLTDKITRSIADIRNVVKDCGAKLADPGSVTFRFRQARVVNIKVTDADKDQLLSVALDAGADDVIEPNFDDEDDSEEVLERFYKIVTTSENYPVVLSKLQEEGLKFETDNGYELLPLNPIEVDDEAMELNKDLVLKLLELDDVDAVYTDQK

SEQ ID NO: 15594 - DNA, 934 bp, Triticum aestivum
  misc_feature (1)..(934): Ceres Seq. ID no. 15178542
gaaactcgaagctcttccgcgcccccgctcgccccccgaaccttccagaagcttccagcgcgcagttgccccgagagccgagcggcatggcgtcggccatctccgcggggcccacgccgccggccgcggcgccgtcgtcggtggagtggcaccagcggccgccgaaccccaagaacccggtggtgttcttcgacgtgaccatcgggtccatcccggccgggcgcatcaagatggagctcttcgccgacatcgtccccaagaccgccgagaacttcaggcagttctgcactggcgagtacaggaaatcagctattccacaggggtataagggttgtcagttccatcgagtgatcaaagatttcatgattcagggaggtgacttcgtaaagggtgatggcagtggatgcatatcaatctatggcaccaaatttgatgatgaaaatttcattgcgaagcatactgggcctggcctgctctccatggcgaacagtggagctaactctaatgggtctcagttctttttaacttgtgcaaagtgtgagtggctggacaacaagcatgtggtttttgggagggtgctgggagatggtctgctcgtgctgcggaagattgagaacgtcgctactggaccaaacaaccggccgaagcttgcctgcgtgataagtgagtgcggtgagatgtagcttgctttttgagcgcggcatgtcctagcgctgccttgacatggatgaaagtactgaatcactggaaacagattggagtctagagcattgctgtattaatctacttattgtgacttgtgggcatgcggaatttggactctgacaaactggcaacatgtatctgtatcagccaatgctgtagagcctttaaaaaaacgtgtatggtgttgaataatattcaaagcaggagatgtggtttcatgaaaaaaaaa

SEQ ID NO: 15595 - protein, 226 aa, Triticum aestivum
  peptide (1)..(226): Ceres Seq. ID no. 15178543
  misc_feature (27)..(226): NCBI GI NO: 32129321 NR Description: putative cyclophilin
  misc_feature (42)..(226): NCBI GI NO: 4454307 NR Description: cyclophilin [Pseudotsuga menziesii]
  misc_feature (34)..(226): NCBI GI NO: 15224944 NR Description: peptidyl-prolyl cis-trans isomerase -related
  misc_feature (52)..(226): NCBI GI NO: 37595420 NR Description: peptidyl prolyl isomerase H [Danio rerio]
  misc_feature (51)..(226): NCBI GI NO: 11602709 NR Description: putative U-snRNP-associated cyclophilin
  misc_feature (55)..(226): NCBI GI NO: 5454154 NR Description: peptidyl prolyl isomerase H; cyclophilin H
  misc_feature (55)..(226): NCBI GI NO: 39849992 NR Description: Unknown (protein for MGC:76244)
  misc_feature (40)..(226): NCBI GI NO: 31198985 NR Description: ENSANGP00000018327 [Anopheles gambiae]
  misc_feature (55)..(226): NCBI GI NO: 39597495 NR Description: Hypothetical protein CBG03161
  misc_feature (58)..(226): NCBI GI NO: 24586038 NR Description: CG17266-PA [Drosophila melanogaster]
NSKLFRAPARPPNLPEASSAQLPREPSGMASAISAGPTPPAAAPSSVEWHQRPPNPKNPVVFFDVTIGSIPAGRIKMELFADIVPKTAENFRQFCTGEYRKSAIPQGYKGCQFHRVIKDFMIQGGDFVKGDGSGCISIYGTKFDDENFIAKHTGPGLLSMANSGANSNGSQFFLTCAKCEWLDNKHVVFGRVLGDGLLVLRKIENVATGPNNRPKLACVISECGEM

SEQ ID NO: 15596 - protein, 198 aa, Triticum aestivum
  peptide (1)..(198): Ceres Seq. ID no. 15178544
  misc_feature (1)..(198): NCBI GI NO: 32129321 NR Description: putative cyclophilin
  misc_feature (14)..(198): NCBI GI NO: 4454307 NR Description: cyclophilin [Pseudotsuga menziesii]
  misc_feature (6)..(198): NCBI GI NO: 15224944 NR Description: peptidyl-prolyl cis-trans isomerase -related
  misc_feature (24)..(198): NCBI GI NO: 37595420 NR Description: peptidyl prolyl isomerase H [Danio rerio]
  misc_feature (23)..(198): NCBI GI NO: 11602709 NR Description: putative U-snRNP-associated cyclophilin
  misc_feature (27)..(198): NCBI GI NO: 5454154 NR Description: peptidyl prolyl isomerase H; cyclophilin H
  misc_feature (27)..(198): NCBI GI NO: 39849992 NR Description: Unknown (protein for MGC:76244)
  misc_feature (12)..(198): NCBI GI NO: 31198985 NR Description: ENSANGP00000018327 [Anopheles gambiae]
  misc_feature (27)..(198): NCBI GI NO: 39597495 NR Description: Hypothetical protein CBG03161
  misc_feature (30)..(198): NCBI GI NO: 24586038 NR Description: CG17266-PA [Drosophila melanogaster]
MASAISAGPTPPAAAPSSVEWHQRPPNPKNPVVFFDVTIGSIPAGRIKMELFADIVPKTAENFRQFCTGEYRKSAIPQGYKGCQFHRVIKDFMIQGGDFVKGDGSGCISIYGTKFDDENFIAKHTGPGLLSMANSGANSNGSQFFLTCAKCEWLDNKHVVFGRVLGDGLLVLRKIENVATGPNNRPKLACVISECGEM

SEQ ID NO: 15597 - protein, 150 aa, Triticum aestivum
  peptide (1)..(150): Ceres Seq. ID no. 15178545
  misc_feature (1)..(150): NCBI GI NO: 32129321 NR Description: putative cyclophilin
  misc_feature (1)..(150): NCBI GI NO: 4454307 NR Description: cyclophilin [Pseudotsuga menziesii]
  misc_feature (1)..(150): NCBI GI NO: 15224944 NR Description: peptidyl-prolyl cis-trans isomerase -related
  misc_feature (1)..(150): NCBI GI NO: 37595420 NR Description: peptidyl prolyl isomerase H [Danio rerio]
  misc_feature (1)..(150): NCBI GI NO: 11602709 NR Description: putative U-snRNP-associated cyclophilin
  misc_feature (1)..(150): NCBI GI NO: 5454154 NR Description: peptidyl prolyl isomerase H; cyclophilin H
  misc_feature (1)..(150): NCBI GI NO: 39849992 NR Description: Unknown (protein for MGC:76244)
  misc_feature (1)..(150): NCBI GI NO: 31198985 NR Description: ENSANGP00000018327 [Anopheles gambiae]
  misc_feature (1)..(150): NCBI GI NO: 39597495 NR Description: Hypothetical protein CBG03161
  misc_feature (1)..(150): NCBI GI NO: 24586038 NR Description: CG17266-PA [Drosophila melanogaster]
MELFADIVPKTAENFRQFCTGEYRKSAIPQGYKGCQFHRVIKDFMIQGGDFVKGDGSGCISIYGTKFDDENFIAKHTGPGLLSMANSGANSNGSQFFLTCAKCEWLDNKHVVFGRVLGDGLLVLRKIENVATGPNNRPKLACVISECGEM

SEQ ID NO: 15598 - DNA, 1096 bp, Triticum aestivum
  misc_feature (1)..(1096): Ceres Seq. ID no. 13656068
gagcccaatccgggcactggaaatttctagcatcgcgacggtttaaggaagcatcgcgacgtctaatcgtggcccccctctaacaccttttgccgagacgagattctcttccgcagccgcccccgtcgacgtcgccgtcgccgtcttttgccaccgcgatgcctcggtattattgcgattactgcgacacttatctgacccatgactcgccatctgtccgtaagcaacacaatgctggatataaacacaaggcaaatgttcgtaactactatcagcaattcgaggagcagcaaactcaaagtttgattgatcaaaggataaaggaacacctgggacaagctgcagcgttccaagttggcgctcctttcaaccaacatcttcttcaatatccaggaaatatgccccgtccccgtcttccgattctgcccacacccatgatgcaacatggttatcctcaacatcaacaacctggtgggccatttgcaaggcctcctattttaccagttcctggggctccaggttatcctggtgctccaaccatgccgcagcacgggggccctcctggttcaatgcctatgcaggtggcacctcccccaaggcctccgacactaccacctccaacatttggggccccaggtgcacccatgtccaacaacgcatcacctccaggtcctccaccgatgtatcaaccaaatcaaccaccaactgcaggctcaacttctggcgctccacccctggccccagcggcccctccacaggctgcattctcctatgcacaatcgaatgaaggcaaccactgatctgttccttggtggttatcaaatgagattcgaagaacagccgtaacttggaagttgatgcttcctgcctgtctgtctcctgaatttcggaggcagtctgtctcttgaaatttggagaattgttaagaaaggcttcctgcagtagtattttttgtattttaggtggtgtaacctttacttcttaatacaccgacttcgtattagtttcttgcccttgaaacttgataatggatataacccatggatggcgtacttgatgtagtacatatttgtcattaaaacaaatttatttgttg

SEQ ID NO: 15599 - protein, 213 aa, Triticum aestivum
  peptide (1)..(213): Ceres Seq. ID no. 13656069
  misc_feature (82)..(199): Pfam Name: Pfam Description:  Extensin-like region
  misc_feature (1)..(212): NCBI GI NO: 18412147 NR Description: proline-rich protein family [Arabidopsis thaliana]
  misc_feature (1)..(212): NCBI GI NO: 28466929 NR Description: At4g03120 [Arabidopsis thaliana]
  misc_feature (1)..(94): NCBI GI NO: 25295939 NR Description: probable C-type U1 snRNP
  misc_feature (1)..(198): NCBI GI NO: 38111701 NR Description: hypothetical protein MG08209.4
  misc_feature (1)..(149): NCBI GI NO: 17539712 NR Description: Small nuclear ribonucleoprotein polypeptide C like
  misc_feature (1)..(160): NCBI GI NO: 27545257 NR Description: small nuclear ribonucleoprotein polypeptide C
  misc_feature (1)..(160): NCBI GI NO: 548881 NR Description: U1 small nuclear ribonucleoprotein C (U1-C)
  misc_feature (1)..(160): NCBI GI NO: 4507127 NR Description: small nuclear ribonucleoprotein polypeptide C
  misc_feature (1)..(160): NCBI GI NO: 6755596 NR Description: U1 small nuclear ribonucleoprotein 1C
  misc_feature (1)..(145): NCBI GI NO: 39580999 NR Description: Hypothetical protein CBG19656
MPRYYCDYCDTYLTHDSPSVRKQHNAGYKHKANVRNYYQQFEEQQTQSLIDQRIKEHLGQAAAFQVGAPFNQHLLQYPGNMPRPRLPILPTPMMQHGYPQHQQPGGPFARPPILPVPGAPGYPGAPTMPQHGGPPGSMPMQVAPPPRPPTLPPPTFGAPGAPMSNNASPPGPPPMYQPNQPPTAGSTSGAPPLAPAAPPQAAFSYAQSNEGNH

SEQ ID NO: 15600 - protein, 133 aa, Triticum aestivum
  peptide (1)..(133): Ceres Seq. ID no. 13656070
  misc_feature (2)..(119): Pfam Name: Pfam Description:  Extensin-like region
  misc_feature (1)..(132): NCBI GI NO: 18412147 NR Description: proline-rich protein family [Arabidopsis thaliana]
  misc_feature (1)..(132): NCBI GI NO: 28466929 NR Description: At4g03120 [Arabidopsis thaliana]
  misc_feature (1)..(14): NCBI GI NO: 25295939 NR Description: probable C-type U1 snRNP
  misc_feature (1)..(118): NCBI GI NO: 38111701 NR Description: hypothetical protein MG08209.4
  misc_feature (1)..(69): NCBI GI NO: 17539712 NR Description: Small nuclear ribonucleoprotein polypeptide C like
  misc_feature (1)..(80): NCBI GI NO: 27545257 NR Description: small nuclear ribonucleoprotein polypeptide C
  misc_feature (1)..(80): NCBI GI NO: 548881 NR Description: U1 small nuclear ribonucleoprotein C (U1-C)
  misc_feature (1)..(80): NCBI GI NO: 4507127 NR Description: small nuclear ribonucleoprotein polypeptide C
  misc_feature (1)..(80): NCBI GI NO: 6755596 NR Description: U1 small nuclear ribonucleoprotein 1C
  misc_feature (1)..(65): NCBI GI NO: 39580999 NR Description: Hypothetical protein CBG19656
MPRPRLPILPTPMMQHGYPQHQQPGGPFARPPILPVPGAPGYPGAPTMPQHGGPPGSMPMQVAPPPRPPTLPPPTFGAPGAPMSNNASPPGPPPMYQPNQPPTAGSTSGAPPLAPAAPPQAAFSYAQSNEGNH

SEQ ID NO: 15601 - protein, 133 aa, Triticum aestivum
  peptide (1)..(133): Ceres Seq. ID no. 13656071
MVILNINNLVGHLQGLLFYQFLGLQVILVLQPCRSTGALLVQCLCRWHLPQGLRHYHLQHLGPQVHPCPTTHHLQVLHRCINQINHQLQAQLLALHPWPQRPLHRLHSPMHNRMKATTDLFLGGYQMRFEEQP

SEQ ID NO: 15602 - DNA, 1361 bp, Triticum aestivum
  misc_feature (1)..(1361): Ceres Seq. ID no. 13503549
acaggggaaaaacctcttcctagcgagatttccccacccgtcttcttcctccgaaaccctaatccccaaatcggagaatcggacccagcccggcgccgcggagagcatccccccgtcgaccggcatggcaattgctcgcactggcgtgtacgtggacgactacttggagtattcgagcaccctggccggcgacctgcagaggatcctctccaccatgcacgagctcgacgagagggcccatggcattttgggtcagacaaaagggcagatcaaatatctcctgggggtgccatcccatgggttcgacaggccaaacgtggtgcatgatgaaaatgcctcggagaagatgacgagggatattgaaaatagccaggacaacgcgcttagtctctgcacggagaaagtgttgctcgcacgccaagcttatgacctgatagagagccatatcaaacgtcttgatgaagacctaggccagtttgcagaagatttaaagcaagaaggaaaaatacctccagatgaaccgcatatccttcctccaatgccggtgggtggcagggatgaaagacggaggtccagttttagtacaccccaagcagcaaggaagtttgtcagagagaaggaatgggatagggatagggagagaggtatggacttcgacttaatgccccctccaggtagcagcaacaagaaggccgttgcatctatggatgtggatcaaatgattgatccaaatgaaccaacatattgtatatgccaccaggtttcatatggtgatatgattgcttgtgacaatgagaattgtgaaggaggcgaatggttccattactcgtgcgttggtctgacaccagaaacaagattcaaagggaaatggttttgcccaacttgcaggaatcttcaatgagaggttctcctaaattgtgttgacgaggcgagcggttccggtcggcccagactttccgcaacatgcaggactcttcaacacgaggctctcagaagcttttcttggacaggaggataccaaatggtacatgtttcaatttgtaaggaggcgtttgcttacagtgtggtcttattttggtaataatgtatatgctggagaggacgcgactgttctagagaaggataaaaaagcttggcgtgttctgttgttgtatcttgtcgccgcaaacaatctatcatagtttcaggtgttggtaacctggtaactattttactttggtcgtgatgtctattaagcgtcatcgcaacctttgctcgcatgattctgcccctgagcaccattatctgctgcatcttggttgagctggaggtgcagcatatgcacttctacagcacacattgtattaaattattgtgtaact

SEQ ID NO: 15603 - protein, 299 aa, Triticum aestivum
  peptide (1)..(299): Ceres Seq. ID no. 13503550
  misc_feature (248)..(298): Pfam Name: Pfam Description:  PHD-finger
  misc_feature (42)..(266): NCBI GI NO: 18087670 NR Description: putative growth inhibitory protein [Oryza sativa]
  misc_feature (82)..(298): NCBI GI NO: 25405727 NR Description: hypothetical protein F20D21.22
  misc_feature (42)..(266): NCBI GI NO: 30695729 NR Description: expressed protein [Arabidopsis thaliana]
  misc_feature (116)..(298): NCBI GI NO: 21553698 NR Description: putative growth inhibitory protein
  misc_feature (48)..(295): NCBI GI NO: 26327491 NR Description: unnamed protein product [Mus musculus]
  misc_feature (48)..(295): NCBI GI NO: 19111152 NR Description: ING1-like protein
  misc_feature (47)..(295): NCBI GI NO: 18644730 NR Description: p28 ING5 [Homo sapiens]
  misc_feature (48)..(295): NCBI GI NO: 34858458 NR Description: similar to ING1-like protein
  misc_feature (47)..(166): NCBI GI NO: 19921252 NR Description: CG9293-PA [Drosophila melanogaster]
  misc_feature (226)..(295): NCBI GI NO: 19921252 NR Description: CG9293-PA [Drosophila melanogaster]
QGKNLFLARFPHPSSSSETLIPKSENRTQPGAAESIPPSTGMAIARTGVYVDDYLEYSSTLAGDLQRILSTMHELDERAHGILGQTKGQIKYLLGVPSHGFDRPNVVHDENASEKMTRDIENSQDNALSLCTEKVLLARQAYDLIESHIKRLDEDLGQFAEDLKQEGKIPPDEPHILPPMPVGGRDERRRSSFSTPQAARKFVREKEWDRDRERGMDFDLMPPPGSSNKKAVASMDVDQMIDPNEPTYCICHQVSYGDMIACDNENCEGGEWFHYSCVGLTPETRFKGKWFCPTCRNLQ

SEQ ID NO: 15604 - protein, 258 aa, Triticum aestivum
  peptide (1)..(258): Ceres Seq. ID no. 13503551
  misc_feature (207)..(257): Pfam Name: Pfam Description:  PHD-finger
  misc_feature (1)..(225): NCBI GI NO: 18087670 NR Description: putative growth inhibitory protein [Oryza sativa]
  misc_feature (41)..(257): NCBI GI NO: 25405727 NR Description: hypothetical protein F20D21.22
  misc_feature (1)..(225): NCBI GI NO: 30695729 NR Description: expressed protein [Arabidopsis thaliana]
  misc_feature (75)..(257): NCBI GI NO: 21553698 NR Description: putative growth inhibitory protein
  misc_feature (7)..(254): NCBI GI NO: 26327491 NR Description: unnamed protein product [Mus musculus]
  misc_feature (7)..(254): NCBI GI NO: 19111152 NR Description: ING1-like protein
  misc_feature (6)..(254): NCBI GI NO: 18644730 NR Description: p28 ING5 [Homo sapiens]
  misc_feature (7)..(254): NCBI GI NO: 34858458 NR Description: similar to ING1-like protein
  misc_feature (6)..(125): NCBI GI NO: 19921252 NR Description: CG9293-PA [Drosophila melanogaster]
  misc_feature (185)..(254): NCBI GI NO: 19921252 NR Description: CG9293-PA [Drosophila melanogaster]
MAIARTGVYVDDYLEYSSTLAGDLQRILSTMHELDERAHGILGQTKGQIKYLLGVPSHGFDRPNVVHDENASEKMTRDIENSQDNALSLCTEKVLLARQAYDLIESHIKRLDEDLGQFAEDLKQEGKIPPDEPHILPPMPVGGRDERRRSSFSTPQAARKFVREKEWDRDRERGMDFDLMPPPGSSNKKAVASMDVDQMIDPNEPTYCICHQVSYGDMIACDNENCEGGEWFHYSCVGLTPETRFKGKWFCPTCRNLQ

SEQ ID NO: 15605 - protein, 228 aa, Triticum aestivum
  peptide (1)..(228): Ceres Seq. ID no. 13503552
  misc_feature (177)..(227): Pfam Name: Pfam Description:  PHD-finger
  misc_feature (1)..(195): NCBI GI NO: 18087670 NR Description: putative growth inhibitory protein [Oryza sativa]
  misc_feature (11)..(227): NCBI GI NO: 25405727 NR Description: hypothetical protein F20D21.22
  misc_feature (1)..(195): NCBI GI NO: 30695729 NR Description: expressed protein [Arabidopsis thaliana]
  misc_feature (45)..(227): NCBI GI NO: 21553698 NR Description: putative growth inhibitory protein
  misc_feature (1)..(224): NCBI GI NO: 26327491 NR Description: unnamed protein product [Mus musculus]
  misc_feature (1)..(224): NCBI GI NO: 19111152 NR Description: ING1-like protein
  misc_feature (1)..(224): NCBI GI NO: 18644730 NR Description: p28 ING5 [Homo sapiens]
  misc_feature (1)..(224): NCBI GI NO: 34858458 NR Description: similar to ING1-like protein
  misc_feature (1)..(95): NCBI GI NO: 19921252 NR Description: CG9293-PA [Drosophila melanogaster]
  misc_feature (155)..(224): NCBI GI NO: 19921252 NR Description: CG9293-PA [Drosophila melanogaster]
MHELDERAHGILGQTKGQIKYLLGVPSHGFDRPNVVHDENASEKMTRDIENSQDNALSLCTEKVLLARQAYDLIESHIKRLDEDLGQFAEDLKQEGKIPPDEPHILPPMPVGGRDERRRSSFSTPQAARKFVREKEWDRDRERGMDFDLMPPPGSSNKKAVASMDVDQMIDPNEPTYCICHQVSYGDMIACDNENCEGGEWFHYSCVGLTPETRFKGKWFCPTCRNLQ

SEQ ID NO: 15606 - DNA, 1386 bp, Triticum aestivum
  misc_feature (1)..(1386): Ceres Seq. ID no. 15224695
cggaagcaaacggcagcccagcacaaattcctagcggcagccagcagccgggcgccggaagcgagcaagatggcggcggcggctgtggcggcgcgggcgtacgaggcagcggcgcggtccgcgctggcggcgctggagcgcaacctgctgccggacgcggtcacccggcggctcacgcgcctcctgctcgcgcagcgcctccgcctcggctacctcccctccgcgccgctccagctgcaggacctcatcctcttcgcccactcacttgaaggcatgcccattgccatcgaaacggacacagctaaaacccagcactacgagctgccgaccacattcttcaagctagtgctcggaaaaaacctcaaatacagctcatgttacttccctgatgattcaagcaccctagaagatgccgaggttgcaatgttggagttgtactgtgagagggcgcagctgcaagatggccaaagcgttctcgatgttggatgtggatggggatccctctctgtatacatagcaaagaaatataggaactgcaatatcacggggatatgcaactcaacaactcaaaaggcttttatagaagagcagtgtagggagaatgagctatccaatgttgagatcattgtagcagacatcagcaagtttgagatggagcgttcttttgacaggatcatatcgatagagatgtttgagcacatgaaaaactacaaggcacttcttaagaagatatccagatggatgaaagaggattccttattgtttgttcactacttctgccacaagacatttgcgtatcacttcgaggacaagaatgacgatgattggatcacaaggtatttctttactggaggaacaatgccatcagcaaacctccttctgtactttcaggaagatgtatctgtggtcaatcattggcttgtcagtggcacacattatgctagaactagcgaggagtggctgaaacgcatggacaagaacatcgctgccataaggccaatctttgagaagacttatgggagggaatcagctaccaaatggatagcttattggaggacattcttcatctcagtagctgaactttttggatataacaatggtgatgaatggatggttgcacatcacctgttccgaaagaagtagaagtgccgctggacatttctggagcaaagtagaattgtatgttgagaatcatccatcacacaggctatgcctagttatataattatttttgtgtgtgttgagctgttatcctcctttttttttttgaagagaggcaaaagatttgcctcattcattaaataagaggaatagagtttatgttcgtgttacaacagtgacagcgccgcaacacccgaaataaaggtgaccaactactctcgcgtc

SEQ ID NO: 15607 - protein, 380 aa, Triticum aestivum
  peptide (1)..(380): Ceres Seq. ID no. 15224696
  misc_feature (209)..(379): Pfam Name: Pfam Description:  Cyclopropane-fatty-acyl-phospholipid synthase
  misc_feature (33)..(380): NCBI GI NO: 18418151 NR Description: expressed protein [Arabidopsis thaliana]
  misc_feature (33)..(380): NCBI GI NO: 21593795 NR Description: coclaurine N-methyltransferase
  misc_feature (33)..(380): NCBI GI NO: 26451688 NR Description: unknown protein [Arabidopsis thaliana]
  misc_feature (33)..(380): NCBI GI NO: 30689611 NR Description: expressed protein [Arabidopsis thaliana]
  misc_feature (92)..(380): NCBI GI NO: 7486450 NR Description: hypothetical protein F4I10
  misc_feature (27)..(380): NCBI GI NO: 16754879 NR Description: coclaurine N-methyltransferase [Coptis japonica]
  misc_feature (37)..(380): NCBI GI NO: 33413898 NR Description: S-adenosyl-L-methionine: coclaurine N-methyltransferase
  misc_feature (46)..(380): NCBI GI NO: 22988437 NR Description: COG2230: Cyclopropane fatty acid synthase and related methyltransferases
  misc_feature (24)..(380): NCBI GI NO: 21230783 NR Description: conserved hypothetical protein
  misc_feature (24)..(380): NCBI GI NO: 21242125 NR Description: conserved hypothetical protein
RKQTAAQHKFLAAASSRAPEASKMAAAAVAARAYEAAARSALAALERNLLPDAVTRRLTRLLLAQRLRLGYLPSAPLQLQDLILFAHSLEGMPIAIETDTAKTQHYELPTTFFKLVLGKNLKYSSCYFPDDSSTLEDAEVAMLELYCERAQLQDGQSVLDVGCGWGSLSVYIAKKYRNCNITGICNSTTQKAFIEEQCRENELSNVEIIVADISKFEMERSFDRIISIEMFEHMKNYKALLKKISRWMKEDSLLFVHYFCHKTFAYHFEDKNDDDWITRYFFTGGTMPSANLLLYFQEDVSVVNHWLVSGTHYARTSEEWLKRMDKNIAAIRPIFEKTYGRESATKWIAYWRTFFISVAELFGYNNGDEWMVAHHLFRKK

SEQ ID NO: 15608 - protein, 357 aa, Triticum aestivum
  peptide (1)..(357): Ceres Seq. ID no. 15224697
  misc_feature (186)..(356): Pfam Name: Pfam Description:  Cyclopropane-fatty-acyl-phospholipid synthase
  misc_feature (10)..(357): NCBI GI NO: 18418151 NR Description: expressed protein [Arabidopsis thaliana]
  misc_feature (10)..(357): NCBI GI NO: 21593795 NR Description: coclaurine N-methyltransferase
  misc_feature (10)..(357): NCBI GI NO: 26451688 NR Description: unknown protein [Arabidopsis thaliana]
  misc_feature (10)..(357): NCBI GI NO: 30689611 NR Description: expressed protein [Arabidopsis thaliana]
  misc_feature (69)..(357): NCBI GI NO: 7486450 NR Description: hypothetical protein F4I10
  misc_feature (4)..(357): NCBI GI NO: 16754879 NR Description: coclaurine N-methyltransferase [Coptis japonica]
  misc_feature (14)..(357): NCBI GI NO: 33413898 NR Description: S-adenosyl-L-methionine: coclaurine N-methyltransferase
  misc_feature (23)..(357): NCBI GI NO: 22988437 NR Description: COG2230: Cyclopropane fatty acid synthase and related methyltransferases
  misc_feature (1)..(357): NCBI GI NO: 21230783 NR Description: conserved hypothetical protein
  misc_feature (1)..(357): NCBI GI NO: 21242125 NR Description: conserved hypothetical protein
MAAAAVAARAYEAAARSALAALERNLLPDAVTRRLTRLLLAQRLRLGYLPSAPLQLQDLILFAHSLEGMPIAIETDTAKTQHYELPTTFFKLVLGKNLKYSSCYFPDDSSTLEDAEVAMLELYCERAQLQDGQSVLDVGCGWGSLSVYIAKKYRNCNITGICNSTTQKAFIEEQCRENELSNVEIIVADISKFEMERSFDRIISIEMFEHMKNYKALLKKISRWMKEDSLLFVHYFCHKTFAYHFEDKNDDDWITRYFFTGGTMPSANLLLYFQEDVSVVNHWLVSGTHYARTSEEWLKRMDKNIAAIRPIFEKTYGRESATKWIAYWRTFFISVAELFGYNNGDEWMVAHHLFRKK

SEQ ID NO: 15609 - protein, 289 aa, Triticum aestivum
  peptide (1)..(289): Ceres Seq. ID no. 15224698
  misc_feature (118)..(288): Pfam Name: Pfam Description:  Cyclopropane-fatty-acyl-phospholipid synthase
  misc_feature (1)..(289): NCBI GI NO: 18418151 NR Description: expressed protein [Arabidopsis thaliana]
  misc_feature (1)..(289): NCBI GI NO: 26451688 NR Description: unknown protein [Arabidopsis thaliana]
  misc_feature (1)..(289): NCBI GI NO: 21593795 NR Description: coclaurine N-methyltransferase
  misc_feature (1)..(289): NCBI GI NO: 30689611 NR Description: expressed protein [Arabidopsis thaliana]
  misc_feature (1)..(289): NCBI GI NO: 7486450 NR Description: hypothetical protein F4I10
  misc_feature (1)..(289): NCBI GI NO: 16754879 NR Description: coclaurine N-methyltransferase [Coptis japonica]
  misc_feature (1)..(289): NCBI GI NO: 33413898 NR Description: S-adenosyl-L-methionine: coclaurine N-methyltransferase
  misc_feature (1)..(289): NCBI GI NO: 22988437 NR Description: COG2230: Cyclopropane fatty acid synthase and related methyltransferases
  misc_feature (1)..(289): NCBI GI NO: 21230783 NR Description: conserved hypothetical protein
  misc_feature (1)..(289): NCBI GI NO: 21242125 NR Description: conserved hypothetical protein
MPIAIETDTAKTQHYELPTTFFKLVLGKNLKYSSCYFPDDSSTLEDAEVAMLELYCERAQLQDGQSVLDVGCGWGSLSVYIAKKYRNCNITGICNSTTQKAFIEEQCRENELSNVEIIVADISKFEMERSFDRIISIEMFEHMKNYKALLKKISRWMKEDSLLFVHYFCHKTFAYHFEDKNDDDWITRYFFTGGTMPSANLLLYFQEDVSVVNHWLVSGTHYARTSEEWLKRMDKNIAAIRPIFEKTYGRESATKWIAYWRTFFISVAELFGYNNGDEWMVAHHLFRKK

SEQ ID NO: 15610 - DNA, 1148 bp, Triticum aestivum
  misc_feature (1)..(1148): Ceres Seq. ID no. 12617960
  misc_feature (1110)..(1110): n is a, c, t, g, unknown, or other
  misc_feature (1077)..(1077): n is a, c, t, g, unknown, or other
ggagatctttgcgtgaccgcgcagccaagggggaaaagaaagaaaaggaaaaccaaccagaagaaaagctcgggaggagagcgtggggggactagggagcatggcggagcacaaggaggagccggtggcggagtccatgatggacaagatctccgacaagttccacggtggggactcgtcgtcgtcgtcctcggactcggacgacgagaagaaggggtcggcggcgggcgtcaaggccaagatctaccgcctcttcggccgcgagaagcccgtccacgccgtcctcggcggcggcaagcctgctgatcttgttctatggaggaacaagaaggtctccggaggggtgcttgctggcgctactgccatctggctgctgttcgaggtcatggagtaccatctgctcaccttggtgggccactgcctcatcctctccctggcaaccctcttcctctattccaatgtctgcattttcatccacaagtctcccccgaacatccctgaggtgaaaatcccggaggacatgactgtaaacattgcactatcactgcggcatgagatcaaccggggcttctttaccttgagagagactggtcatggtcgtgatctgaagaaattcctcattgtgattggagggctctggcttctttctgttcttgggagctactgcaactttttgacactgtcatatatagtctttgtggtgctgtacactgtgccagttctgtatgagaagtacgatgacaaggtggatgcttttggtgagaaggccatgatcgaattgaagaagtattatgccatctttgaagagaaggtcctgtcgaagatcccgaagaacaagaagcactagatcacaagagttaccctgccgcgtattgccatctgtgttaatctcaacttgttgcctcattttgaaggatggttctgtgtcattgcgtctgtctttagttaatactacttgatactagtacatatagatgtggtgtgctaatccttttgtgaagtggagtcatgccagctgaagattgttgatcttcttttttttgtttatttttcaactttcagcatggttactctatntgggagccggaaatgttatggcattacctgttntagtgcctagtgatatactactgcgtagtgatttatcc

SEQ ID NO: 15611 - protein, 248 aa, Triticum aestivum
  peptide (1)..(248): Ceres Seq. ID no. 12617961
  misc_feature (1)..(248): NCBI GI NO: 34909318 NR Description: OSJNBb0021A09.5
  misc_feature (11)..(247): NCBI GI NO: 15236556 NR Description: putative protein; protein id: At4g23630
  misc_feature (3)..(242): NCBI GI NO: 15222616 NR Description: hypothetical protein; protein id: At1g64090
  misc_feature (1)..(244): NCBI GI NO: 15237093 NR Description: putative protein; protein id: At4g11220
  misc_feature (3)..(247): NCBI GI NO: 15238125 NR Description: putative protein; protein id: At5g41600
  misc_feature (35)..(248): NCBI GI NO: 34904202 NR Description: P0492F05.25
  misc_feature (1)..(243): NCBI GI NO: 18406991 NR Description: expressed protein; protein id: At2g46170
  misc_feature (1)..(243): NCBI GI NO: 15234108 NR Description: hypothetical protein; protein id: At4g01230.1
  misc_feature (1)..(243): NCBI GI NO: 15233147 NR Description: putative protein; protein id: At3g61560.1
  misc_feature (1)..(247): NCBI GI NO: 34897094 NR Description: unknown protein
MAEHKEEPVAESMMDKISDKFHGGDSSSSSSDSDDEKKGSAAGVKAKIYRLFGREKPVHAVLGGGKPADLVLWRNKKVSGGVLAGATAIWLLFEVMEYHLLTLVGHCLILSLATLFLYSNVCIFIHKSPPNIPEVKIPEDMTVNIALSLRHEINRGFFTLRETGHGRDLKKFLIVIGGLWLLSVLGSYCNFLTLSYIVFVVLYTVPVLYEKYDDKVDAFGEKAMIELKKYYAIFEEKVLSKIPKNKKH

SEQ ID NO: 15612 - protein, 236 aa, Triticum aestivum
  peptide (1)..(236): Ceres Seq. ID no. 12617962
  misc_feature (1)..(236): NCBI GI NO: 34909318 NR Description: OSJNBb0021A09.5
  misc_feature (1)..(235): NCBI GI NO: 15236556 NR Description: putative protein; protein id: At4g23630
  misc_feature (1)..(230): NCBI GI NO: 15222616 NR Description: hypothetical protein; protein id: At1g64090
  misc_feature (1)..(232): NCBI GI NO: 15237093 NR Description: putative protein; protein id: At4g11220
  misc_feature (1)..(235): NCBI GI NO: 15238125 NR Description: putative protein; protein id: At5g41600
  misc_feature (23)..(236): NCBI GI NO: 34904202 NR Description: P0492F05.25
  misc_feature (1)..(231): NCBI GI NO: 18406991 NR Description: expressed protein; protein id: At2g46170
  misc_feature (1)..(231): NCBI GI NO: 15234108 NR Description: hypothetical protein; protein id: At4g01230.1
  misc_feature (1)..(231): NCBI GI NO: 15233147 NR Description: putative protein; protein id: At3g61560.1
  misc_feature (1)..(235): NCBI GI NO: 34897094 NR Description: unknown protein
MMDKISDKFHGGDSSSSSSDSDDEKKGSAAGVKAKIYRLFGREKPVHAVLGGGKPADLVLWRNKKVSGGVLAGATAIWLLFEVMEYHLLTLVGHCLILSLATLFLYSNVCIFIHKSPPNIPEVKIPEDMTVNIALSLRHEINRGFFTLRETGHGRDLKKFLIVIGGLWLLSVLGSYCNFLTLSYIVFVVLYTVPVLYEKYDDKVDAFGEKAMIELKKYYAIFEEKVLSKIPKNKKH

SEQ ID NO: 15613 - protein, 235 aa, Triticum aestivum
  peptide (1)..(235): Ceres Seq. ID no. 12617963
  misc_feature (1)..(235): NCBI GI NO: 34909318 NR Description: OSJNBb0021A09.5
  misc_feature (1)..(234): NCBI GI NO: 15236556 NR Description: putative protein; protein id: At4g23630
  misc_feature (1)..(229): NCBI GI NO: 15222616 NR Description: hypothetical protein; protein id: At1g64090
  misc_feature (1)..(231): NCBI GI NO: 15237093 NR Description: putative protein; protein id: At4g11220
  misc_feature (1)..(234): NCBI GI NO: 15238125 NR Description: putative protein; protein id: At5g41600
  misc_feature (22)..(235): NCBI GI NO: 34904202 NR Description: P0492F05.25
  misc_feature (1)..(230): NCBI GI NO: 18406991 NR Description: expressed protein; protein id: At2g46170
  misc_feature (1)..(230): NCBI GI NO: 15234108 NR Description: hypothetical protein; protein id: At4g01230.1
  misc_feature (1)..(230): NCBI GI NO: 15233147 NR Description: putative protein; protein id: At3g61560.1
  misc_feature (1)..(234): NCBI GI NO: 34897094 NR Description: unknown protein
MDKISDKFHGGDSSSSSSDSDDEKKGSAAGVKAKIYRLFGREKPVHAVLGGGKPADLVLWRNKKVSGGVLAGATAIWLLFEVMEYHLLTLVGHCLILSLATLFLYSNVCIFIHKSPPNIPEVKIPEDMTVNIALSLRHEINRGFFTLRETGHGRDLKKFLIVIGGLWLLSVLGSYCNFLTLSYIVFVVLYTVPVLYEKYDDKVDAFGEKAMIELKKYYAIFEEKVLSKIPKNKKH

SEQ ID NO: 15614 - DNA, 1617 bp, Triticum aestivum
  misc_feature (1)..(1617): Ceres Seq. ID no. 13662880
cccacatcgtatcagtcccagctatcgcacacacctgcaacggccagctcaggagcgggcaagaagagaagacatttattttcttccctcgcgggagatcgatcacagccgggcagccatgggcgaggaggccccggccgcggtcaccgcggcggcgacgtcgccggcgccccacttgctcctcatatgcttcccggggcagggccacgtcaaccccatgctccgcctcgccaagcgcttcgcggccaagggcctcctggtcaccttctcctcgacctcctacgttggaggcaagatcacggcctcctccggggtggaggctggcggcgacggcgtgccgctcggccgcggccgcatccggttcgagttcttggacgacgatttcgacgggaatgacctcgacgacctgatgaggcacctggagacgactggccccgtggtgttcgcggagctgctgaggcgccaggaggaggcggggcggcctgtgacgtgcgtcgtcgggaacccgttcctcccgtgggcgatcgacgtcgcccacgacgccggcatccccacggcagtgctgtgggtgcagtcgtgcgcggtgttctcgctctactaccaccacgtgcacgggctcgtggagttcccgcccgaggacgacctcgacgcccgggtcaacctcccgggcctcccggcgctgtccgtcgccgacgtgccgtcgttcctgctgccgtccaacccctacaagctcctcaccgatgcgatactgaagcagttccgcaccatccacaaggcgtcgtgggtgttcgtcaactccttctacgagctggagcccgacgtggtggacgcgctcccgggcatctcgccgccgccgccgccgctcatccccgtgggcccgctcgtcgagctggaggaggagggcgccgtgcgcggcgacatgatcaaggcggcggacgactgcgtggggtggctggacgcgcaggcgccgcgctccgtcgtgtacgcgtcgctcggcagcgtcgtggtgctgtccgccgaggagctggccgagatggcgcacgggctcgcgtccaccggccgccccttcctgtgggtggttcggccggactgcagcgcgatgctcccggaggggtacctggactccgtcgccgggcgcggcatggtggtgccgtggagcccgcaggacctggtgctcgcgcacccgtccacggcgtgcttcctcacgcactgcggctggaactccacgctggagacgctcgcggcggggcttcccgtggtggcgttcccgcagtggggcgaccagtgcacggacgccaagtacctcgtggaggagttcaagatgggggtgcgcatcggcacgccgctgcggagggactccgtgcgcgacgccgtggaggacgtcgtggccgggccggacgccggcgcgatgctcgagaaggccagagcgtggtgcgcggcggcgaggacggcggtggcggccggcgggtcgtcggaccgccacgtacaggcgtttgttgaccaggttgtggcgggaaccattggcgcacgagcagataaggacattgtggctgcggagcagcaaggtttcgattcatcttctctacgtggaaactaaggattatttcggccatctcc

SEQ ID NO: 15615 - protein, 531 aa, Triticum aestivum
  peptide (1)..(531): Ceres Seq. ID no. 13662881
  misc_feature (53)..(502): NCBI GI NO: 13431605 NR Description: Limonoid UDP-glucosyltransferase
  misc_feature (58)..(502): NCBI GI NO: 28628183 NR Description: UDP-glucosyl transferase [Fragaria x ananassa]
  misc_feature (54)..(505): NCBI GI NO: 7433899 NR Description: probable indole-3-acetate beta-glucosyltransferase- Arabidopsis thaliana
  misc_feature (54)..(505): NCBI GI NO: 30683281 NR Description: UDP-glycosyltransferase family
  misc_feature (54)..(505): NCBI GI NO: 25082972 NR Description: indole-3-acetate beta-glucosyltransferase like
  misc_feature (58)..(503): NCBI GI NO: 15234616 NR Description: UDP-glycosyltransferase, putative
  misc_feature (52)..(505): NCBI GI NO: 34911272 NR Description: limonoid UDP-glucosyltransferase-like protein
  misc_feature (58)..(503): NCBI GI NO: 21593030 NR Description: indole-3-acetate beta-glucosyltransferase like
  misc_feature (52)..(502): NCBI GI NO: 9794913 NR Description: UDP-glucose:sinapate glucosyltransferase
  misc_feature (57)..(508): NCBI GI NO: 15233091 NR Description: UDP-glucosyltransferase, putative
PHRISPSYRTHLQRPAQERARREDIYFLPSREIDHSRAAMGEEAPAAVTAAATSPAPHLLLICFPGQGHVNPMLRLAKRFAAKGLLVTFSSTSYVGGKITASSGVEAGGDGVPLGRGRIRFEFLDDDFDGNDLDDLMRHLETTGPVVFAELLRRQEEAGRPVTCVVGNPFLPWAIDVAHDAGIPTAVLWVQSCAVFSLYYHHVHGLVEFPPEDDLDARVNLPGLPALSVADVPSFLLPSNPYKLLTDAILKQFRTIHKASWVFVNSFYELEPDVVDALPGISPPPPPLIPVGPLVELEEEGAVRGDMIKAADDCVGWLDAQAPRSVVYASLGSVVVLSAEELAEMAHGLASTGRPFLWVVRPDCSAMLPEGYLDSVAGRGMVVPWSPQDLVLAHPSTACFLTHCGWNSTLETLAAGLPVVAFPQWGDQCTDAKYLVEEFKMGVRIGTPLRRDSVRDAVEDVVAGPDAGAMLEKARAWCAAARTAVAAGGSSDRHVQAFVDQVVAGTIGARADKDIVAAEQQGFDSSSLRGN

SEQ ID NO: 15616 - protein, 492 aa, Triticum aestivum
  peptide (1)..(492): Ceres Seq. ID no. 13662882
  misc_feature (14)..(463): NCBI GI NO: 13431605 NR Description: Limonoid UDP-glucosyltransferase
  misc_feature (19)..(463): NCBI GI NO: 28628183 NR Description: UDP-glucosyl transferase [Fragaria x ananassa]
  misc_feature (15)..(466): NCBI GI NO: 7433899 NR Description: probable indole-3-acetate beta-glucosyltransferase- Arabidopsis thaliana
  misc_feature (15)..(466): NCBI GI NO: 30683281 NR Description: UDP-glycosyltransferase family
  misc_feature (15)..(466): NCBI GI NO: 25082972 NR Description: indole-3-acetate beta-glucosyltransferase like
  misc_feature (19)..(464): NCBI GI NO: 15234616 NR Description: UDP-glycosyltransferase, putative
  misc_feature (13)..(466): NCBI GI NO: 34911272 NR Description: limonoid UDP-glucosyltransferase-like protein
  misc_feature (19)..(464): NCBI GI NO: 21593030 NR Description: indole-3-acetate beta-glucosyltransferase like
  misc_feature (13)..(463): NCBI GI NO: 9794913 NR Description: UDP-glucose:sinapate glucosyltransferase
  misc_feature (18)..(469): NCBI GI NO: 15233091 NR Description: UDP-glucosyltransferase, putative
MGEEAPAAVTAAATSPAPHLLLICFPGQGHVNPMLRLAKRFAAKGLLVTFSSTSYVGGKITASSGVEAGGDGVPLGRGRIRFEFLDDDFDGNDLDDLMRHLETTGPVVFAELLRRQEEAGRPVTCVVGNPFLPWAIDVAHDAGIPTAVLWVQSCAVFSLYYHHVHGLVEFPPEDDLDARVNLPGLPALSVADVPSFLLPSNPYKLLTDAILKQFRTIHKASWVFVNSFYELEPDVVDALPGISPPPPPLIPVGPLVELEEEGAVRGDMIKAADDCVGWLDAQAPRSVVYASLGSVVVLSAEELAEMAHGLASTGRPFLWVVRPDCSAMLPEGYLDSVAGRGMVVPWSPQDLVLAHPSTACFLTHCGWNSTLETLAAGLPVVAFPQWGDQCTDAKYLVEEFKMGVRIGTPLRRDSVRDAVEDVVAGPDAGAMLEKARAWCAAARTAVAAGGSSDRHVQAFVDQVVAGTIGARADKDIVAAEQQGFDSSSLRGN

SEQ ID NO: 15617 - protein, 459 aa, Triticum aestivum
  peptide (1)..(459): Ceres Seq. ID no. 13662883
  misc_feature (1)..(430): NCBI GI NO: 13431605 NR Description: Limonoid UDP-glucosyltransferase
  misc_feature (1)..(430): NCBI GI NO: 28628183 NR Description: UDP-glucosyl transferase [Fragaria x ananassa]
  misc_feature (1)..(433): NCBI GI NO: 7433899 NR Description: probable indole-3-acetate beta-glucosyltransferase- Arabidopsis thaliana
  misc_feature (1)..(433): NCBI GI NO: 30683281 NR Description: UDP-glycosyltransferase family
  misc_feature (1)..(433): NCBI GI NO: 25082972 NR Description: indole-3-acetate beta-glucosyltransferase like
  misc_feature (1)..(431): NCBI GI NO: 15234616 NR Description: UDP-glycosyltransferase, putative
  misc_feature (1)..(433): NCBI GI NO: 34911272 NR Description: limonoid UDP-glucosyltransferase-like protein
  misc_feature (1)..(431): NCBI GI NO: 21593030 NR Description: indole-3-acetate beta-glucosyltransferase like
  misc_feature (1)..(430): NCBI GI NO: 9794913 NR Description: UDP-glucose:sinapate glucosyltransferase
  misc_feature (1)..(436): NCBI GI NO: 15233091 NR Description: UDP-glucosyltransferase, putative
MLRLAKRFAAKGLLVTFSSTSYVGGKITASSGVEAGGDGVPLGRGRIRFEFLDDDFDGNDLDDLMRHLETTGPVVFAELLRRQEEAGRPVTCVVGNPFLPWAIDVAHDAGIPTAVLWVQSCAVFSLYYHHVHGLVEFPPEDDLDARVNLPGLPALSVADVPSFLLPSNPYKLLTDAILKQFRTIHKASWVFVNSFYELEPDVVDALPGISPPPPPLIPVGPLVELEEEGAVRGDMIKAADDCVGWLDAQAPRSVVYASLGSVVVLSAEELAEMAHGLASTGRPFLWVVRPDCSAMLPEGYLDSVAGRGMVVPWSPQDLVLAHPSTACFLTHCGWNSTLETLAAGLPVVAFPQWGDQCTDAKYLVEEFKMGVRIGTPLRRDSVRDAVEDVVAGPDAGAMLEKARAWCAAARTAVAAGGSSDRHVQAFVDQVVAGTIGARADKDIVAAEQQGFDSSSLRGN

SEQ ID NO: 15618 - DNA, 1619 bp, Triticum aestivum
  misc_feature (1)..(1619): Ceres Seq. ID no. 13597624
agcgaaaagccgggctccaaaatccccaatctgctccaggtggtcaaaccattccaccattccccggcgcaccaccatggcagcatccccgccggcgatcctggacgagctcttcgaagagatcctcctccgcctcccgcccgacgacccagcctgcctcctccgcgcctccctcgtctgcaaggcctggggttgcgccgtctcccgcccccacttccgccgccgcctccacgagctccaccgggcgcccccggtgctcggcctcctgcacgacctggaagacgagcgcatcccacgattcatccccaccaccgcgtcgtccttctccctcaccgctccgcacaaccggtactggcggaccctcgactgccgccacggccgcgccctcttcctctccaacccccagtccccggaaacccaggagcttctcgtgtgggagccaatcacgggtgcccagcagcgcataccggtgcccgcggcgctcgagagcaacttccccatggcggccgtgttctgcgcagcggacgggtgcgaccaccgcgcctgcctcgggggccctttccgcgtgctcttcatcctctcggtcgtggtaggccaagtcactgacgacgactgctatctcacgtcggcgtgcgcatattcgtcggagactggcacctggggcgagccgacctcgttgccccgccgctcgcccatgcccatgtgctttacattttattccagtgtgctcgttggaaagtctctgctctatttcatgtctgatgatgcgttcattctcgagtgtgacttggcaaggcacagactggctgtgttcaacccaccaaaccatgagccggtctgcggccaatataccatcatgctggcggaggacggtggactgggagtttgccaaaggatggatcagcagctcaaattgtggtcaagggaggtgagtgacagtgttgaagcacgatgggtgctgagccgggtcgtctacctggaaaatttgctcccggttggtgctctcgtggatgcagagactagagtgcaagtgctgggctttgccgagggagcaaataccattttcctaaccacggttgatggcatcttcatgatcaaactgcaatcggagcgggcgaggagggtgtgcgatgaatccgatgatcatctcttttgttatttgattccggttgtcagcttctacactcctgtgcctcgaggtgagcacagggatccgtcgttgaagcatagtgaggatgcaggtggtgaggagaaaacagtatatcaggcacaacaattgatcaacaaaatgagtcaaatgttaccaggggggactttgtcaacgctttcgattgcatcaaccacgccatagagaacagggttccaccctattatgaagttgctcctgagtgtaccagcatggtttacggacattgatgcagcttgctataggaagaatccatgaagacttcagccagcaaagaagatgctaggaactcaaaagacctcaggtagcaatgttaatgatgctccaccttcagagaaaaggtgattctgaataatgtgttgtatataccactgatccttttgccccagaggcccagacctgtgtggctaaatactcaaaattttcattatcc

SEQ ID NO: 15619 - protein, 449 aa, Triticum aestivum
  peptide (1)..(449): Ceres Seq. ID no. 15222150
  misc_feature (30)..(75): Pfam Name: Pfam Description:  F-box domain
  misc_feature (28)..(406): NCBI GI NO: 34915420 NR Description: contains EST C98814
  misc_feature (26)..(400): NCBI GI NO: 34395380 NR Description: unknown protein
  misc_feature (26)..(406): NCBI GI NO: 34915424 NR Description: hypothetical protein~similar to Oryza sativachromosome1
  misc_feature (29)..(416): NCBI GI NO: 34914028 NR Description: OJ1014_G12.29
  misc_feature (26)..(395): NCBI GI NO: 33146558 NR Description: unknown protein
  misc_feature (29)..(396): NCBI GI NO: 34394503 NR Description: unknown protein
  misc_feature (92)..(396): NCBI GI NO: 35215058 NR Description: hypothetical protein
  misc_feature (28)..(129): NCBI GI NO: 35215058 NR Description: hypothetical protein
  misc_feature (168)..(396): NCBI GI NO: 34394502 NR Description: hypothetical protein
  misc_feature (26)..(130): NCBI GI NO: 34394502 NR Description: hypothetical protein
AKSRAPKSPICSRWSNHSTIPRRTTMAASPPAILDELFEEILLRLPPDDPACLLRASLVCKAWGCAVSRPHFRRRLHELHRAPPVLGLLHDLEDERIPRFIPTTASSFSLTAPHNRYWRTLDCRHGRALFLSNPQSPETQELLVWEPITGAQQRIPVPAALESNFPMAAVFCAADGCDHRACLGGPFRVLFILSVVVGQVTDDDCYLTSACAYSSETGTWGEPTSLPRRSPMPMCFTFYSSVLVGKSLLYFMSDDAFILECDLARHRLAVFNPPNHEPVCGQYTIMLAEDGGLGVCQRMDQQLKLWSREVSDSVEARWVLSRVVYLENLLPVGALVDAETRVQVLGFAEGANTIFLTTVDGIFMIKLQSERARRVCDESDDHLFCYLIPVVSFYTPVPRGEHRDPSLKHSEDAGGEEKTVYQAQQLINKMSQMLPGGTLSTLSIASTTP

SEQ ID NO: 15620 - protein, 424 aa, Triticum aestivum
  peptide (1)..(424): Ceres Seq. ID no. 15222151
  misc_feature (5)..(50): Pfam Name: Pfam Description:  F-box domain
  misc_feature (3)..(381): NCBI GI NO: 34915420 NR Description: contains EST C98814
  misc_feature (1)..(375): NCBI GI NO: 34395380 NR Description: unknown protein
  misc_feature (1)..(381): NCBI GI NO: 34915424 NR Description: hypothetical protein~similar to Oryza sativachromosome1
  misc_feature (4)..(391): NCBI GI NO: 34914028 NR Description: OJ1014_G12.29
  misc_feature (1)..(370): NCBI GI NO: 33146558 NR Description: unknown protein
  misc_feature (4)..(371): NCBI GI NO: 34394503 NR Description: unknown protein
  misc_feature (67)..(371): NCBI GI NO: 35215058 NR Description: hypothetical protein
  misc_feature (3)..(104): NCBI GI NO: 35215058 NR Description: hypothetical protein
  misc_feature (143)..(371): NCBI GI NO: 34394502 NR Description: hypothetical protein
  misc_feature (1)..(105): NCBI GI NO: 34394502 NR Description: hypothetical protein
MAASPPAILDELFEEILLRLPPDDPACLLRASLVCKAWGCAVSRPHFRRRLHELHRAPPVLGLLHDLEDERIPRFIPTTASSFSLTAPHNRYWRTLDCRHGRALFLSNPQSPETQELLVWEPITGAQQRIPVPAALESNFPMAAVFCAADGCDHRACLGGPFRVLFILSVVVGQVTDDDCYLTSACAYSSETGTWGEPTSLPRRSPMPMCFTFYSSVLVGKSLLYFMSDDAFILECDLARHRLAVFNPPNHEPVCGQYTIMLAEDGGLGVCQRMDQQLKLWSREVSDSVEARWVLSRVVYLENLLPVGALVDAETRVQVLGFAEGANTIFLTTVDGIFMIKLQSERARRVCDESDDHLFCYLIPVVSFYTPVPRGEHRDPSLKHSEDAGGEEKTVYQAQQLINKMSQMLPGGTLSTLSIASTTP

SEQ ID NO: 15621 - protein, 283 aa, Triticum aestivum
  peptide (1)..(283): Ceres Seq. ID no. 15222152
  misc_feature (1)..(240): NCBI GI NO: 34915420 NR Description: contains EST C98814
  misc_feature (1)..(234): NCBI GI NO: 34395380 NR Description: unknown protein
  misc_feature (1)..(240): NCBI GI NO: 34915424 NR Description: hypothetical protein~similar to Oryza sativachromosome1
  misc_feature (1)..(250): NCBI GI NO: 34914028 NR Description: OJ1014_G12.29
  misc_feature (1)..(229): NCBI GI NO: 33146558 NR Description: unknown protein
  misc_feature (1)..(230): NCBI GI NO: 34394503 NR Description: unknown protein
  misc_feature (1)..(230): NCBI GI NO: 35215058 NR Description: hypothetical protein
  misc_feature (2)..(230): NCBI GI NO: 34394502 NR Description: hypothetical protein
  misc_feature (1)..(230): NCBI GI NO: 37531026 NR Description: hypothetical protein
  misc_feature (1)..(230): NCBI GI NO: 34394504 NR Description: unknown protein
MAAVFCAADGCDHRACLGGPFRVLFILSVVVGQVTDDDCYLTSACAYSSETGTWGEPTSLPRRSPMPMCFTFYSSVLVGKSLLYFMSDDAFILECDLARHRLAVFNPPNHEPVCGQYTIMLAEDGGLGVCQRMDQQLKLWSREVSDSVEARWVLSRVVYLENLLPVGALVDAETRVQVLGFAEGANTIFLTTVDGIFMIKLQSERARRVCDESDDHLFCYLIPVVSFYTPVPRGEHRDPSLKHSEDAGGEEKTVYQAQQLINKMSQMLPGGTLSTLSIASTTP

SEQ ID NO: 15622 - DNA, 1480 bp, Triticum aestivum
  misc_feature (1)..(1480): Ceres Seq. ID no. 14302772
acctacctactgcctccattcccaccacagctagcttcagcttttagctaagctctacttccctcccgagctaagcatcttcttgatttctcggtgatcggattcggatggacagcgcaagaagctgcctcgtggacgacgtgagcagcggcgcgtccacgggcaagaaggcctctccgtccccggccgcgccggcgaccaagccgctgcagcgcgtgggcagcggggccagcgcggtcatggacgcgccggagcccggcgccgaggcggactccggccgcgtcggcaggctgccgtcctccaagtacaagggcgtggtgccgcagcccaacgggcgctggggcgcgcagatctacgagcgccaccagcgcgtctggctcggcaccttcacgggggaggccgaggctgcgcgcgcctacgacgcggcggcgcagcgcttccgcggccgcgacgcagtcaccaacttccgctcgctcaccgagtccgacccggaggacgccgccgagctccgcttcctcgctgcccgctccaaggccgaggtcgtcgacatgctgcgcaagcacacctatcccgacgagctcgctcagtacaagcgcgcctacttcgccgccgctgcggcgtcctcccctacatcgtcctcggtgcctcccgcctcgtcgccctcttcggcggcttcgccctcgccggcggcgcggcgcgagcacctgttcgacaagacggtcacgcccagcgacgtggggaagctgaaccggcttgtgataccgaagcagcacgccgagaagcactttcctctccagcttccttccgccggcgccgccgtgtccggcgagtgcaagggcatgcttctcaacttcgacgactcggccggcaaggtgtggaggttccggtactcgtactggaacagcagccagagctacgtgctcaccaagggctggagccgctttgtcaaggagaagggcctgcacgccggcgacgccgtcgggttctaccgctctgcctcaggcagcaaccagctcttcatcgactgcaagctccggtccaagaccacgacgatgacgacgactttcgtcaacgcggcggccgccccgtcgccggcacccgtgatgaggaccgtgcgactcttcggcgtcgaccttctcacggcgccggcgccgagtcacgtgcccgagcacgaggactgcagcatggtgcccaagacaagcaagagatccatggacgccaacgcagcggccactccggcgcacgcggtctggaagaagcggtgcatagacttcgcgctgacctagccagctagcgtttttcctccatggttgctttgcttgcctccaaatttccatgttagtagcttagagctcttgatcggtccaagtgtttgccttttttttcctcttcttctcatacacaagttagctctaaatccagtcttctttaattaatctactgtaaattaagcccgttctcgaaatggcaagtgttcacc

SEQ ID NO: 15623 - protein, 392 aa, Triticum aestivum
  peptide (1)..(392): Ceres Seq. ID no. 14302773
  misc_feature (200)..(313): Pfam Name: Pfam Description:  B3 DNA binding domain
  misc_feature (1)..(391): NCBI GI NO: 34911404 NR Description: DNA-binding protein RAV2-like
  misc_feature (1)..(311): NCBI GI NO: 18409138 NR Description: AP2 domain protein RAP2.8 (RAV2)
  misc_feature (1)..(311): NCBI GI NO: 21554039 NR Description: putative RAV2-like DNA-binding protein
  misc_feature (16)..(311): NCBI GI NO: 2281641 NR Description: AP2 domain containing protein RAP2.8
  misc_feature (17)..(322): NCBI GI NO: 15222622 NR Description: AP2 domain transcription factor, putative
  misc_feature (6)..(311): NCBI GI NO: 15222217 NR Description: AP2 domain transcription factor, putative  (RAV1)
  misc_feature (187)..(343): NCBI GI NO: 34895676 NR Description: putative DNA binding protein RAV2
  misc_feature (63)..(160): NCBI GI NO: 34895676 NR Description: putative DNA binding protein RAV2
  misc_feature (13)..(343): NCBI GI NO: 34895690 NR Description: putative DNA binding protein RAV2
  misc_feature (9)..(240): NCBI GI NO: 15230871 NR Description: AP2 domain transcription factor, putative
MDSARSCLVDDVSSGASTGKKASPSPAAPATKPLQRVGSGASAVMDAPEPGAEADSGRVGRLPSSKYKGVVPQPNGRWGAQIYERHQRVWLGTFTGEAEAARAYDAAAQRFRGRDAVTNFRSLTESDPEDAAELRFLAARSKAEVVDMLRKHTYPDELAQYKRAYFAAAAASSPTSSSVPPASSPSSAASPSPAARREHLFDKTVTPSDVGKLNRLVIPKQHAEKHFPLQLPSAGAAVSGECKGMLLNFDDSAGKVWRFRYSYWNSSQSYVLTKGWSRFVKEKGLHAGDAVGFYRSASGSNQLFIDCKLRSKTTTMTTTFVNAAAAPSPAPVMRTVRLFGVDLLTAPAPSHVPEHEDCSMVPKTSKRSMDANAAATPAHAVWKKRCIDFALT

SEQ ID NO: 15624 - protein, 348 aa, Triticum aestivum
  peptide (1)..(348): Ceres Seq. ID no. 14302774
  misc_feature (156)..(269): Pfam Name: Pfam Description:  B3 DNA binding domain
  misc_feature (1)..(347): NCBI GI NO: 34911404 NR Description: DNA-binding protein RAV2-like
  misc_feature (1)..(267): NCBI GI NO: 18409138 NR Description: AP2 domain protein RAP2.8 (RAV2)
  misc_feature (1)..(267): NCBI GI NO: 21554039 NR Description: putative RAV2-like DNA-binding protein
  misc_feature (1)..(267): NCBI GI NO: 2281641 NR Description: AP2 domain containing protein RAP2.8
  misc_feature (1)..(278): NCBI GI NO: 15222622 NR Description: AP2 domain transcription factor, putative
  misc_feature (1)..(267): NCBI GI NO: 15222217 NR Description: AP2 domain transcription factor, putative  (RAV1)
  misc_feature (143)..(299): NCBI GI NO: 34895676 NR Description: putative DNA binding protein RAV2
  misc_feature (19)..(116): NCBI GI NO: 34895676 NR Description: putative DNA binding protein RAV2
  misc_feature (1)..(299): NCBI GI NO: 34895690 NR Description: putative DNA binding protein RAV2
  misc_feature (1)..(196): NCBI GI NO: 15230871 NR Description: AP2 domain transcription factor, putative
MDAPEPGAEADSGRVGRLPSSKYKGVVPQPNGRWGAQIYERHQRVWLGTFTGEAEAARAYDAAAQRFRGRDAVTNFRSLTESDPEDAAELRFLAARSKAEVVDMLRKHTYPDELAQYKRAYFAAAAASSPTSSSVPPASSPSSAASPSPAARREHLFDKTVTPSDVGKLNRLVIPKQHAEKHFPLQLPSAGAAVSGECKGMLLNFDDSAGKVWRFRYSYWNSSQSYVLTKGWSRFVKEKGLHAGDAVGFYRSASGSNQLFIDCKLRSKTTTMTTTFVNAAAAPSPAPVMRTVRLFGVDLLTAPAPSHVPEHEDCSMVPKTSKRSMDANAAATPAHAVWKKRCIDFALT

SEQ ID NO: 15625 - protein, 245 aa, Triticum aestivum
  peptide (1)..(245): Ceres Seq. ID no. 14302775
  misc_feature (53)..(166): Pfam Name: Pfam Description:  B3 DNA binding domain
  misc_feature (1)..(244): NCBI GI NO: 34911404 NR Description: DNA-binding protein RAV2-like
  misc_feature (1)..(164): NCBI GI NO: 18409138 NR Description: AP2 domain protein RAP2.8 (RAV2)
  misc_feature (1)..(164): NCBI GI NO: 21554039 NR Description: putative RAV2-like DNA-binding protein
  misc_feature (1)..(164): NCBI GI NO: 2281641 NR Description: AP2 domain containing protein RAP2.8
  misc_feature (1)..(175): NCBI GI NO: 15222622 NR Description: AP2 domain transcription factor, putative
  misc_feature (1)..(164): NCBI GI NO: 15222217 NR Description: AP2 domain transcription factor, putative  (RAV1)
  misc_feature (40)..(196): NCBI GI NO: 34895676 NR Description: putative DNA binding protein RAV2
  misc_feature (1)..(13): NCBI GI NO: 34895676 NR Description: putative DNA binding protein RAV2
  misc_feature (1)..(196): NCBI GI NO: 34895690 NR Description: putative DNA binding protein RAV2
  misc_feature (1)..(93): NCBI GI NO: 15230871 NR Description: AP2 domain transcription factor, putative
MLRKHTYPDELAQYKRAYFAAAAASSPTSSSVPPASSPSSAASPSPAARREHLFDKTVTPSDVGKLNRLVIPKQHAEKHFPLQLPSAGAAVSGECKGMLLNFDDSAGKVWRFRYSYWNSSQSYVLTKGWSRFVKEKGLHAGDAVGFYRSASGSNQLFIDCKLRSKTTTMTTTFVNAAAAPSPAPVMRTVRLFGVDLLTAPAPSHVPEHEDCSMVPKTSKRSMDANAAATPAHAVWKKRCIDFALT

SEQ ID NO: 15626 - DNA, 1335 bp, Triticum aestivum
  misc_feature (1)..(1335): Ceres Seq. ID no. 13597721
ctaaaaccctagctccaccaccacccacctaaaacccgccgccgccaccgccaccgccgttccccttcttccccgccaccgggagatcctggccatcgggtctccttccttcctccgaggatcaaagttcaggttggcgccaacatgtcgtcgaagaagatagagctagaccacaaggacatggttcatgattctgccattgactattatgggaagcgccttgccacagcctcctctgactccactgtgaagatcaccaacattgggagtgcatctgccccgtcccagctcgttgcgaccctcactggccactatggtcctgtgtggcgtgttggatgggcccatcccaagtatggttccattctcgcatcctgcggctatgatggccgtgtgatagtctggaaggaggctgccactgggcaatggtctcagctccatgtgtttgacaaccacaaggcctcagttaactccattgcttgggctccatatgaacttggcctttgccttgcctgtgggtcttctgacggcaccatctctgtcatctccatgcggcttgatacaggaggatgtgacgctgcaaccattgagcgggcacaccctgttggcgtgacagcagtctcctgggctccggcagcagcacttgggtccatggttggctcagatcagctcgtccacaagatcgtgtctggtggctttgactgtgtcgtcaaggtgtgggagtttgtcaatggtggctggaagctggagagtgctttggtctctgacatgcacaaagagtgcgtgagagacgtctcatgggcaccggtcctgggcctggcaaagtcaaccatcgccagtgcttcccaagacggcaaggttgtcatctggaccagtggcaaaggaggaggcaagtgggaaggaaagctcatgcgtgactttgaggctccggtgtggagggtgtcctggtccctgacgggaaacatactgtctgtggctgccggcgagggcgacattactctgtggaaggaatcgtcggacgggcagtgggagtcgctgtggaccaaggcctcagaggagccgccgcaggaggagcaggcgatcgaggaggccatgcagtaggggagtcgacgccacatctcccgtgttgattttggaccatgattcgtgtttctagcgccaacgccatgacttgctttcacctgctgccctgatactcttagagatactcgttgccatcttttttgccgtttgtttctatatggacaatgtctgattgcactgtttaagttttatactggtcatgtactcttatgcacaccgtcagaatgtatcgcctgtttgaactgtttatatcct

SEQ ID NO: 15627 - protein, 317 aa, Triticum aestivum
  peptide (1)..(317): Ceres Seq. ID no. 13597722
  misc_feature (1)..(305): NCBI GI NO: 34897242 NR Description: putative coat protein complex II (COPII) component
  misc_feature (1)..(317): NCBI GI NO: 34393220 NR Description: putative Sec13p
  misc_feature (1)..(297): NCBI GI NO: 15227692 NR Description: transducin / WD-40 repeat protein family
  misc_feature (1)..(297): NCBI GI NO: 15232095 NR Description: protein transport protein SEC13 family / WD-40repeat protein family
  misc_feature (1)..(297): NCBI GI NO: 21593146 NR Description: putative protein transport protein SEC13
  misc_feature (1)..(297): NCBI GI NO: 21593236 NR Description: transport protein SEC13, putative
  misc_feature (1)..(299): NCBI GI NO: 18147582 NR Description: Sec13p [Oryza sativa]
  misc_feature (6)..(294): NCBI GI NO: 38174439 NR Description: Unknown (protein for MGC:76017)
  misc_feature (6)..(294): NCBI GI NO: 27696242 NR Description: Similar to RIKEN cDNA 1110003H02 gene
  misc_feature (6)..(294): NCBI GI NO: 12805321 NR Description: SEC13 related gene [Mus musculus]
MSSKKIELDHKDMVHDSAIDYYGKRLATASSDSTVKITNIGSASAPSQLVATLTGHYGPVWRVGWAHPKYGSILASCGYDGRVIVWKEAATGQWSQLHVFDNHKASVNSIAWAPYELGLCLACGSSDGTISVISMRLDTGGCDAATIERAHPVGVTAVSWAPAAALGSMVGSDQLVHKIVSGGFDCVVKVWEFVNGGWKLESALVSDMHKECVRDVSWAPVLGLAKSTIASASQDGKVVIWTSGKGGGKWEGKLMRDFEAPVWRVSWSLTGNILSVAAGEGDITLWKESSDGQWESLWTKASEEPPQEEQAIEEAMQ

SEQ ID NO: 15628 - protein, 305 aa, Triticum aestivum
  peptide (1)..(305): Ceres Seq. ID no. 13597723
  misc_feature (1)..(293): NCBI GI NO: 34897242 NR Description: putative coat protein complex II (COPII) component
  misc_feature (1)..(305): NCBI GI NO: 34393220 NR Description: putative Sec13p
  misc_feature (1)..(285): NCBI GI NO: 15227692 NR Description: transducin / WD-40 repeat protein family
  misc_feature (1)..(285): NCBI GI NO: 15232095 NR Description: protein transport protein SEC13 family / WD-40repeat protein family
  misc_feature (1)..(285): NCBI GI NO: 21593146 NR Description: putative protein transport protein SEC13
  misc_feature (1)..(285): NCBI GI NO: 21593236 NR Description: transport protein SEC13, putative
  misc_feature (1)..(287): NCBI GI NO: 18147582 NR Description: Sec13p [Oryza sativa]
  misc_feature (1)..(282): NCBI GI NO: 38174439 NR Description: Unknown (protein for MGC:76017)
  misc_feature (1)..(282): NCBI GI NO: 27696242 NR Description: Similar to RIKEN cDNA 1110003H02 gene
  misc_feature (1)..(282): NCBI GI NO: 12805321 NR Description: SEC13 related gene [Mus musculus]
MVHDSAIDYYGKRLATASSDSTVKITNIGSASAPSQLVATLTGHYGPVWRVGWAHPKYGSILASCGYDGRVIVWKEAATGQWSQLHVFDNHKASVNSIAWAPYELGLCLACGSSDGTISVISMRLDTGGCDAATIERAHPVGVTAVSWAPAAALGSMVGSDQLVHKIVSGGFDCVVKVWEFVNGGWKLESALVSDMHKECVRDVSWAPVLGLAKSTIASASQDGKVVIWTSGKGGGKWEGKLMRDFEAPVWRVSWSLTGNILSVAAGEGDITLWKESSDGQWESLWTKASEEPPQEEQAIEEAMQ

SEQ ID NO: 15629 - protein, 183 aa, Triticum aestivum
  peptide (1)..(183): Ceres Seq. ID no. 13597724
  misc_feature (1)..(171): NCBI GI NO: 34897242 NR Description: putative coat protein complex II (COPII) component
  misc_feature (1)..(183): NCBI GI NO: 34393220 NR Description: putative Sec13p
  misc_feature (1)..(163): NCBI GI NO: 15227692 NR Description: transducin / WD-40 repeat protein family
  misc_feature (1)..(163): NCBI GI NO: 15232095 NR Description: protein transport protein SEC13 family / WD-40repeat protein family
  misc_feature (1)..(163): NCBI GI NO: 21593146 NR Description: putative protein transport protein SEC13
  misc_feature (1)..(163): NCBI GI NO: 21593236 NR Description: transport protein SEC13, putative
  misc_feature (1)..(165): NCBI GI NO: 18147582 NR Description: Sec13p [Oryza sativa]
  misc_feature (1)..(160): NCBI GI NO: 38174439 NR Description: Unknown (protein for MGC:76017)
  misc_feature (1)..(160): NCBI GI NO: 27696242 NR Description: Similar to RIKEN cDNA 1110003H02 gene
  misc_feature (1)..(160): NCBI GI NO: 12805321 NR Description: SEC13 related gene [Mus musculus]
MRLDTGGCDAATIERAHPVGVTAVSWAPAAALGSMVGSDQLVHKIVSGGFDCVVKVWEFVNGGWKLESALVSDMHKECVRDVSWAPVLGLAKSTIASASQDGKVVIWTSGKGGGKWEGKLMRDFEAPVWRVSWSLTGNILSVAAGEGDITLWKESSDGQWESLWTKASEEPPQEEQAIEEAMQ

SEQ ID NO: 15630 - DNA, 1226 bp, Triticum aestivum
  misc_feature (1)..(1226): Ceres Seq. ID no. 13598570
atcaggcaccacccaagatcgatcatgaagccatacatgcccacggtactgagaccccctagggtggtggccatcctggccgtggtcctggcggcggcgctcgccacagccgtgaacgctcagcagtgcggctcccaggctggtggcgcgacgtgcgcaaactgtctctgctgcagcaaattcgggtactgcggcagcggcgacgcctactgcggtgccggctgtcagagccagtgcagcggctgcggccccacccctcccggccccagccccggcgggggcgtgtcgtccatcatctccagggacctcttcgagcggctccttcttcaccgcaatgactgccaagaggcccgcgggttctacacgtacgacgccttcctcgccgccgccgccgcgttcccgtcattcggcaccacggggagcacggagacgcggaagcgggaggtggcggccttcctggggcaaacttcccacgagaccactggcgggtggcccgcggcgcccgacggaccgtacgcctggggctactgcttcaagcaggagcagggctcgccgggaagctactgcgagccaaagccggagtggccgtgcgcgtcgggcaagaaatactacggtcgcggccccatccagctctcatggaactacaactatggccccgcggggcgtgccatcggggtggacctgctcaacaacccggacctggtcgccgcggacgcgacggtgtcgtttaagacggcgttatggttttggatgacggctcaggcgaacaagccgtcgtcccatgccgtgatcacaggccaatggaccccgtcgggcacggacaacgctgctggtcgggtgcctgggtacggtgtcatcaccaacataatcaacggcgggctcgagtgcggtagggggcaagatgaccgtgttgctaaccggatcgggttctacaagcgctactgcgatgtcctcggcgttggctatggtaacaacctcgactgctacaaccagaggccgtttaacagtgggctctcgatggggcttgccactgagtgacaacatactaagactgtgagcgagtcctccatgcatggatgtatgaatgtgatcacccataaataagcttgagaagtactgtttgggtaaatttcccattgttgtgtgagtatctctcgactcggtgtagaggttgagaatgttgcatctttattaaaaggactttgctacacctacgtaatttagct

SEQ ID NO: 15631 - protein, 345 aa, Triticum aestivum
  peptide (1)..(345): Ceres Seq. ID no. 13598571
  misc_feature (40)..(79): Pfam Name: Pfam Description:  Chitin recognition protein
  misc_feature (19)..(345): NCBI GI NO: 7435361 NR Description: probable chitinase (EC 3.2.1.14) - barley
  misc_feature (21)..(345): NCBI GI NO: 481896 NR Description: chitinase (EC 3.2.1.14) - rice
  misc_feature (24)..(345): NCBI GI NO: 1076740 NR Description: chitinase (EC 3.2.1.14) - rice
  misc_feature (25)..(336): NCBI GI NO: 6164588 NR Description: chitinase [Poa pratensis]
  misc_feature (26)..(334): NCBI GI NO: 11344587 NR Description: seed chitinase-a [Secale cereale]
  misc_feature (15)..(339): NCBI GI NO: 18146827 NR Description: chitinase 2 [Triticum aestivum]
  misc_feature (25)..(334): NCBI GI NO: 2506281 NR Description: 26 kDa endochitinase 1 precursor
  misc_feature (41)..(334): NCBI GI NO: 542173 NR Description: chitinase (EC 3.2.1.14) a - rye
  misc_feature (41)..(334): NCBI GI NO: 741317 NR Description: chitinase a
  misc_feature (21)..(334): NCBI GI NO: 12407647 NR Description: 31
IRHHPRSIMKPYMPTVLRPPRVVAILAVVLAAALATAVNAQQCGSQAGGATCANCLCCSKFGYCGSGDAYCGAGCQSQCSGCGPTPPGPSPGGGVSSIISRDLFERLLLHRNDCQEARGFYTYDAFLAAAAAFPSFGTTGSTETRKREVAAFLGQTSHETTGGWPAAPDGPYAWGYCFKQEQGSPGSYCEPKPEWPCASGKKYYGRGPIQLSWNYNYGPAGRAIGVDLLNNPDLVAADATVSFKTALWFWMTAQANKPSSHAVITGQWTPSGTDNAAGRVPGYGVITNIINGGLECGRGQDDRVANRIGFYKRYCDVLGVGYGNNLDCYNQRPFNSGLSMGLATE

SEQ ID NO: 15632 - protein, 337 aa, Triticum aestivum
  peptide (1)..(337): Ceres Seq. ID no. 13598572
  misc_feature (32)..(71): Pfam Name: Pfam Description:  Chitin recognition protein
  misc_feature (11)..(337): NCBI GI NO: 7435361 NR Description: probable chitinase (EC 3.2.1.14) - barley
  misc_feature (13)..(337): NCBI GI NO: 481896 NR Description: chitinase (EC 3.2.1.14) - rice
  misc_feature (16)..(337): NCBI GI NO: 1076740 NR Description: chitinase (EC 3.2.1.14) - rice
  misc_feature (17)..(328): NCBI GI NO: 6164588 NR Description: chitinase [Poa pratensis]
  misc_feature (18)..(326): NCBI GI NO: 11344587 NR Description: seed chitinase-a [Secale cereale]
  misc_feature (7)..(331): NCBI GI NO: 18146827 NR Description: chitinase 2 [Triticum aestivum]
  misc_feature (17)..(326): NCBI GI NO: 2506281 NR Description: 26 kDa endochitinase 1 precursor
  misc_feature (33)..(326): NCBI GI NO: 542173 NR Description: chitinase (EC 3.2.1.14) a - rye
  misc_feature (33)..(326): NCBI GI NO: 741317 NR Description: chitinase a
  misc_feature (13)..(326): NCBI GI NO: 12407647 NR Description: 31
MKPYMPTVLRPPRVVAILAVVLAAALATAVNAQQCGSQAGGATCANCLCCSKFGYCGSGDAYCGAGCQSQCSGCGPTPPGPSPGGGVSSIISRDLFERLLLHRNDCQEARGFYTYDAFLAAAAAFPSFGTTGSTETRKREVAAFLGQTSHETTGGWPAAPDGPYAWGYCFKQEQGSPGSYCEPKPEWPCASGKKYYGRGPIQLSWNYNYGPAGRAIGVDLLNNPDLVAADATVSFKTALWFWMTAQANKPSSHAVITGQWTPSGTDNAAGRVPGYGVITNIINGGLECGRGQDDRVANRIGFYKRYCDVLGVGYGNNLDCYNQRPFNSGLSMGLATE

SEQ ID NO: 15633 - protein, 333 aa, Triticum aestivum
  peptide (1)..(333): Ceres Seq. ID no. 13598573
  misc_feature (28)..(67): Pfam Name: Pfam Description:  Chitin recognition protein
  misc_feature (7)..(333): NCBI GI NO: 7435361 NR Description: probable chitinase (EC 3.2.1.14) - barley
  misc_feature (9)..(333): NCBI GI NO: 481896 NR Description: chitinase (EC 3.2.1.14) - rice
  misc_feature (12)..(333): NCBI GI NO: 1076740 NR Description: chitinase (EC 3.2.1.14) - rice
  misc_feature (13)..(324): NCBI GI NO: 6164588 NR Description: chitinase [Poa pratensis]
  misc_feature (14)..(322): NCBI GI NO: 11344587 NR Description: seed chitinase-a [Secale cereale]
  misc_feature (3)..(327): NCBI GI NO: 18146827 NR Description: chitinase 2 [Triticum aestivum]
  misc_feature (13)..(322): NCBI GI NO: 2506281 NR Description: 26 kDa endochitinase 1 precursor
  misc_feature (29)..(322): NCBI GI NO: 542173 NR Description: chitinase (EC 3.2.1.14) a - rye
  misc_feature (29)..(322): NCBI GI NO: 741317 NR Description: chitinase a
  misc_feature (9)..(322): NCBI GI NO: 12407647 NR Description: 31
MPTVLRPPRVVAILAVVLAAALATAVNAQQCGSQAGGATCANCLCCSKFGYCGSGDAYCGAGCQSQCSGCGPTPPGPSPGGGVSSIISRDLFERLLLHRNDCQEARGFYTYDAFLAAAAAFPSFGTTGSTETRKREVAAFLGQTSHETTGGWPAAPDGPYAWGYCFKQEQGSPGSYCEPKPEWPCASGKKYYGRGPIQLSWNYNYGPAGRAIGVDLLNNPDLVAADATVSFKTALWFWMTAQANKPSSHAVITGQWTPSGTDNAAGRVPGYGVITNIINGGLECGRGQDDRVANRIGFYKRYCDVLGVGYGNNLDCYNQRPFNSGLSMGLATE

SEQ ID NO: 15634 - DNA, 1434 bp, Triticum aestivum
  misc_feature (1)..(1434): Ceres Seq. ID no. 13662855
aacgctccccgcaaccctccaaaccaaagccccccaccgctctctcgcccccacccataaacccccgccgcccagatcctcctcctcctccctcctccccgtcgccgcgccgccgccgccatgcatcccgacgccacctccccctcccaccgcatcgcccgcgtcgccgcgcacctcaacccgacacgcccgcagatggaggagggcgcggcgctgaggcccgcggcgtgccgcgccaagggcggcgcgccggggttcaaggtggcggtggtgggcgcggccgggggcatcggccagtcgctgtcgctgctcatgaagatgaacccgctcgtctccgtgctccacctctacgacgtcgtcaacacgcccggggtcaccgccgacgtcagccacatggacaccagcgccgtggtgcgcggcttcattggccaacaacagcttgaggcagcacttacaggaatggatcttgtcatcatccctgccggcctcccaagaaaaccaggaatgacaagggatgatctgttcaacaaaaatgctgggatcgttcgctcgatctgtgaaggcgttgccaagagctgtcctaatgctattgtgaatttgatcagcaaccctgtgaactcaaccgtccccattgctgcggaggttttcaagagagctggaacttactgtcccaagcgtctccttggagtgacaacacttgatgtagcgagggctaatacctttgtggcggaagtgcttggagttgatccaagagaagtcaatgttccagttgttggcgggcatgcaggggtcactatattacccctcctgtcacaggtcagccccccatgctcattcactccagatgaaatcagctatttgactaaccgcatacagaacggtggtacagaagttgtggaggcaaaggctggagcaggctctgcaactttgtcaatggcttttgctgctgcaaaattcgccgacgcgtgcctgcgaggaatgcgcggagatgctggcatcgtggagtgttcatacgtcgcatctgaggtgacagagctgccgttcttcgcatcgaaggtgaggttaggtcgtggtggagccgaagagattctccctcttgggccattgaatgactttgagagggccggcctggagaaggcgaagaaggagctgagcgagagcattgagaagggcgtgtcgttcatgaacaagtgagatcgtacgaatggaccgtccccgacctatacagatatgcaaagactaaagaaagagtgatatagtgctccaatacctgtaaagccacccctgcatgtgcaagacagtactagtactcctttagctgcactgagccttttcccccgtcgtggaatataaatcatgtactcgtactagacaagaacgtatacttttgtgaatagctggaccgaacatgtttacagccaaaaaaaaaaaaaa

SEQ ID NO: 15635 - protein, 357 aa, Triticum aestivum
  peptide (1)..(357): Ceres Seq. ID no. 15220192
  misc_feature (191)..(355): Pfam Name: Pfam Description:  lactate/malate dehydrogenase
  misc_feature (1)..(357): NCBI GI NO: 34915204 NR Description: putative  glyoxysomal malate dehydrogenase
  misc_feature (4)..(357): NCBI GI NO: 3183079 NR Description: MALATE DEHYDROGENASE, GLYOXYSOMAL PRECURSOR
  misc_feature (9)..(355): NCBI GI NO: 126894 NR Description: MALATE DEHYDROGENASE, GLYOXYSOMAL PRECURSOR
  misc_feature (9)..(355): NCBI GI NO: 1170897 NR Description: MALATE DEHYDROGENASE, GLYOXYSOMAL PRECURSOR
  misc_feature (9)..(357): NCBI GI NO: 169977 NR Description: malate dehydrogenase
  misc_feature (9)..(357): NCBI GI NO: 1346501 NR Description: MALATE DEHYDROGENASE, GLYOXYSOMAL PRECURSOR
  misc_feature (11)..(357): NCBI GI NO: 12644436 NR Description: Malate dehydrogenase 1, glyoxysomal precursor
  misc_feature (9)..(357): NCBI GI NO: 15242466 NR Description: malate dehydrogenase, glyoxysomal
  misc_feature (9)..(357): NCBI GI NO: 16323157 NR Description: AT5g09660/F17I14_150 [Arabidopsis thaliana]
  misc_feature (1)..(357): NCBI GI NO: 7431179 NR Description: malate dehydrogenase (EC 1
MHPDATSPSHRIARVAAHLNPTRPQMEEGAALRPAACRAKGGAPGFKVAVVGAAGGIGQSLSLLMKMNPLVSVLHLYDVVNTPGVTADVSHMDTSAVVRGFIGQQQLEAALTGMDLVIIPAGLPRKPGMTRDDLFNKNAGIVRSICEGVAKSCPNAIVNLISNPVNSTVPIAAEVFKRAGTYCPKRLLGVTTLDVARANTFVAEVLGVDPREVNVPVVGGHAGVTILPLLSQVSPPCSFTPDEISYLTNRIQNGGTEVVEAKAGAGSATLSMAFAAAKFADACLRGMRGDAGIVECSYVASEVTELPFFASKVRLGRGGAEEILPLGPLNDFERAGLEKAKKELSESIEKGVSFMNK

SEQ ID NO: 15636 - protein, 332 aa, Triticum aestivum
  peptide (1)..(332): Ceres Seq. ID no. 15220193
  misc_feature (166)..(330): Pfam Name: Pfam Description:  lactate/malate dehydrogenase
  misc_feature (1)..(332): NCBI GI NO: 34915204 NR Description: putative  glyoxysomal malate dehydrogenase
  misc_feature (1)..(332): NCBI GI NO: 3183079 NR Description: MALATE DEHYDROGENASE, GLYOXYSOMAL PRECURSOR
  misc_feature (1)..(330): NCBI GI NO: 126894 NR Description: MALATE DEHYDROGENASE, GLYOXYSOMAL PRECURSOR
  misc_feature (1)..(330): NCBI GI NO: 1170897 NR Description: MALATE DEHYDROGENASE, GLYOXYSOMAL PRECURSOR
  misc_feature (1)..(332): NCBI GI NO: 169977 NR Description: malate dehydrogenase
  misc_feature (1)..(332): NCBI GI NO: 1346501 NR Description: MALATE DEHYDROGENASE, GLYOXYSOMAL PRECURSOR
  misc_feature (1)..(332): NCBI GI NO: 12644436 NR Description: Malate dehydrogenase 1, glyoxysomal precursor
  misc_feature (1)..(332): NCBI GI NO: 15242466 NR Description: malate dehydrogenase, glyoxysomal
  misc_feature (1)..(332): NCBI GI NO: 16323157 NR Description: AT5g09660/F17I14_150 [Arabidopsis thaliana]
  misc_feature (1)..(332): NCBI GI NO: 7431179 NR Description: malate dehydrogenase (EC 1
MEEGAALRPAACRAKGGAPGFKVAVVGAAGGIGQSLSLLMKMNPLVSVLHLYDVVNTPGVTADVSHMDTSAVVRGFIGQQQLEAALTGMDLVIIPAGLPRKPGMTRDDLFNKNAGIVRSICEGVAKSCPNAIVNLISNPVNSTVPIAAEVFKRAGTYCPKRLLGVTTLDVARANTFVAEVLGVDPREVNVPVVGGHAGVTILPLLSQVSPPCSFTPDEISYLTNRIQNGGTEVVEAKAGAGSATLSMAFAAAKFADACLRGMRGDAGIVECSYVASEVTELPFFASKVRLGRGGAEEILPLGPLNDFERAGLEKAKKELSESIEKGVSFMNK

SEQ ID NO: 15637 - protein, 293 aa, Triticum aestivum
  peptide (1)..(293): Ceres Seq. ID no. 15220194
  misc_feature (127)..(291): Pfam Name: Pfam Description:  lactate/malate dehydrogenase
  misc_feature (1)..(293): NCBI GI NO: 34915204 NR Description: putative  glyoxysomal malate dehydrogenase
  misc_feature (1)..(293): NCBI GI NO: 3183079 NR Description: MALATE DEHYDROGENASE, GLYOXYSOMAL PRECURSOR
  misc_feature (1)..(291): NCBI GI NO: 126894 NR Description: MALATE DEHYDROGENASE, GLYOXYSOMAL PRECURSOR
  misc_feature (1)..(291): NCBI GI NO: 1170897 NR Description: MALATE DEHYDROGENASE, GLYOXYSOMAL PRECURSOR
  misc_feature (1)..(293): NCBI GI NO: 169977 NR Description: malate dehydrogenase
  misc_feature (1)..(293): NCBI GI NO: 1346501 NR Description: MALATE DEHYDROGENASE, GLYOXYSOMAL PRECURSOR
  misc_feature (1)..(293): NCBI GI NO: 12644436 NR Description: Malate dehydrogenase 1, glyoxysomal precursor
  misc_feature (1)..(293): NCBI GI NO: 15242466 NR Description: malate dehydrogenase, glyoxysomal
  misc_feature (1)..(293): NCBI GI NO: 16323157 NR Description: AT5g09660/F17I14_150 [Arabidopsis thaliana]
  misc_feature (1)..(293): NCBI GI NO: 7431179 NR Description: malate dehydrogenase (EC 1
MKMNPLVSVLHLYDVVNTPGVTADVSHMDTSAVVRGFIGQQQLEAALTGMDLVIIPAGLPRKPGMTRDDLFNKNAGIVRSICEGVAKSCPNAIVNLISNPVNSTVPIAAEVFKRAGTYCPKRLLGVTTLDVARANTFVAEVLGVDPREVNVPVVGGHAGVTILPLLSQVSPPCSFTPDEISYLTNRIQNGGTEVVEAKAGAGSATLSMAFAAAKFADACLRGMRGDAGIVECSYVASEVTELPFFASKVRLGRGGAEEILPLGPLNDFERAGLEKAKKELSESIEKGVSFMNK

SEQ ID NO: 15638 - DNA, 1517 bp, Triticum aestivum
  misc_feature (1)..(1517): Ceres Seq. ID no. 15225493
gataaaaaaaggaagaagaggatgatacgtaacggcgtgacggaaagaaaaagcgggagcgaatagacagagagggggcccggccgtcacgtcgtcttcctcctcgctccattagagccgagctctcgggtctccgcctctgctcgcctcccactgttatcggaggcgctgcggacgaagcagcggcactatgcgtccgtccctctgtcatgttccttttcttcttctgctactattacatgtggtcattgctagaccattctttccactgccaagtaagaccagtaatgaagagaagaagcccatacagacatttcgaccgtataacattgctcaccgtggctcaaacggggaaatcccagaggaaacaagtgctgcttacctgagggctattgaagaaggtgcagattttatagagactgacatccttgctagcaaagatggtgcattgatctgctttcatgatgtaacacttgatgatacaactgatatttccggccgtaaggaattcgccaatcgaaggagaacctatgaggtggaatgggccaacgttactggctggtttgtagtggatttcacgcttgaggaacttaaaacacttaaagtgaagcagcgatactcattcagagatcaacaatataatgatgcaagcagaaccgttggaatatatccagagataaaagatccagtttttatcaacaagcatgtaaagtgggcagatggaaagaagtttgaggacaaatttgtggataccttactaaagtatggatacaggggtcaatatatgtccgaaaattggctaaaacagccattgtttatacaatcatttgctccctcttcccttgtacatgtatcaaatttgacagactctccgaagatctttctgattgatgataccacagtgagaactcaagacacaaaccagtcatactgggaaatcacttcagatgactaccttgcatatattagtaactatgttgtcggcctcggtccatggaaagatactattgttccagttgcaaaaaactatttgctggaaccaactgatcttgttgcaagagcgcatgctcataatctccaggtacacccttacacatacaggaacgagaaccagtttctgcacttcgactttcatcaggatccctatgccgagttcgatttctggataaatacgatgggggttgacggattattcacagatttcgctggaagcgtacacaagtaccaagaactgaaatctccacacccgaaggacgcaaccgcgaacagcctcctagtaaaaattgctcagttgatcgcggcatacgaaggccactgaataagtctgttccagcaaaatcactgccattttcagtgatgatgcgcaagacccaaatgagttgacatttgacgacccgcagtgacctggaaaggtcactaatagatgttggtttacgctgttatatagtgttaacacgagttcatgtatacctcttcattgaacccctgaatctcaagggggagatctttattatcgc

SEQ ID NO: 15639 - protein, 375 aa, Triticum aestivum
  peptide (1)..(375): Ceres Seq. ID no. 15225494
  misc_feature (1)..(374): NCBI GI NO: 34909788 NR Description: putative glycerophosphoryl diesterphosphodiesterase
  misc_feature (11)..(354): NCBI GI NO: 15241502 NR Description: glycerophosphodiester phosphodiesterase
  misc_feature (12)..(372): NCBI GI NO: 15221164 NR Description: glycerophosphodiester phosphodiesterase -related
  misc_feature (145)..(347): NCBI GI NO: 34394918 NR Description: putative glycerophosphoryl diesterphosphodiesterase
  misc_feature (36)..(157): NCBI GI NO: 34394918 NR Description: putative glycerophosphoryl diesterphosphodiesterase
  misc_feature (155)..(337): NCBI GI NO: 32997080 NR Description: glycerophosphoryl diester phosphodiesterase
  misc_feature (44)..(142): NCBI GI NO: 32997080 NR Description: glycerophosphoryl diester phosphodiesterase
  misc_feature (39)..(338): NCBI GI NO: 23126501 NR Description: COG0584: Glycerophosphoryl diesterphosphodiesterase
  misc_feature (13)..(310): NCBI GI NO: 23105793 NR Description: COG0584: Glycerophosphoryl diesterphosphodiesterase
  misc_feature (44)..(314): NCBI GI NO: 15595544 NR Description: glycerophosphoryl diester phosphodiesterase
MRPSLCHVPFLLLLLLHVVIARPFFPLPSKTSNEEKKPIQTFRPYNIAHRGSNGEIPEETSAAYLRAIEEGADFIETDILASKDGALICFHDVTLDDTTDISGRKEFANRRRTYEVEWANVTGWFVVDFTLEELKTLKVKQRYSFRDQQYNDASRTVGIYPEIKDPVFINKHVKWADGKKFEDKFVDTLLKYGYRGQYMSENWLKQPLFIQSFAPSSLVHVSNLTDSPKIFLIDDTTVRTQDTNQSYWEITSDDYLAYISNYVVGLGPWKDTIVPVAKNYLLEPTDLVARAHAHNLQVHPYTYRNENQFLHFDFHQDPYAEFDFWINTMGVDGLFTDFAGSVHKYQELKSPHPKDATANSLLVKIAQLIAAYEGH

SEQ ID NO: 15640 - DNA, 1034 bp, Triticum aestivum
  misc_feature (1)..(1034): Ceres Seq. ID no. 12626028
cttccatttcaggcctccagcctccgatctataccccgatcgagcctcgccggacggaggcgccccccatgccacagccctagcggcgtcaatctcaccagcccaaaccccgccgcccgcccgccatgttcggcgtcgtgttcccggaccacaccttcccgctggacgccaccgccttcgcgcaggtcgcgccggcctcctggctcctcgacctctccacgctgtccctcccctccgcgccccgctccgccgtcgtcttcctgctcccgcccgccgcggccgcgctgcccccgggcaaggccgtcgccgtctactaccaggcggccgccaaccgccccttcgccttcctcggcgcgctcggccccgcgcgcccctccgccgccctccagctcccggaggccggggacgagccggagccccctgccgggcccgccaagctgggcgtcgccgtggaggacgccgccgcgctgccctcgccccccgacgagcagcgcgccgagcgcgtcgcgctccgcgtcggcgagaacctcttcaatttcatgcagtccttctgcgccgccgacggcggcaagctggtggtgcccacggatatcctggaccgctggttccgcaagttccaggagagggccaagaaggatcccacctatctgaaaagctttgacttctgaaaccaaagctttaggtattccttactccattcttaggttccttgggtgcgaattggtacaggaatgcttagtctcattgcagtactcctgtaccaattggtgcggagtaggagttacaagggcgacaccacctccctggtagtttaagatcgtgatctacaagaggggctgagagggagatgtcctaaaaagtgtagtgttcttgggcctcttagttcgtcagctatgagatctggtgttaattttcattgtttgtgcgagttcatgacgttgattgcagcataatatgaatatgccccggtgagatgtgtgctgatagaagcttgatgttaaatatattatccctttatggaaaaatgttgtttt

SEQ ID NO: 15641 - protein, 219 aa, Triticum aestivum
  peptide (1)..(219): Ceres Seq. ID no. 12626029
  misc_feature (14)..(192): Pfam Name: Pfam Description:  HlyD family secretion protein
FHFRPPASDLYPDRASPDGGAPHATALAASISPAQTPPPARHVRRRVPGPHLPAGRHRLRAGRAGLLAPRPLHAVPPLRAPLRRRLPAPARRGRAAPGQGRRRLLPGGRQPPLRLPRRARPRAPLRRPPAPGGRGRAGAPCRARQAGRRRGGRRRAALAPRRAARRARRAPRRREPLQFHAVLLRRRRRQAGGAHGYPGPLVPQVPGEGQEGSHLSEKL

SEQ ID NO: 15642 - protein, 216 aa, Triticum aestivum
  peptide (1)..(216): Ceres Seq. ID no. 12626030
  misc_feature (22)..(161): Pfam Name: Pfam Description:  Extensin-like region
  misc_feature (22)..(186): NCBI GI NO: 2429362 NR Description: proline rich protein [Santalum album]
  misc_feature (2)..(187): NCBI GI NO: 20138131 NR Description: Vegetative cell wall protein gp1 precursor
  misc_feature (43)..(188): NCBI GI NO: 2129478 NR Description: chitinase (EC 3.2.1.14) precursor - beet
  misc_feature (12)..(191): NCBI GI NO: 81286 NR Description: extensin - Volvox carteri (fragment)
  misc_feature (22)..(190): NCBI GI NO: 20138131 NR Description: Vegetative cell wall protein gp1 precursor
  misc_feature (22)..(190): NCBI GI NO: 20138131 NR Description: Vegetative cell wall protein gp1 precursor
  misc_feature (22)..(187): NCBI GI NO: 6523547 NR Description: hydroxyproline-rich glycoprotein DZ-HRGP
  misc_feature (22)..(215): NCBI GI NO: 20138131 NR Description: Vegetative cell wall protein gp1 precursor
  misc_feature (2)..(191): NCBI GI NO: 11360318 NR Description: probable mucin DKFZp434C196.1 - human (fragment)
  misc_feature (24)..(167): NCBI GI NO: 2129478 NR Description: chitinase (EC 3.2.1.14) precursor - beet
LPFQASSLRSIPRSSLAGRRRPPCHSPSGVNLTSPNPAARPPCSASCSRTTPSRWTPPPSRRSRRPPGSSTSPRCPSPPRPAPPSSSCSRPPRPRCPRARPSPSTTRRPPTAPSPSSARSAPRAPPPPSSSRRPGTSRSPLPGPPSWASPWRTPPRCPRPPTSSAPSASRSASARTSSISCSPSAPPTAASWWCPRISWTAGSASSRRGPRRIPPI

SEQ ID NO: 15643 - protein, 180 aa, Triticum aestivum
  peptide (1)..(180): Ceres Seq. ID no. 12626031
  misc_feature (1)..(177): Pfam Name: DUF775 Pfam Description: Protein of unknown function
  misc_feature (1)..(180): NCBI GI NO: 27357983 NR Description: Hypothetical protein
  misc_feature (1)..(178): NCBI GI NO: 15218916 NR Description: hypothetical protein; protein id: At1g66080.1
MFGVVFPDHTFPLDATAFAQVAPASWLLDLSTLSLPSAPRSAVVFLLPPAAAALPPGKAVAVYYQAAANRPFAFLGALGPARPSAALQLPEAGDEPEPPAGPAKLGVAVEDAAALPSPPDEQRAERVALRVGENLFNFMQSFCAADGGKLVVPTDILDRWFRKFQERAKKDPTYLKSFDF

SEQ ID NO: 15644 - DNA, 1253 bp, Triticum aestivum
  misc_feature (1)..(1253): Ceres Seq. ID no. 13598630
aatccaaccgcggctttggcacctcctcgcccgccgccgccgccgccgtcgccgaccagatcccgcgccgccgcagccgcagccgcctccggccatggcgccgccatcctccgaagagccggccgccgcctccggggccggcgccatctccaaggtcctcgtcgtcatagcgatgcagacggaggcgctcccgctcgtcacccggttccagctcgtcgaggcggccgccgatgattccatatttcctaaaggtgccccttggactcggtaccatggcgactacaaaggcctccacatcgatctcgtctggcctggaaaagaccctgtgcttggggttgacagtgttggtacagtatccgcagctcttgtgacttatgcttcthtacaattgttgaagccagaccttattgtgywtmacatcamcgctggtactgctggtggttttaaggccagaggagcaggtattggggatgtcttcttagcttcagatgttgctttccatgacaggagaatacccattcctgtctttgacagttatggaattggagcacgaaaaacatttgaaaccccgaatatagtgaaggaactcaatttgaaggttgggaaactgtcaactggtgattctctggatatgtccccccatgatgagacagcaatactgagcaatgaagctacagtcaaggatatggagggagcagcggtggcatatgttgctgacttgttctcgacacctgctatctttgtcaaagctgtgactgacattgttgatggggagaagccaacagccgaggagtttctgcaaaacctgatctccgtgacgatggcgcttgaccaggcagtcatgcaagtggtagacttcatcagcggcaaatgtatctctgatctctgaacgccgaacactccgccatgctgttctggggtccacaaactgagggagcctgaatatatattgttggatgtataatgtttcctggggggtttcacacacgattttacattatcgtaacccctatgtaaaaaattcttggcgattactcggagccattgtatgggattttgtagaattttacaaactgtgcagcttagtgaagctcggcttaataaggtggtgtattgttacactggaataaatgatgggcactggaactcccatggattcagtacaatggttgatggacgcaccttggcagcttcatcacatggcagctgaatactttccaaatggagtaagaagtaaaggctctcatgtttgc

SEQ ID NO: 15645 - protein, 295 aa, Triticum aestivum
  peptide (1)..(295): Ceres Seq. ID no. 15222386
  misc_feature (51)..(279): Pfam Name: Pfam Description:  Phosphorylase family
  misc_feature (32)..(295): NCBI GI NO: 34897892 NR Description: ESTs C28489
  misc_feature (32)..(295): NCBI GI NO: 18087497 NR Description: methylthioadenosine/ S-adenosyl homocysteinenucleosidase
  misc_feature (36)..(295): NCBI GI NO: 7406708 NR Description: putative ripening-related protein [Vitis vinifera]
  misc_feature (49)..(295): NCBI GI NO: 15234791 NR Description: expressed protein [Arabidopsis thaliana]
  misc_feature (49)..(295): NCBI GI NO: 30690140 NR Description: expressed protein [Arabidopsis thaliana]
  misc_feature (94)..(295): NCBI GI NO: 7486865 NR Description: hypothetical protein T11I11
  misc_feature (106)..(266): NCBI GI NO: 23467396 NR Description: hypothetical protein [Haemophilus somnus 129PT]
  misc_feature (107)..(266): NCBI GI NO: 28897253 NR Description: MTA/SAH nucleosidase
  misc_feature (105)..(287): NCBI GI NO: 15642376 NR Description: MTA/SAH nucleosidase [Vibrio cholerae]
  misc_feature (105)..(266): NCBI GI NO: 16123533 NR Description: MTA/SAH nucleosidase [Yersinia pestis]
  misc_feature (128)..(128): Xaa is any aa, unknown or other
  misc_feature (138)..(138): Xaa is any aa, unknown or other
  misc_feature (139)..(139): Xaa is any aa, unknown or other
  misc_feature (141)..(141): Xaa is any aa, unknown or other
IQPRLWHLLARRRRRRRRPDPAPPQPQPPPAMAPPSSEEPAAASGAGAISKVLVVIAMQTEALPLVTRFQLVEAAADDSIFPKGAPWTRYHGDYKGLHIDLVWPGKDPVLGVDSVGTVSAALVTYASXQLLKPDLIVXXIXAGTAGGFKARGAGIGDVFLASDVAFHDRRIPIPVFDSYGIGARKTFETPNIVKELNLKVGKLSTGDSLDMSPHDETAILSNEATVKDMEGAAVAYVADLFSTPAIFVKAVTDIVDGEKPTAEEFLQNLISVTMALDQAVMQVVDFISGKCISDL

SEQ ID NO: 15646 - protein, 264 aa, Triticum aestivum
  peptide (1)..(264): Ceres Seq. ID no. 15222387
  misc_feature (20)..(248): Pfam Name: Pfam Description:  Phosphorylase family
  misc_feature (1)..(264): NCBI GI NO: 34897892 NR Description: ESTs C28489
  misc_feature (1)..(264): NCBI GI NO: 18087497 NR Description: methylthioadenosine/ S-adenosyl homocysteinenucleosidase
  misc_feature (5)..(264): NCBI GI NO: 7406708 NR Description: putative ripening-related protein [Vitis vinifera]
  misc_feature (18)..(264): NCBI GI NO: 15234791 NR Description: expressed protein [Arabidopsis thaliana]
  misc_feature (18)..(264): NCBI GI NO: 30690140 NR Description: expressed protein [Arabidopsis thaliana]
  misc_feature (63)..(264): NCBI GI NO: 7486865 NR Description: hypothetical protein T11I11
  misc_feature (75)..(235): NCBI GI NO: 23467396 NR Description: hypothetical protein [Haemophilus somnus 129PT]
  misc_feature (76)..(235): NCBI GI NO: 28897253 NR Description: MTA/SAH nucleosidase
  misc_feature (74)..(256): NCBI GI NO: 15642376 NR Description: MTA/SAH nucleosidase [Vibrio cholerae]
  misc_feature (74)..(235): NCBI GI NO: 16123533 NR Description: MTA/SAH nucleosidase [Yersinia pestis]
  misc_feature (97)..(97): Xaa is any aa, unknown or other
  misc_feature (107)..(107): Xaa is any aa, unknown or other
  misc_feature (108)..(108): Xaa is any aa, unknown or other
  misc_feature (110)..(110): Xaa is any aa, unknown or other
MAPPSSEEPAAASGAGAISKVLVVIAMQTEALPLVTRFQLVEAAADDSIFPKGAPWTRYHGDYKGLHIDLVWPGKDPVLGVDSVGTVSAALVTYASXQLLKPDLIVXXIXAGTAGGFKARGAGIGDVFLASDVAFHDRRIPIPVFDSYGIGARKTFETPNIVKELNLKVGKLSTGDSLDMSPHDETAILSNEATVKDMEGAAVAYVADLFSTPAIFVKAVTDIVDGEKPTAEEFLQNLISVTMALDQAVMQVVDFISGKCISDL

SEQ ID NO: 15647 - protein, 238 aa, Triticum aestivum
  peptide (1)..(238): Ceres Seq. ID no. 15222388
  misc_feature (1)..(222): Pfam Name: Pfam Description:  Phosphorylase family
  misc_feature (1)..(238): NCBI GI NO: 34897892 NR Description: ESTs C28489
  misc_feature (1)..(238): NCBI GI NO: 18087497 NR Description: methylthioadenosine/ S-adenosyl homocysteinenucleosidase
  misc_feature (1)..(238): NCBI GI NO: 7406708 NR Description: putative ripening-related protein [Vitis vinifera]
  misc_feature (1)..(238): NCBI GI NO: 15234791 NR Description: expressed protein [Arabidopsis thaliana]
  misc_feature (1)..(238): NCBI GI NO: 30690140 NR Description: expressed protein [Arabidopsis thaliana]
  misc_feature (37)..(238): NCBI GI NO: 7486865 NR Description: hypothetical protein T11I11
  misc_feature (49)..(209): NCBI GI NO: 23467396 NR Description: hypothetical protein [Haemophilus somnus 129PT]
  misc_feature (50)..(209): NCBI GI NO: 28897253 NR Description: MTA/SAH nucleosidase
  misc_feature (48)..(230): NCBI GI NO: 15642376 NR Description: MTA/SAH nucleosidase [Vibrio cholerae]
  misc_feature (48)..(209): NCBI GI NO: 16123533 NR Description: MTA/SAH nucleosidase [Yersinia pestis]
  misc_feature (71)..(71): Xaa is any aa, unknown or other
  misc_feature (81)..(81): Xaa is any aa, unknown or other
  misc_feature (82)..(82): Xaa is any aa, unknown or other
  misc_feature (84)..(84): Xaa is any aa, unknown or other
MQTEALPLVTRFQLVEAAADDSIFPKGAPWTRYHGDYKGLHIDLVWPGKDPVLGVDSVGTVSAALVTYASXQLLKPDLIVXXIXAGTAGGFKARGAGIGDVFLASDVAFHDRRIPIPVFDSYGIGARKTFETPNIVKELNLKVGKLSTGDSLDMSPHDETAILSNEATVKDMEGAAVAYVADLFSTPAIFVKAVTDIVDGEKPTAEEFLQNLISVTMALDQAVMQVVDFISGKCISDL

SEQ ID NO: 15648 - DNA, 1326 bp, Triticum aestivum
  misc_feature (1)..(1326): Ceres Seq. ID no. 13597633
acatcctaatcgaaaaaaaaaaccccaagcaaaagaagcccctttcctcctccgccgccgccgccgcttctgccgccatggccgacgagctggacgagctcatcgagttcctctccaacggctcccctcaggtgcgcggcgccgcggcggacatcgtgcgggggctcacgggggacagcgacgggctgcggtccctcgcggcgcgcgccgaccgcgcgctgccggcgctgctccggctgctcgcatccgtgggggccggctgcgcgggcgaggcggcggctgactcgctcgtcaacctcagccaggacggcgaccttgccgcgcgcctcgtggtgctcggagccgtcgcggccgccatggacgtgatggtcaagcgcggcggcgagcagcccaagctcgcgcgcagccttgtcatgctgctcgtcaacctcacccaggtcgagtccggcatctcggccctcctccaggttggtgatgaaaaggtgcaagggttgtatgttgcaaagcttgtgcgctcattctgcaggtcatcctgtgactctgaagatgaagatatatttgaacacattgcctctatacttgtgaatatctcaaaggtcgaagctggacggagaatactgatggaacctaagagaggtcttctaaagcagattataggacaatttgattcaacaaatcaacttagaaagaaaggggttgctggcaccatccgtaactgttgctttgaagctgatacccagatacaaaatttgctttctatagcagaatatctttggccagctctacttttgccagtagctggaaagaagatctatagcgaagaagatagatcgaaaatgcctcccgagcttgcaaatgcactttctcatgaacgggaagctgttgatgattccgagattcgtgaacgggcactagaggctatttatatgatcgtgatgcaggatgatggacgaaaggccttttggtcagtcaatgggccacggatactgcaggttggttatgaagacgaagaggacttgaaagtgatgggcgcatatgagttgattggttctttgcttgtcggcaagggtgaaattgaacaagatcaagagcaaggagaagataagcctcaatgatgggctcaactatgtacaatttgtaatctgtcttatctacttgctgcaagaaaatagggctgcatcgcttccaatcttaagaatgtcctgtcgtattgatccaaatttcttgcaataactggcttgttctacctcctggtttcagtttgttgtccacagtatttaatacaactatgtaagagcattaagaacatcgtccagtttttgcctc

SEQ ID NO: 15649 - protein, 370 aa, Triticum aestivum
  peptide (1)..(370): Ceres Seq. ID no. 13597634
  misc_feature (154)..(302): Pfam Name: DUF383 Pfam Description: Domain of unknown function
  misc_feature (154)..(352): NCBI GI NO: 37534210 NR Description: unknown protein
  misc_feature (26)..(156): NCBI GI NO: 37534210 NR Description: unknown protein
  misc_feature (26)..(363): NCBI GI NO: 15223707 NR Description: expressed protein [Arabidopsis thaliana]
  misc_feature (26)..(363): NCBI GI NO: 26449855 NR Description: unknown protein [Arabidopsis thaliana]
  misc_feature (6)..(354): NCBI GI NO: 27662250 NR Description: similar to brain protein 16
  misc_feature (25)..(354): NCBI GI NO: 26351805 NR Description: unnamed protein product [Mus musculus]
  misc_feature (25)..(354): NCBI GI NO: 10946998 NR Description: brain protein 16
  misc_feature (28)..(348): NCBI GI NO: 19569883 NR Description: SIMILAR TO HYPOTHETICAL PROTEIN
  misc_feature (96)..(368): NCBI GI NO: 40745990 NR Description: hypothetical protein AN9409.2
  misc_feature (29)..(369): NCBI GI NO: 19115795 NR Description: hypothetical protein [Schizosaccharomyces pombe]
ILIEKKNPKQKKPLSSSAAAAASAAMADELDELIEFLSNGSPQVRGAAADIVRGLTGDSDGLRSLAARADRALPALLRLLASVGAGCAGEAAADSLVNLSQDGDLAARLVVLGAVAAAMDVMVKRGGEQPKLARSLVMLLVNLTQVESGISALLQVGDEKVQGLYVAKLVRSFCRSSCDSEDEDIFEHIASILVNISKVEAGRRILMEPKRGLLKQIIGQFDSTNQLRKKGVAGTIRNCCFEADTQIQNLLSIAEYLWPALLLPVAGKKIYSEEDRSKMPPELANALSHEREAVDDSEIRERALEAIYMIVMQDDGRKAFWSVNGPRILQVGYEDEEDLKVMGAYELIGSLLVGKGEIEQDQEQGEDKPQ

SEQ ID NO: 15650 - protein, 345 aa, Triticum aestivum
  peptide (1)..(345): Ceres Seq. ID no. 13597635
  misc_feature (129)..(277): Pfam Name: DUF383 Pfam Description: Domain of unknown function
  misc_feature (129)..(327): NCBI GI NO: 37534210 NR Description: unknown protein
  misc_feature (1)..(131): NCBI GI NO: 37534210 NR Description: unknown protein
  misc_feature (1)..(338): NCBI GI NO: 15223707 NR Description: expressed protein [Arabidopsis thaliana]
  misc_feature (1)..(338): NCBI GI NO: 26449855 NR Description: unknown protein [Arabidopsis thaliana]
  misc_feature (1)..(329): NCBI GI NO: 27662250 NR Description: similar to brain protein 16
  misc_feature (1)..(329): NCBI GI NO: 26351805 NR Description: unnamed protein product [Mus musculus]
  misc_feature (1)..(329): NCBI GI NO: 10946998 NR Description: brain protein 16
  misc_feature (3)..(323): NCBI GI NO: 19569883 NR Description: SIMILAR TO HYPOTHETICAL PROTEIN
  misc_feature (71)..(343): NCBI GI NO: 40745990 NR Description: hypothetical protein AN9409.2
  misc_feature (4)..(344): NCBI GI NO: 19115795 NR Description: hypothetical protein [Schizosaccharomyces pombe]
MADELDELIEFLSNGSPQVRGAAADIVRGLTGDSDGLRSLAARADRALPALLRLLASVGAGCAGEAAADSLVNLSQDGDLAARLVVLGAVAAAMDVMVKRGGEQPKLARSLVMLLVNLTQVESGISALLQVGDEKVQGLYVAKLVRSFCRSSCDSEDEDIFEHIASILVNISKVEAGRRILMEPKRGLLKQIIGQFDSTNQLRKKGVAGTIRNCCFEADTQIQNLLSIAEYLWPALLLPVAGKKIYSEEDRSKMPPELANALSHEREAVDDSEIRERALEAIYMIVMQDDGRKAFWSVNGPRILQVGYEDEEDLKVMGAYELIGSLLVGKGEIEQDQEQGEDKPQ

SEQ ID NO: 15651 - protein, 252 aa, Triticum aestivum
  peptide (1)..(252): Ceres Seq. ID no. 13597636
  misc_feature (36)..(184): Pfam Name: DUF383 Pfam Description: Domain of unknown function
  misc_feature (36)..(234): NCBI GI NO: 37534210 NR Description: unknown protein
  misc_feature (1)..(38): NCBI GI NO: 37534210 NR Description: unknown protein
  misc_feature (1)..(245): NCBI GI NO: 15223707 NR Description: expressed protein [Arabidopsis thaliana]
  misc_feature (1)..(245): NCBI GI NO: 26449855 NR Description: unknown protein [Arabidopsis thaliana]
  misc_feature (1)..(236): NCBI GI NO: 27662250 NR Description: similar to brain protein 16
  misc_feature (1)..(236): NCBI GI NO: 26351805 NR Description: unnamed protein product [Mus musculus]
  misc_feature (1)..(236): NCBI GI NO: 10946998 NR Description: brain protein 16
  misc_feature (1)..(230): NCBI GI NO: 19569883 NR Description: SIMILAR TO HYPOTHETICAL PROTEIN
  misc_feature (1)..(250): NCBI GI NO: 40745990 NR Description: hypothetical protein AN9409.2
  misc_feature (1)..(251): NCBI GI NO: 19115795 NR Description: hypothetical protein [Schizosaccharomyces pombe]
MDVMVKRGGEQPKLARSLVMLLVNLTQVESGISALLQVGDEKVQGLYVAKLVRSFCRSSCDSEDEDIFEHIASILVNISKVEAGRRILMEPKRGLLKQIIGQFDSTNQLRKKGVAGTIRNCCFEADTQIQNLLSIAEYLWPALLLPVAGKKIYSEEDRSKMPPELANALSHEREAVDDSEIRERALEAIYMIVMQDDGRKAFWSVNGPRILQVGYEDEEDLKVMGAYELIGSLLVGKGEIEQDQEQGEDKPQ

SEQ ID NO: 15652 - DNA, 804 bp, Triticum aestivum
  misc_feature (1)..(804): Ceres Seq. ID no. 13656012
gctcggcgcagccgcacccttccgcaagaaagaaaggggaggggaggggagaacagaataaacatcagacccgcaaagaggaggagcgaaacagcatccctgccttcctccacgcccgtagggtttccggatcggaggagcccaagccgccgcagccatggttcgcggatcgctcgggaggttggcgtcgcgcaccctctccgtcgccggcaaatggcagcaccagcagctccgccgcctcaacatccacgagtaccagggcgcggagttgatggggaagttcgggatcaacgtgcccaagggcgccgtggtggggtcagtgcaggaggtcaaggaagttttgaagaacgtcttccccagtgagaaagagatagttgtgaaaagccaaatccttgccggtggccgtggattgggaactttcaaaagtggactaaagggtggtgttcatattgttaaggctgaggaggctgaaagccttgcagctaaaatgcttaaccaggtcctggtaacaaaacaaactggtccacaggggaaggttgtgggcaagctcattatagcttgtgctgagggaggaacgagtattgaagatcttgcagagaagttccctgataagatcgttaaggttcctgttgatgtattcaagggaatcactgatgaggatgagattaggttccggctgaagagtgagaggtggaagactggtaccatttgtatagcttgtgtgataaaaagactagacattttgggtgtacactcctccgtgttggtgttgccacccgtgaacataaacactgcctgtatgtt

SEQ ID NO: 15653 - protein, 215 aa, Triticum aestivum
  peptide (1)..(215): Ceres Seq. ID no. 13656013
  misc_feature (72)..(134): Pfam Name: Pfam Description:  ATP-grasp domain
  misc_feature (2)..(133): NCBI GI NO: 15225353 NR Description: succinyl-CoA ligase beta subunit
  misc_feature (2)..(133): NCBI GI NO: 21593189 NR Description: succinyl-CoA ligase beta subunit
  misc_feature (6)..(133): NCBI GI NO: 27803873 NR Description: succinyl CoA ligase beta subunit
  misc_feature (24)..(134): NCBI GI NO: 31228552 NR Description: ENSANGP00000025191 [Anopheles gambiae]
  misc_feature (129)..(175): NCBI GI NO: 31228552 NR Description: ENSANGP00000025191 [Anopheles gambiae]
  misc_feature (1)..(133): NCBI GI NO: 32418076 NR Description: probable beta-succinyl CoA synthetase precursor
  misc_feature (129)..(167): NCBI GI NO: 32418076 NR Description: probable beta-succinyl CoA synthetase precursor
  misc_feature (23)..(133): NCBI GI NO: 40742456 NR Description: hypothetical protein AN7000.2
  misc_feature (126)..(166): NCBI GI NO: 40742456 NR Description: hypothetical protein AN7000.2
  misc_feature (24)..(134): NCBI GI NO: 31228546 NR Description: ENSANGP00000017707 [Anopheles gambiae]
MVRGSLGRLASRTLSVAGKWQHQQLRRLNIHEYQGAELMGKFGINVPKGAVVGSVQEVKEVLKNVFPSEKEIVVKSQILAGGRGLGTFKSGLKGGVHIVKAEEAESLAAKMLNQVLVTKQTGPQGKVVGKLIIACAEGGTSIEDLAEKFPDKIVKVPVDVFKGITDEDEIRFRLKSERWKTGTICIACVIKRLDILGVHSSVLVLPPVNINTACM

SEQ ID NO: 15654 - protein, 177 aa, Triticum aestivum
  peptide (1)..(177): Ceres Seq. ID no. 13656014
  misc_feature (34)..(96): Pfam Name: Pfam Description:  ATP-grasp domain
  misc_feature (1)..(95): NCBI GI NO: 15225353 NR Description: succinyl-CoA ligase beta subunit
  misc_feature (1)..(95): NCBI GI NO: 21593189 NR Description: succinyl-CoA ligase beta subunit
  misc_feature (1)..(95): NCBI GI NO: 27803873 NR Description: succinyl CoA ligase beta subunit
  misc_feature (1)..(96): NCBI GI NO: 31228552 NR Description: ENSANGP00000025191 [Anopheles gambiae]
  misc_feature (91)..(137): NCBI GI NO: 31228552 NR Description: ENSANGP00000025191 [Anopheles gambiae]
  misc_feature (1)..(95): NCBI GI NO: 32418076 NR Description: probable beta-succinyl CoA synthetase precursor
  misc_feature (91)..(129): NCBI GI NO: 32418076 NR Description: probable beta-succinyl CoA synthetase precursor
  misc_feature (1)..(95): NCBI GI NO: 40742456 NR Description: hypothetical protein AN7000.2
  misc_feature (88)..(128): NCBI GI NO: 40742456 NR Description: hypothetical protein AN7000.2
  misc_feature (1)..(96): NCBI GI NO: 31228546 NR Description: ENSANGP00000017707 [Anopheles gambiae]
MGKFGINVPKGAVVGSVQEVKEVLKNVFPSEKEIVVKSQILAGGRGLGTFKSGLKGGVHIVKAEEAESLAAKMLNQVLVTKQTGPQGKVVGKLIIACAEGGTSIEDLAEKFPDKIVKVPVDVFKGITDEDEIRFRLKSERWKTGTICIACVIKRLDILGVHSSVLVLPPVNINTACM

SEQ ID NO: 15655 - protein, 120 aa, Triticum aestivum
  peptide (1)..(120): Ceres Seq. ID no. 13656015
ARRSRTLPQERKGRGGENRINIRPAKRRSETASLPSSTPVGFPDRRSPSRRSHGSRIAREVGVAHPLRRRQMAAPAAPPPQHPRVPGRGVDGEVRDQRAQGRRGGVSAGGQGSFEERLPQ

SEQ ID NO: 15656 - DNA, 1436 bp, Triticum aestivum
  misc_feature (1)..(1436): Ceres Seq. ID no. 13597638
acacaagcacacagacacacactccagagaacaccaggccaagaaaccacagaaaagcaaccagccatgggggtggagatcctgagctccacgggggaaccctcctcccagtactcttccggggccgtgtccacagccacgacggagtcaggcatcggcggacggccgccgactgcgccgagcctgccagtggccatcgccgacgagtccgtgacctcgcggtcggcaccggcgcagtcggcgtcgtcgcggttcaagggggttgtgtcgcagcccaacgggcggtggggcgcccagatctacgagcgccacgctcgcgtctggctcggcacgttcccggacgaggactctgcggcgcgcgcctacgacgtggcagcgctccggtaccggggccgcgaggccgccaccaacttcccctgcgcggscgcagagggcggagctcgctttcctgggggcacactccaaggccgagatcgtcgacatgctccggaagcacacctacgccgacgagctccgccagggcttgcggcgcggccgcggcatgggggcccgcgcgcagccgacgccgtcgtgggcgcgggagcccctcttcgagaaggccgtgaccccgagcgacgtcggcaagctcaaccgcctcgtggtgccgaagcagcacgccgagaagcacttccccctgaagcgcacgccggaaacgacgaccaccaccggcaagggggtgctgctcaactttcgaggacggcgaggggaaagtgtggaggttccggtactcgtactggaacagcagccagagctacgtcctcaccaagggtkggagccgcttcgtccgggagaagggcctcggtgccggcgattccatcgtgttctcgtgctcggcgtacggtcaagagaagcagttcttcatcgactgcaagaagaacaagacgatggcgagctgccccgctgacggcggcgctgcaacggcgtcgccgcctgtggcggaggcagctaatggagaacaagtccgtgtcgtgaggctgtttggcgtcgacatcgccggagagaagagggggagagctgcgccggcggagcaggagttgttcaagaggcaatgcgtggcacacagccagcactctcctgccctaggtgccatcgtcttatagcatctgcacatacagctctatattcctctccggttctcctccctcttgcttctggttgttacatgcatgatatatgttgatctgtttgtggattagaataattttattcctgaattttgcgtagaactcgtccttaagtccgattgcagaatgagttgtatgtaattatgtgtgtgtacaccactagaaattctagctagacagatcataataatcctacgatgttgttgcatatatatatatatctatatatgtactatcatcttgacacatcaataaattccattctgccatctg

SEQ ID NO: 15657 - protein, 336 aa, Triticum aestivum
  peptide (1)..(336): Ceres Seq. ID no. 15222153
  misc_feature (82)..(143): Pfam Name: Pfam Description:  AP2 domain
  misc_feature (13)..(147): NCBI GI NO: 34911404 NR Description: DNA-binding protein RAV2-like
  misc_feature (23)..(199): NCBI GI NO: 34895690 NR Description: putative DNA binding protein RAV2
  misc_feature (29)..(138): NCBI GI NO: 15222622 NR Description: AP2 domain transcription factor, putative
  misc_feature (30)..(138): NCBI GI NO: 15222217 NR Description: AP2 domain transcription factor, putative  (RAV1)
  misc_feature (25)..(149): NCBI GI NO: 15230871 NR Description: AP2 domain transcription factor, putative
  misc_feature (25)..(149): NCBI GI NO: 21593532 NR Description: AP2 domain transcription factor
  misc_feature (75)..(147): NCBI GI NO: 34895676 NR Description: putative DNA binding protein RAV2
  misc_feature (26)..(149): NCBI GI NO: 18409138 NR Description: AP2 domain protein RAP2.8 (RAV2)
  misc_feature (26)..(149): NCBI GI NO: 21554039 NR Description: putative RAV2-like DNA-binding protein
  misc_feature (82)..(149): NCBI GI NO: 2281641 NR Description: AP2 domain containing protein RAP2.8
  misc_feature (142)..(142): Xaa is any aa, unknown or other
  misc_feature (270)..(270): Xaa is any aa, unknown or other
TQAHRHTLQRTPGQETTEKQPAMGVEILSSTGEPSSQYSSGAVSTATTESGIGGRPPTAPSLPVAIADESVTSRSAPAQSASSRFKGVVSQPNGRWGAQIYERHARVWLGTFPDEDSAARAYDVAALRYRGREAATNFPCAXAEGGARFPGGTLQGRDRRHAPEAHLRRRAPPGLAARPRHGGPRAADAVVGAGAPLREGRDPERRRQAQPPRGAEAARREALPPEAHAGNDDHHRQGGAAQLSRTARGKCGGSGTRTGTAARATSSPRXGAASSGRRASVPAIPSCSRARRTVKRSSSSSTARRTRRWRAAPLTAALQRRRRLWRRQLMENKSVS

SEQ ID NO: 15658 - protein, 314 aa, Triticum aestivum
  peptide (1)..(314): Ceres Seq. ID no. 15222154
  misc_feature (60)..(121): Pfam Name: Pfam Description:  AP2 domain
  misc_feature (1)..(125): NCBI GI NO: 34911404 NR Description: DNA-binding protein RAV2-like
  misc_feature (1)..(177): NCBI GI NO: 34895690 NR Description: putative DNA binding protein RAV2
  misc_feature (7)..(116): NCBI GI NO: 15222622 NR Description: AP2 domain transcription factor, putative
  misc_feature (8)..(116): NCBI GI NO: 15222217 NR Description: AP2 domain transcription factor, putative  (RAV1)
  misc_feature (3)..(127): NCBI GI NO: 15230871 NR Description: AP2 domain transcription factor, putative
  misc_feature (3)..(127): NCBI GI NO: 21593532 NR Description: AP2 domain transcription factor
  misc_feature (53)..(125): NCBI GI NO: 34895676 NR Description: putative DNA binding protein RAV2
  misc_feature (4)..(127): NCBI GI NO: 18409138 NR Description: AP2 domain protein RAP2.8 (RAV2)
  misc_feature (4)..(127): NCBI GI NO: 21554039 NR Description: putative RAV2-like DNA-binding protein
  misc_feature (60)..(127): NCBI GI NO: 2281641 NR Description: AP2 domain containing protein RAP2.8
  misc_feature (120)..(120): Xaa is any aa, unknown or other
  misc_feature (248)..(248): Xaa is any aa, unknown or other
MGVEILSSTGEPSSQYSSGAVSTATTESGIGGRPPTAPSLPVAIADESVTSRSAPAQSASSRFKGVVSQPNGRWGAQIYERHARVWLGTFPDEDSAARAYDVAALRYRGREAATNFPCAXAEGGARFPGGTLQGRDRRHAPEAHLRRRAPPGLAARPRHGGPRAADAVVGAGAPLREGRDPERRRQAQPPRGAEAARREALPPEAHAGNDDHHRQGGAAQLSRTARGKCGGSGTRTGTAARATSSPRXGAASSGRRASVPAIPSCSRARRTVKRSSSSSTARRTRRWRAAPLTAALQRRRRLWRRQLMENKSVS

SEQ ID NO: 15659 - protein, 200 aa, Triticum aestivum
  peptide (1)..(200): Ceres Seq. ID no. 15222155
  misc_feature (188)..(200): NCBI GI NO: 34895676 NR Description: putative DNA binding protein RAV2
  misc_feature (141)..(141): Xaa is any aa, unknown or other
TSTQTHTPENTRPRNHRKATSHGGGDPELHGGTLLPVLFRGRVHSHDGVRHRRTAADCAEPASGHRRRVRDLAVGTGAVGVVAVQGGCVAAQRAVGRPDLRAPRSRLARHVPGRGLCGARLRRGSAPVPGPRGRHQLPLRXRRGRSSLSWGHTPRPRSSTCSGSTPTPTSSARACGAAAAWGPARSRRRRGRGSPSSRRP

SEQ ID NO: 15660 - DNA, 1128 bp, Triticum aestivum
  misc_feature (1)..(1128): Ceres Seq. ID no. 13597743
aaaaccgcagacctcaccatccccctcccccctcccctccccagcagccagcctcccccgcgaacgaaccctagccaggcacggcggcggatccctcgggcggcccggagccacaggccgccgcgatgatggacggcggcggcggcgtcggagacccggtcgaggagttcctcatcgggggcgccggcgacggcggggaggactccctcgccgccttctgcgacggaggacttgggattgaggatgtgcgcggaggtgactctggtctcgggcactctaatttggggaaaaggggcagagatgaaccatctccatctggtccaaagtcaaaggcttgccgcgagaaaatgcggagggataaactgaatgacaggtttcttgaattatgctcggttatgaattctggcaagcacactggtgttgaagaatgttcggctagcaatcctgggaagaacgctaagttggataaagcaagtatcttgagtgatgcaactcgtatgttgacacaactcagaggcgagaccgaaaagctgaaggaatcaaatgtgaatcttcgagagacaatcaaggaccttaaggcggagaagaatgagctccgagatgagaagttgagcctgaaggcagaaaaggaaaggctggaacaacaactcaaagcagcaagtgctgctcctacaggatttgctcctcatatgccttatccagctgcgttccaccccgcagtattccctccatttgcaccaccttatcaagtcccagccaacaaaggcgctccggtccccgctgcattccctggaatggcgatgtggcactggttgcccccaactgccatggacacaactcaagacccaaagctttggccgccgaatgcttaggcgtgccgaccccgggatgctgacttgcgctgccattcgcccattggcaagtcagaacgtttgtcaggtccctgagatgaaaggaagctcgcgattgcagttattgtgtttagcctgttgttttggggtcacttgtcccatagagaggtgatacctgtaattaatctggatcttaaccctcttgcttggaaaatatattcagtgctaccatacctcttgtatgagtgttatgtatggaattgcactggtttgtttc

SEQ ID NO: 15661 - protein, 248 aa, Triticum aestivum
  peptide (1)..(248): Ceres Seq. ID no. 13597744
  misc_feature (68)..(130): Pfam Name: Pfam Description:  Helix-loop-helix DNA-binding domain
  misc_feature (15)..(248): NCBI GI NO: 15239706 NR Description: bHLH protein [Arabidopsis thaliana]
  misc_feature (15)..(248): NCBI GI NO: 21592325 NR Description: bHLH transcription factor, putative
  misc_feature (1)..(248): NCBI GI NO: 38636768 NR Description: helix-loop-helix-like protein
  misc_feature (66)..(248): NCBI GI NO: 29367409 NR Description: helix-loop-helix-like protein
  misc_feature (55)..(248): NCBI GI NO: 15223710 NR Description: bHLH protein [Arabidopsis thaliana]
  misc_feature (54)..(248): NCBI GI NO: 20127030 NR Description: putative bHLH transcription factor
  misc_feature (54)..(248): NCBI GI NO: 22331274 NR Description: bHLH protein [Arabidopsis thaliana]
  misc_feature (55)..(203): NCBI GI NO: 18414212 NR Description: bHLH protein [Arabidopsis thaliana]
  misc_feature (55)..(203): NCBI GI NO: 30682847 NR Description: bHLH protein [Arabidopsis thaliana]
  misc_feature (64)..(216): NCBI GI NO: 15230975 NR Description: bHLH protein family [Arabidopsis thaliana]
MMDGGGGVGDPVEEFLIGGAGDGGEDSLAAFCDGGLGIEDVRGGDSGLGHSNLGKRGRDEPSPSGPKSKACREKMRRDKLNDRFLELCSVMNSGKHTGVEECSASNPGKNAKLDKASILSDATRMLTQLRGETEKLKESNVNLRETIKDLKAEKNELRDEKLSLKAEKERLEQQLKAASAAPTGFAPHMPYPAAFHPAVFPPFAPPYQVPANKGAPVPAAFPGMAMWHWLPPTAMDTTQDPKLWPPNA

SEQ ID NO: 15662 - protein, 247 aa, Triticum aestivum
  peptide (1)..(247): Ceres Seq. ID no. 13597745
  misc_feature (67)..(129): Pfam Name: Pfam Description:  Helix-loop-helix DNA-binding domain
  misc_feature (14)..(247): NCBI GI NO: 15239706 NR Description: bHLH protein [Arabidopsis thaliana]
  misc_feature (14)..(247): NCBI GI NO: 21592325 NR Description: bHLH transcription factor, putative
  misc_feature (1)..(247): NCBI GI NO: 38636768 NR Description: helix-loop-helix-like protein
  misc_feature (65)..(247): NCBI GI NO: 29367409 NR Description: helix-loop-helix-like protein
  misc_feature (54)..(247): NCBI GI NO: 15223710 NR Description: bHLH protein [Arabidopsis thaliana]
  misc_feature (53)..(247): NCBI GI NO: 20127030 NR Description: putative bHLH transcription factor
  misc_feature (53)..(247): NCBI GI NO: 22331274 NR Description: bHLH protein [Arabidopsis thaliana]
  misc_feature (54)..(202): NCBI GI NO: 18414212 NR Description: bHLH protein [Arabidopsis thaliana]
  misc_feature (54)..(202): NCBI GI NO: 30682847 NR Description: bHLH protein [Arabidopsis thaliana]
  misc_feature (63)..(215): NCBI GI NO: 15230975 NR Description: bHLH protein family [Arabidopsis thaliana]
MDGGGGVGDPVEEFLIGGAGDGGEDSLAAFCDGGLGIEDVRGGDSGLGHSNLGKRGRDEPSPSGPKSKACREKMRRDKLNDRFLELCSVMNSGKHTGVEECSASNPGKNAKLDKASILSDATRMLTQLRGETEKLKESNVNLRETIKDLKAEKNELRDEKLSLKAEKERLEQQLKAASAAPTGFAPHMPYPAAFHPAVFPPFAPPYQVPANKGAPVPAAFPGMAMWHWLPPTAMDTTQDPKLWPPNA

SEQ ID NO: 15663 - protein, 174 aa, Triticum aestivum
  peptide (1)..(174): Ceres Seq. ID no. 13597746
  misc_feature (1)..(56): Pfam Name: Pfam Description:  Helix-loop-helix DNA-binding domain
  misc_feature (1)..(174): NCBI GI NO: 15239706 NR Description: bHLH protein [Arabidopsis thaliana]
  misc_feature (1)..(174): NCBI GI NO: 21592325 NR Description: bHLH transcription factor, putative
  misc_feature (1)..(174): NCBI GI NO: 38636768 NR Description: helix-loop-helix-like protein
  misc_feature (1)..(174): NCBI GI NO: 29367409 NR Description: helix-loop-helix-like protein
  misc_feature (1)..(174): NCBI GI NO: 15223710 NR Description: bHLH protein [Arabidopsis thaliana]
  misc_feature (1)..(174): NCBI GI NO: 20127030 NR Description: putative bHLH transcription factor
  misc_feature (1)..(174): NCBI GI NO: 22331274 NR Description: bHLH protein [Arabidopsis thaliana]
  misc_feature (1)..(129): NCBI GI NO: 18414212 NR Description: bHLH protein [Arabidopsis thaliana]
  misc_feature (1)..(129): NCBI GI NO: 30682847 NR Description: bHLH protein [Arabidopsis thaliana]
  misc_feature (1)..(142): NCBI GI NO: 15230975 NR Description: bHLH protein family [Arabidopsis thaliana]
MRRDKLNDRFLELCSVMNSGKHTGVEECSASNPGKNAKLDKASILSDATRMLTQLRGETEKLKESNVNLRETIKDLKAEKNELRDEKLSLKAEKERLEQQLKAASAAPTGFAPHMPYPAAFHPAVFPPFAPPYQVPANKGAPVPAAFPGMAMWHWLPPTAMDTTQDPKLWPPNA

SEQ ID NO: 15664 - DNA, 1393 bp, Triticum aestivum
  misc_feature (1)..(1393): Ceres Seq. ID no. 13597747
atattcttcttcttctcccctttgcttcttccagaagctccctgaaagtccaggcccgatcccccatggcctccggcgaaggcaccggagattcgaacgctgcgggggcagggatggaggtgccggaggtggagttgtgcctcgacctcacgagctgccagctgcacgatctgagtgaggtggagatcccgcccaccctggaggagctggaccttacggcgaaccgtctcaccgcagtcgacccccggatcggccacctccctcgcctccgcaaactctcgttccgccagaatctcctcgacgacgacgccgtcgcgcccctcttcacctgggatgccatcgctggcttacaggagatagtccttagagataacaagcttataaagatccccgatgccagcatcttcaagggtcttctggtgtttgatgtttctttcaatgagttgtcgtccttaaatgggttatccaaggtttccagcacagtgaaagaactctacttttcgaagaatgaggttccaaagatggaagaacttgaacatttccatgcattagaattgcttgaacttggtagcaacagattaagggtgatggaaaatctggaaactttgacaaatctacaggagttatggctcggaagaaaccggatccggactatcaacttatgtgggttgaaatcaatcaaaaaaataagtctgcaaagcaacaggctaacttcaatgaatggcttacaagaatgtgttgcgttagaggaactgtatctcagccataatggaatccaaaagatggaaggcctttctatgttacagaaccttcgtgttttagatgtttcatctaacaaactaaccgctatcgaagatattgagccattaaccaggttagaggacttgtggttgaatgacaaccaaataccatcactgtctgggatagaatctgctttgtctggttcacgagagaaactgaccaccatatatcttgagagaaatccttgtgcaaaaactcccaactattcatccacattgaaggaaatgtttccaaatcttgagcaaattgattcagatatgctagcgtgaaacaggttgactcactttctcagattgttgaagttagtcgaaatatgtgttgtgtttctacaggaagaaagcagtcatccagttcagaacagacaacataagctcccggtcaagtagcgctgcagtttgtactggtgatctgaatggattattgccaactttatttgaaaggcccgtcctgaagttgggtcatttcctgccgagatctataaaaactgaacttatgtgataaagccatcctatggtccatgactccatgctcgtgccacgttgcaagggatgatgtatttgttttcccttttcccttgagtgatttttcagtt

SEQ ID NO: 15665 - protein, 355 aa, Triticum aestivum
  peptide (1)..(355): Ceres Seq. ID no. 13597748
  misc_feature (39)..(355): NCBI GI NO: 15241153 NR Description: leucine rich repeat protein family
  misc_feature (39)..(355): NCBI GI NO: 21536755 NR Description: unknown [Arabidopsis thaliana]
  misc_feature (56)..(351): NCBI GI NO: 4506013 NR Description: protein phosphatase 1, regulatory subunit 7; sds22
  misc_feature (56)..(351): NCBI GI NO: 4633066 NR Description: protein phosphatase-1 regulatory subunit 7 alpha2
  misc_feature (56)..(351): NCBI GI NO: 12963569 NR Description: protein phosphatase-1 regulatory subunit 7
  misc_feature (56)..(351): NCBI GI NO: 34877683 NR Description: similar to protein phosphatase 1
  misc_feature (29)..(353): NCBI GI NO: 6684160 NR Description: putative mitotic protein phosphatase 1 regulator
  misc_feature (31)..(354): NCBI GI NO: 19114736 NR Description: protein phosphatases pp1 regulatory subunit sds22.
  misc_feature (56)..(351): NCBI GI NO: 40747368 NR Description: hypothetical protein AN0425.2
  misc_feature (56)..(353): NCBI GI NO: 39597602 NR Description: Hypothetical protein CBG03304
ILLLLPFASSRSSLKVQARSPMASGEGTGDSNAAGAGMEVPEVELCLDLTSCQLHDLSEVEIPPTLEELDLTANRLTAVDPRIGHLPRLRKLSFRQNLLDDDAVAPLFTWDAIAGLQEIVLRDNKLIKIPDASIFKGLLVFDVSFNELSSLNGLSKVSSTVKELYFSKNEVPKMEELEHFHALELLELGSNRLRVMENLETLTNLQELWLGRNRIRTINLCGLKSIKKISLQSNRLTSMNGLQECVALEELYLSHNGIQKMEGLSMLQNLRVLDVSSNKLTAIEDIEPLTRLEDLWLNDNQIPSLSGIESALSGSREKLTTIYLERNPCAKTPNYSSTLKEMFPNLEQIDSDMLA

SEQ ID NO: 15666 - protein, 334 aa, Triticum aestivum
  peptide (1)..(334): Ceres Seq. ID no. 13597749
  misc_feature (18)..(334): NCBI GI NO: 15241153 NR Description: leucine rich repeat protein family
  misc_feature (18)..(334): NCBI GI NO: 21536755 NR Description: unknown [Arabidopsis thaliana]
  misc_feature (35)..(330): NCBI GI NO: 4506013 NR Description: protein phosphatase 1, regulatory subunit 7; sds22
  misc_feature (35)..(330): NCBI GI NO: 4633066 NR Description: protein phosphatase-1 regulatory subunit 7 alpha2
  misc_feature (35)..(330): NCBI GI NO: 12963569 NR Description: protein phosphatase-1 regulatory subunit 7
  misc_feature (35)..(330): NCBI GI NO: 34877683 NR Description: similar to protein phosphatase 1
  misc_feature (8)..(332): NCBI GI NO: 6684160 NR Description: putative mitotic protein phosphatase 1 regulator
  misc_feature (10)..(333): NCBI GI NO: 19114736 NR Description: protein phosphatases pp1 regulatory subunit sds22.
  misc_feature (35)..(330): NCBI GI NO: 40747368 NR Description: hypothetical protein AN0425.2
  misc_feature (35)..(332): NCBI GI NO: 39597602 NR Description: Hypothetical protein CBG03304
MASGEGTGDSNAAGAGMEVPEVELCLDLTSCQLHDLSEVEIPPTLEELDLTANRLTAVDPRIGHLPRLRKLSFRQNLLDDDAVAPLFTWDAIAGLQEIVLRDNKLIKIPDASIFKGLLVFDVSFNELSSLNGLSKVSSTVKELYFSKNEVPKMEELEHFHALELLELGSNRLRVMENLETLTNLQELWLGRNRIRTINLCGLKSIKKISLQSNRLTSMNGLQECVALEELYLSHNGIQKMEGLSMLQNLRVLDVSSNKLTAIEDIEPLTRLEDLWLNDNQIPSLSGIESALSGSREKLTTIYLERNPCAKTPNYSSTLKEMFPNLEQIDSDMLA

SEQ ID NO: 15667 - protein, 318 aa, Triticum aestivum
  peptide (1)..(318): Ceres Seq. ID no. 13597750
  misc_feature (2)..(318): NCBI GI NO: 15241153 NR Description: leucine rich repeat protein family
  misc_feature (2)..(318): NCBI GI NO: 21536755 NR Description: unknown [Arabidopsis thaliana]
  misc_feature (19)..(314): NCBI GI NO: 4506013 NR Description: protein phosphatase 1, regulatory subunit 7; sds22
  misc_feature (19)..(314): NCBI GI NO: 4633066 NR Description: protein phosphatase-1 regulatory subunit 7 alpha2
  misc_feature (19)..(314): NCBI GI NO: 12963569 NR Description: protein phosphatase-1 regulatory subunit 7
  misc_feature (19)..(314): NCBI GI NO: 34877683 NR Description: similar to protein phosphatase 1
  misc_feature (1)..(316): NCBI GI NO: 6684160 NR Description: putative mitotic protein phosphatase 1 regulator
  misc_feature (1)..(317): NCBI GI NO: 19114736 NR Description: protein phosphatases pp1 regulatory subunit sds22.
  misc_feature (19)..(314): NCBI GI NO: 40747368 NR Description: hypothetical protein AN0425.2
  misc_feature (19)..(316): NCBI GI NO: 39597602 NR Description: Hypothetical protein CBG03304
MEVPEVELCLDLTSCQLHDLSEVEIPPTLEELDLTANRLTAVDPRIGHLPRLRKLSFRQNLLDDDAVAPLFTWDAIAGLQEIVLRDNKLIKIPDASIFKGLLVFDVSFNELSSLNGLSKVSSTVKELYFSKNEVPKMEELEHFHALELLELGSNRLRVMENLETLTNLQELWLGRNRIRTINLCGLKSIKKISLQSNRLTSMNGLQECVALEELYLSHNGIQKMEGLSMLQNLRVLDVSSNKLTAIEDIEPLTRLEDLWLNDNQIPSLSGIESALSGSREKLTTIYLERNPCAKTPNYSSTLKEMFPNLEQIDSDMLA

SEQ ID NO: 15668 - DNA, 1196 bp, Triticum aestivum
  misc_feature (1)..(1196): Ceres Seq. ID no. 13655958
agaacatcctaatcgaaaactcgatcacatcacatcctcgtgggtgcacgcagcctctgtcggcaggcacagcgggggaacccgcgagcgagctctccaccggccatctgccatgtcagagcccggcgcgaacggcgcccgtcggcggcagcgcaggaggtggcgcctgtactggtgctacgtgtgccgccgcgcgctgcgcacggtgtcgtccccgacctccgacgtcttctgcccgcgctgcctcggccgcttcctccacgagatcgaactccccgtgccgcgcgagcccgtgcacgcgccgaccgagcggctcttccagccgccgccgttgttcccgtacgagggcgccccccgccactgggtcatatacaggggcgaggacgacgacgacgcggccgacacgccaggcccacgtctccgccgcgtcccgtccccgccgccggccccgggaacgcacggcggcttgggcggtgccgatgccggtccaccggcaaccggcatcgacccggcggggttcttcaccggccccaacctgaacgcgctcatcgatggtctgacgcagaacgaccgccccggcccgccgcccgcgccggcgtcggcgatcgactcgctccccacggtgcacgtctcgccggagcacatggcggacggctcgcagtgccccgtgtgcaaggatgagttcgagctcggcgagaccgcgcgcgagctgccgtgcaagcacgcctaccactccgactgcatcgtgccgtggctccggctccacaactcctgccctgtctgccggcaggagctgccaatgccggccggtgatgaatctcccgatggcgcgggcgcaggcgacggaggcgaggagacggttccgccgtggcagctgcttgccggctgggggccactggcttggctgctaacgctgggggaaccggacgtgggcggctgggataatggatctcggcagcgtgggacggaagccgacgccgatgacaccggcggcaatgtcagtcgtggcgccacgattcttcagtcgtttgttctcgtcgctgcgtgctttttctttgtctcctttctcgtttgagaaatggcacattggagactgtcacgtgtgcatatcatttattcggaaaagaaaacccaggtttcacgtgcaccacgcatgatcagacaaaaaaaaaaaaaaaaaagcttatcgataccgt

SEQ ID NO: 15669 - protein, 357 aa, Triticum aestivum
  peptide (1)..(357): Ceres Seq. ID no. 13655959
  misc_feature (221)..(261): Pfam Name: RING finger Pfam Description: Zinc finger, C3HC4 type
  misc_feature (128)..(267): NCBI GI NO: 15219060 NR Description: hypothetical protein [Arabidopsis thaliana]
  misc_feature (31)..(90): NCBI GI NO: 15219060 NR Description: hypothetical protein [Arabidopsis thaliana]
  misc_feature (173)..(296): NCBI GI NO: 11994207 NR Description: gene_id:MPN9.20~unknown protein
  misc_feature (173)..(296): NCBI GI NO: 15231003 NR Description: expressed protein [Arabidopsis thaliana]
  misc_feature (55)..(99): NCBI GI NO: 11994207 NR Description: gene_id:MPN9.20~unknown protein
  misc_feature (55)..(99): NCBI GI NO: 15231003 NR Description: expressed protein [Arabidopsis thaliana]
  misc_feature (160)..(273): NCBI GI NO: 18405518 NR Description: RING-H2 finger protein (RHC1a)
  misc_feature (173)..(266): NCBI GI NO: 34908968 NR Description: P0003D09.21
  misc_feature (165)..(273): NCBI GI NO: 18410530 NR Description: expressed protein [Arabidopsis thaliana]
  misc_feature (149)..(278): NCBI GI NO: 37535546 NR Description: putative zinc finger protein
EHPNRKLDHITSSWVHAASVGRHSGGTRERALHRPSAMSEPGANGARRRQRRRWRLYWCYVCRRALRTVSSPTSDVFCPRCLGRFLHEIELPVPREPVHAPTERLFQPPPLFPYEGAPRHWVIYRGEDDDDAADTPGPRLRRVPSPPPAPGTHGGLGGADAGPPATGIDPAGFFTGPNLNALIDGLTQNDRPGPPPAPASAIDSLPTVHVSPEHMADGSQCPVCKDEFELGETARELPCKHAYHSDCIVPWLRLHNSCPVCRQELPMPAGDESPDGAGAGDGGEETVPPWQLLAGWGPLAWLLTLGEPDVGGWDNGSRQRGTEADADDTGGNVSRGATILQSFVLVAACFFFVSFLV

SEQ ID NO: 15670 - protein, 320 aa, Triticum aestivum
  peptide (1)..(320): Ceres Seq. ID no. 13655960
  misc_feature (184)..(224): Pfam Name: RING finger Pfam Description: Zinc finger, C3HC4 type
  misc_feature (91)..(230): NCBI GI NO: 15219060 NR Description: hypothetical protein [Arabidopsis thaliana]
  misc_feature (1)..(53): NCBI GI NO: 15219060 NR Description: hypothetical protein [Arabidopsis thaliana]
  misc_feature (136)..(259): NCBI GI NO: 11994207 NR Description: gene_id:MPN9.20~unknown protein
  misc_feature (136)..(259): NCBI GI NO: 15231003 NR Description: expressed protein [Arabidopsis thaliana]
  misc_feature (18)..(62): NCBI GI NO: 11994207 NR Description: gene_id:MPN9.20~unknown protein
  misc_feature (18)..(62): NCBI GI NO: 15231003 NR Description: expressed protein [Arabidopsis thaliana]
  misc_feature (123)..(236): NCBI GI NO: 18405518 NR Description: RING-H2 finger protein (RHC1a)
  misc_feature (136)..(229): NCBI GI NO: 34908968 NR Description: P0003D09.21
  misc_feature (128)..(236): NCBI GI NO: 18410530 NR Description: expressed protein [Arabidopsis thaliana]
  misc_feature (112)..(241): NCBI GI NO: 37535546 NR Description: putative zinc finger protein
MSEPGANGARRRQRRRWRLYWCYVCRRALRTVSSPTSDVFCPRCLGRFLHEIELPVPREPVHAPTERLFQPPPLFPYEGAPRHWVIYRGEDDDDAADTPGPRLRRVPSPPPAPGTHGGLGGADAGPPATGIDPAGFFTGPNLNALIDGLTQNDRPGPPPAPASAIDSLPTVHVSPEHMADGSQCPVCKDEFELGETARELPCKHAYHSDCIVPWLRLHNSCPVCRQELPMPAGDESPDGAGAGDGGEETVPPWQLLAGWGPLAWLLTLGEPDVGGWDNGSRQRGTEADADDTGGNVSRGATILQSFVLVAACFFFVSFLV

SEQ ID NO: 15671 - protein, 178 aa, Triticum aestivum
  peptide (1)..(178): Ceres Seq. ID no. 13655961
  misc_feature (40)..(178): Pfam Name: Pfam Description:  Equine herpesvirus glycoprotein gp2
  misc_feature (9)..(178): NCBI GI NO: 28574039 NR Description: Salivary gland secretion 1 CG3047-PA
  misc_feature (9)..(178): NCBI GI NO: 28574039 NR Description: Salivary gland secretion 1 CG3047-PA
  misc_feature (9)..(178): NCBI GI NO: 28574039 NR Description: Salivary gland secretion 1 CG3047-PA
  misc_feature (12)..(178): NCBI GI NO: 28574039 NR Description: Salivary gland secretion 1 CG3047-PA
  misc_feature (9)..(178): NCBI GI NO: 28574039 NR Description: Salivary gland secretion 1 CG3047-PA
  misc_feature (9)..(178): NCBI GI NO: 28574039 NR Description: Salivary gland secretion 1 CG3047-PA
  misc_feature (9)..(178): NCBI GI NO: 28574039 NR Description: Salivary gland secretion 1 CG3047-PA
  misc_feature (9)..(178): NCBI GI NO: 28574039 NR Description: Salivary gland secretion 1 CG3047-PA
  misc_feature (9)..(178): NCBI GI NO: 28574039 NR Description: Salivary gland secretion 1 CG3047-PA
  misc_feature (9)..(178): NCBI GI NO: 28574039 NR Description: Salivary gland secretion 1 CG3047-PA
NILIENSITSHPRGCTQPLSAGTAGEPASELSTGHLPCQSPARTAPVGGSAGGGACTGATCAAARCARCRPRPPTSSARAASAASSTRSNSPCRASPCTRRPSGSSSRRRCSRTRAPPATGSYTGARTTTTRPTRQAHVSAASRPRRRPRERTAAWAVPMPVHRQPASTRRGSSPAPT

SEQ ID NO: 15672 - DNA, 1250 bp, Triticum aestivum
  misc_feature (1)..(1250): Ceres Seq. ID no. 13503557
aaacccgctcgagatctatcccaattctcgacctcacatcccctgctcgactcgacttcgtttaaacccaaaccctaatctcgacagagcctaaaccctagctcgggcggcggcggcggcggtcatggacggcggcggaggcatggggcccgtcggcggcggggtgggaggcatggtgggacccgtcggcgtcggcggcgggggcggcgggagcgacgtggagctcgtcagcaaaacgctgcagttcgagcacaagctcttctacttcgatctgaaggagaacccgcgggggaggtacctcaagatctccgagaagacgtccaccacgcgctccaccatcatcgtgcccatcgccggcgtcgcctggttcctcgacctcttcgactattacatccgcaccgacgagcgcgacgtcttcagcaaggagctacgcctcgacactaaggtgttctacttcgatattggggagaacaagagaggccgctaccttaaggtttcggaggcatctgtcaatagaaaccgtagcacgataattgttccggctggtagctctggcgaagaaggttgggaagcatttaggaatgtactgttagaaatcaatgacgaagcttcccgactctatgttcttccaaatcatccaagtcagcaacacctggaacctccagagcgccttcctggcctttctgacgatgttggtgctggatttatagctgggcatggcagccaatctgcatctgtacccgaggtagacgttgatgggcctcctattgaagaatttagtggcatggggctgtctaaggtgataagggcagatcagaaaaggtttttctttgacctgggcagcaacaacaggggccattatttgaggatttccgaggtcgctggagctgatcgttcgtcgataatcttgccactttctggtttgaagcagttccatgagatggtgggacactttgtagatataatgaaggacagacttgaaggaatgacgggcgcgaacgtgcgcactgtcgagcccagccagagatgattagctcgaccttgtggcacttactgctgttatgcctcctctaggatttgtgtaagtgatgtggtgtgtggttgcgtagatcacgcagtattaattcgtctgatggggataataatgtttgatgtttagttttttctttcttctgaattccgtggcgaggattgatttgcttgggaccttttctgttgaggaataataagcagtataatgttcgtgggtg

SEQ ID NO: 15673 - protein, 301 aa, Triticum aestivum
  peptide (1)..(301): Ceres Seq. ID no. 13503558
  misc_feature (31)..(281): Pfam Name: Pfam Description:  PurA ssDNA and RNA-binding protein
  misc_feature (1)..(301): NCBI GI NO: 34902984 NR Description: unnamed protein product
  misc_feature (1)..(301): NCBI GI NO: 18402871 NR Description: purine-rich single-strand ed DNA-binding protein -related
  misc_feature (1)..(301): NCBI GI NO: 30685174 NR Description: purine-rich single-strand ed DNA-binding protein -related
  misc_feature (1)..(211): NCBI GI NO: 25408208 NR Description: hypothetical protein At2g32080
  misc_feature (248)..(286): NCBI GI NO: 25408208 NR Description: hypothetical protein At2g32080
  misc_feature (26)..(161): NCBI GI NO: 24638642 NR Description: Purine-rich binding protein-alpha CG1507-PD
  misc_feature (227)..(289): NCBI GI NO: 24638642 NR Description: Purine-rich binding protein-alpha CG1507-PD
  misc_feature (26)..(161): NCBI GI NO: 24638638 NR Description: Purine-rich binding protein-alpha CG1507-PA
  misc_feature (227)..(289): NCBI GI NO: 24638638 NR Description: Purine-rich binding protein-alpha CG1507-PA
  misc_feature (26)..(161): NCBI GI NO: 24638636 NR Description: Purine-rich binding protein-alpha CG1507-PB
MDGGGGMGPVGGGVGGMVGPVGVGGGGGGSDVELVSKTLQFEHKLFYFDLKENPRGRYLKISEKTSTTRSTIIVPIAGVAWFLDLFDYYIRTDERDVFSKELRLDTKVFYFDIGENKRGRYLKVSEASVNRNRSTIIVPAGSSGEEGWEAFRNVLLEINDEASRLYVLPNHPSQQHLEPPERLPGLSDDVGAGFIAGHGSQSASVPEVDVDGPPIEEFSGMGLSKVIRADQKRFFFDLGSNNRGHYLRISEVAGADRSSIILPLSGLKQFHEMVGHFVDIMKDRLEGMTGANVRTVEPSQR

SEQ ID NO: 15674 - protein, 295 aa, Triticum aestivum
  peptide (1)..(295): Ceres Seq. ID no. 13503559
  misc_feature (25)..(275): Pfam Name: Pfam Description:  PurA ssDNA and RNA-binding protein
  misc_feature (1)..(295): NCBI GI NO: 34902984 NR Description: unnamed protein product
  misc_feature (1)..(295): NCBI GI NO: 18402871 NR Description: purine-rich single-strand ed DNA-binding protein -related
  misc_feature (1)..(295): NCBI GI NO: 30685174 NR Description: purine-rich single-strand ed DNA-binding protein -related
  misc_feature (1)..(205): NCBI GI NO: 25408208 NR Description: hypothetical protein At2g32080
  misc_feature (242)..(280): NCBI GI NO: 25408208 NR Description: hypothetical protein At2g32080
  misc_feature (20)..(155): NCBI GI NO: 24638642 NR Description: Purine-rich binding protein-alpha CG1507-PD
  misc_feature (221)..(283): NCBI GI NO: 24638642 NR Description: Purine-rich binding protein-alpha CG1507-PD
  misc_feature (20)..(155): NCBI GI NO: 24638638 NR Description: Purine-rich binding protein-alpha CG1507-PA
  misc_feature (221)..(283): NCBI GI NO: 24638638 NR Description: Purine-rich binding protein-alpha CG1507-PA
  misc_feature (20)..(155): NCBI GI NO: 24638636 NR Description: Purine-rich binding protein-alpha CG1507-PB
MGPVGGGVGGMVGPVGVGGGGGGSDVELVSKTLQFEHKLFYFDLKENPRGRYLKISEKTSTTRSTIIVPIAGVAWFLDLFDYYIRTDERDVFSKELRLDTKVFYFDIGENKRGRYLKVSEASVNRNRSTIIVPAGSSGEEGWEAFRNVLLEINDEASRLYVLPNHPSQQHLEPPERLPGLSDDVGAGFIAGHGSQSASVPEVDVDGPPIEEFSGMGLSKVIRADQKRFFFDLGSNNRGHYLRISEVAGADRSSIILPLSGLKQFHEMVGHFVDIMKDRLEGMTGANVRTVEPSQR

SEQ ID NO: 15675 - protein, 285 aa, Triticum aestivum
  peptide (1)..(285): Ceres Seq. ID no. 13503560
  misc_feature (15)..(265): Pfam Name: Pfam Description:  PurA ssDNA and RNA-binding protein
  misc_feature (1)..(285): NCBI GI NO: 34902984 NR Description: unnamed protein product
  misc_feature (1)..(285): NCBI GI NO: 18402871 NR Description: purine-rich single-strand ed DNA-binding protein -related
  misc_feature (1)..(285): NCBI GI NO: 30685174 NR Description: purine-rich single-strand ed DNA-binding protein -related
  misc_feature (1)..(195): NCBI GI NO: 25408208 NR Description: hypothetical protein At2g32080
  misc_feature (232)..(270): NCBI GI NO: 25408208 NR Description: hypothetical protein At2g32080
  misc_feature (10)..(145): NCBI GI NO: 24638642 NR Description: Purine-rich binding protein-alpha CG1507-PD
  misc_feature (211)..(273): NCBI GI NO: 24638642 NR Description: Purine-rich binding protein-alpha CG1507-PD
  misc_feature (10)..(145): NCBI GI NO: 24638638 NR Description: Purine-rich binding protein-alpha CG1507-PA
  misc_feature (211)..(273): NCBI GI NO: 24638638 NR Description: Purine-rich binding protein-alpha CG1507-PA
  misc_feature (10)..(145): NCBI GI NO: 24638636 NR Description: Purine-rich binding protein-alpha CG1507-PB
MVGPVGVGGGGGGSDVELVSKTLQFEHKLFYFDLKENPRGRYLKISEKTSTTRSTIIVPIAGVAWFLDLFDYYIRTDERDVFSKELRLDTKVFYFDIGENKRGRYLKVSEASVNRNRSTIIVPAGSSGEEGWEAFRNVLLEINDEASRLYVLPNHPSQQHLEPPERLPGLSDDVGAGFIAGHGSQSASVPEVDVDGPPIEEFSGMGLSKVIRADQKRFFFDLGSNNRGHYLRISEVAGADRSSIILPLSGLKQFHEMVGHFVDIMKDRLEGMTGANVRTVEPSQR

SEQ ID NO: 15676 - DNA, 1517 bp, Triticum aestivum
  misc_feature (1)..(1517): Ceres Seq. ID no. 13597753
gaccactgactgaccgccggccgctttctcctctacggcgacgcccggccgcccagctgctcaccgccggcgctctcgccgacggcgatgtcgtcttcggagccgcggccgcgccccgccgcctccttctccggcgacctgcccgaggacgcgctgtacgaggtcctcctccgcatcccggccaaggagctctgccgcctccgcgccgtctgcccggcctggcacgccctcacctccgatccgcccttcgtcgcggctcacaagtccacccaccgcacggcgcccccgctcctcgccattgcctaccgcgacgacagtgaggtcaacggcgttgcgatttcggatctgtcgggcaacgtcgtgaggcggattccagtcaccgggtatgagattgttatggtgaacgagtcgggcgatgccgttcaccggagctcaagcaaggaggagcatgatagcatctgtgttgtgcgcagccggctagacctcgtgtgcttccactggaatgtgtactctaggaccttctgcgtgctgaacccggtcactggagctactctcgacttaccgatgggccactcaaaggaattggagcatgagctggaggtacagggaagaaaatggggctgccatgtcgagtggtgcgcttttgggaaggtctcctctaccagagagtacaaggcgctccgcatctgtagcattcgtgaccggcaggtatgtgaggttatcacctttgatgacaccaaccatggaagctggaggaggaagcaggaccctccgccccgtatctgtaccggtcgtcagatgagatgcgtggtcgtcgatggggtggtgtacttcttgatggattttcactacacatactttgaaaccggggttataaccattgagcctggtagcatagcttcattcaacctcgaggcggaggagtggggtgttctacctggtcccggacaggtcaagaggtttgtgcaagagaacaagaaatacagttactcacagcttgagctccagttatcattggctgagttgaacggctgcttagttctggttcataatattcataaggtatctatggacttgtggtttttgacagattttgagaaaggtatctgggtcaagaaatacagcttgccttcacatgttgctaggcttttttggtatccttttctcatgttagatgatgggagaattttcttcagtgggatggattgtctggaaggtatattaagtggtggagagcaaggagagggattcctgcaaagttatgatccaagaaatgacacttatgctgatgcactagaactgagagatcccagatcaatttgcatttacacaggaagcgtgctgagtttatagcatagctgtcactgatgaggtcaggaatgatacatcgtactggctgttcaccttatgttctaaatgtgaacaattagtgagataatgttctgatgcatgcatctttgaaaaagtacctttgtgccttcaaagtatattatgttaatctccaatacattttgcgc

SEQ ID NO: 15677 - protein, 421 aa, Triticum aestivum
  peptide (1)..(421): Ceres Seq. ID no. 13597754
  misc_feature (16)..(58): Pfam Name: Pfam Description:  F-box domain
  misc_feature (7)..(421): NCBI GI NO: 34393890 NR Description: unknown protein
  misc_feature (102)..(421): NCBI GI NO: 34900700 NR Description: hypothetical protein~predicted by GeneMark
  misc_feature (7)..(103): NCBI GI NO: 34900700 NR Description: hypothetical protein~predicted by GeneMark
  misc_feature (147)..(337): NCBI GI NO: 34394075 NR Description: hypothetical protein
  misc_feature (147)..(419): NCBI GI NO: 33146635 NR Description: unknown protein
  misc_feature (1)..(112): NCBI GI NO: 33146635 NR Description: unknown protein
  misc_feature (147)..(367): NCBI GI NO: 34900696 NR Description: hypothetical protein~predicted by FGENESH etc.
  misc_feature (1)..(112): NCBI GI NO: 34900696 NR Description: hypothetical protein~predicted by FGENESH etc.
  misc_feature (1)..(369): NCBI GI NO: 34394081 NR Description: hypothetical protein
  misc_feature (193)..(421): NCBI GI NO: 25553615 NR Description: OJ1046_F10.9
MSSSEPRPRPAASFSGDLPEDALYEVLLRIPAKELCRLRAVCPAWHALTSDPPFVAAHKSTHRTAPPLLAIAYRDDSEVNGVAISDLSGNVVRRIPVTGYEIVMVNESGDAVHRSSSKEEHDSICVVRSRLDLVCFHWNVYSRTFCVLNPVTGATLDLPMGHSKELEHELEVQGRKWGCHVEWCAFGKVSSTREYKALRICSIRDRQVCEVITFDDTNHGSWRRKQDPPPRICTGRQMRCVVVDGVVYFLMDFHYTYFETGVITIEPGSIASFNLEAEEWGVLPGPGQVKRFVQENKKYSYSQLELQLSLAELNGCLVLVHNIHKVSMDLWFLTDFEKGIWVKKYSLPSHVARLFWYPFLMLDDGRIFFSGMDCLEGILSGGEQGEGFLQSYDPRNDTYADALELRDPRSICIYTGSVLSL

SEQ ID NO: 15678 - protein, 318 aa, Triticum aestivum
  peptide (1)..(318): Ceres Seq. ID no. 13597755
  misc_feature (1)..(318): NCBI GI NO: 34393890 NR Description: unknown protein
  misc_feature (1)..(318): NCBI GI NO: 34900700 NR Description: hypothetical protein~predicted by GeneMark
  misc_feature (44)..(234): NCBI GI NO: 34394075 NR Description: hypothetical protein
  misc_feature (44)..(316): NCBI GI NO: 33146635 NR Description: unknown protein
  misc_feature (44)..(264): NCBI GI NO: 34900696 NR Description: hypothetical protein~predicted by FGENESH etc.
  misc_feature (1)..(266): NCBI GI NO: 34394081 NR Description: hypothetical protein
  misc_feature (90)..(318): NCBI GI NO: 25553615 NR Description: OJ1046_F10.9
  misc_feature (104)..(298): NCBI GI NO: 34393887 NR Description: hypothetical protein
  misc_feature (1)..(152): NCBI GI NO: 37536946 NR Description: unknown protein
  misc_feature (1)..(147): NCBI GI NO: 37535496 NR Description: hypothetical protein
MVNESGDAVHRSSSKEEHDSICVVRSRLDLVCFHWNVYSRTFCVLNPVTGATLDLPMGHSKELEHELEVQGRKWGCHVEWCAFGKVSSTREYKALRICSIRDRQVCEVITFDDTNHGSWRRKQDPPPRICTGRQMRCVVVDGVVYFLMDFHYTYFETGVITIEPGSIASFNLEAEEWGVLPGPGQVKRFVQENKKYSYSQLELQLSLAELNGCLVLVHNIHKVSMDLWFLTDFEKGIWVKKYSLPSHVARLFWYPFLMLDDGRIFFSGMDCLEGILSGGEQGEGFLQSYDPRNDTYADALELRDPRSICIYTGSVLSL

SEQ ID NO: 15679 - protein, 262 aa, Triticum aestivum
  peptide (1)..(262): Ceres Seq. ID no. 13597756
  misc_feature (1)..(262): NCBI GI NO: 34393890 NR Description: unknown protein
  misc_feature (1)..(262): NCBI GI NO: 34900700 NR Description: hypothetical protein~predicted by GeneMark
  misc_feature (1)..(178): NCBI GI NO: 34394075 NR Description: hypothetical protein
  misc_feature (1)..(260): NCBI GI NO: 33146635 NR Description: unknown protein
  misc_feature (1)..(208): NCBI GI NO: 34900696 NR Description: hypothetical protein~predicted by FGENESH etc.
  misc_feature (1)..(210): NCBI GI NO: 34394081 NR Description: hypothetical protein
  misc_feature (34)..(262): NCBI GI NO: 25553615 NR Description: OJ1046_F10.9
  misc_feature (48)..(242): NCBI GI NO: 34393887 NR Description: hypothetical protein
  misc_feature (1)..(96): NCBI GI NO: 37536946 NR Description: unknown protein
  misc_feature (1)..(91): NCBI GI NO: 37535496 NR Description: hypothetical protein
MGHSKELEHELEVQGRKWGCHVEWCAFGKVSSTREYKALRICSIRDRQVCEVITFDDTNHGSWRRKQDPPPRICTGRQMRCVVVDGVVYFLMDFHYTYFETGVITIEPGSIASFNLEAEEWGVLPGPGQVKRFVQENKKYSYSQLELQLSLAELNGCLVLVHNIHKVSMDLWFLTDFEKGIWVKKYSLPSHVARLFWYPFLMLDDGRIFFSGMDCLEGILSGGEQGEGFLQSYDPRNDTYADALELRDPRSICIYTGSVLSL

SEQ ID NO: 15680 - DNA, 1343 bp, Triticum aestivum
  misc_feature (1)..(1343): Ceres Seq. ID no. 12625899
ctcttctctttgtggaagaagatgctgctcttgtgcaagagctccgtgctcgccgtcctgctcctccacgccctctctctgcccgcctcggcgctcgccgtcgggctcgggcggcgccaccgccgcgacgtcctgcccgggcccaagggctgcgacgtcttcagcggcagctgggtccgcgacgacggctccgccgaggctgcctacaccggctacaagtgcccggtcatcgacgcggagttcaactgccagctctacggccggccggactccgactacctccggtaccgctggaagccggccagctgcgagctacccaggtttgacggcgcagactttttgacgcggatgaaggggaagacggtgatgttcgtgggggattcgctgggccgtaaccagtgggagtcgctcgtctgcctgctgcacgccgccgcaccgcagtcgccgtcgcagctcgtctccgccgaccctctctatacctacaggttcatggagtacgagctggtggtgtctttctaccgcgcgccgtacctggtggacatcgacgtggtgcaggggaaacgggtcctcatgctcgacgacatcgccgagaacgcccaggcatggcgcggcgccgacgtgctctccttcaactccggccactggtggacgcacaccggcgcgcttcaggggtgggattacatgggggagggcgggcggtactcggaggacatggataggatggtggcgttccagcgcgggatgaccacatgggccaactgggtggacctcaacgtcgacccggccaagacccgtgtcttcttccagtccatgtcccccacccactacagctccaaggagtggcccaacccggtgtccaagaactgctacggagagacggtcccattggctgggctcaactccacggcgcagccgatgggccaggagcaggtgacgaaaacggtgctgcagggcatgaaaagcccggtccgtttgctcgacatcacggcgctgtcggcgctgcggaaggacgcgcacccgtcggtttacagcggcgacttctcgccggcgcagcgcggcaaccccgccggctccgccgactgcagccactggtgcctcccgggcctaccggacacctggaaccagctcttctacaccttgctcttctaccaatagcaaccgtactggacctgcatttggccagatgctgcagctgcagtgttggtattaattattttcctctgattccgctgtggatgtgtcatgtgagcggtataggtagacatgattgatgaggatgtacattgatctttgaatgacaaacagtagcccacacgtttgattagtaatagcaaacatgcccc

SEQ ID NO: 15681 - protein, 384 aa, Triticum aestivum
  peptide (1)..(384): Ceres Seq. ID no. 12625900
  misc_feature (51)..(383): NCBI GI NO: 15237711 NR Description: putative protein; protein id: At5g58600
  misc_feature (51)..(383): NCBI GI NO: 21553643 NR Description: unknown [Arabidopsis thaliana]
  misc_feature (39)..(383): NCBI GI NO: 18402220 NR Description: expressed protein; protein id: At2g30010
  misc_feature (37)..(381): NCBI GI NO: 18396930 NR Description: expressed protein; protein id: At1g29050
  misc_feature (35)..(381): NCBI GI NO: 34911864 NR Description: OSJNBb0032K15.9
  misc_feature (23)..(381): NCBI GI NO: 18403435 NR Description: expressed protein; protein id: At2g34070
  misc_feature (41)..(382): NCBI GI NO: 18406003 NR Description: expressed protein; protein id: At2g42570
  misc_feature (9)..(381): NCBI GI NO: 21593142 NR Description: unknown [Arabidopsis thaliana]
  misc_feature (36)..(381): NCBI GI NO: 28393769 NR Description: unknown protein [Arabidopsis thaliana]
  misc_feature (15)..(383): NCBI GI NO: 15224585 NR Description: hypothetical protein; protein id: At2g30900.1
LFSLWKKMLLLCKSSVLAVLLLHALSLPASALAVGLGRRHRRDVLPGPKGCDVFSGSWVRDDGSAEAAYTGYKCPVIDAEFNCQLYGRPDSDYLRYRWKPASCELPRFDGADFLTRMKGKTVMFVGDSLGRNQWESLVCLLHAAAPQSPSQLVSADPLYTYRFMEYELVVSFYRAPYLVDIDVVQGKRVLMLDDIAENAQAWRGADVLSFNSGHWWTHTGALQGWDYMGEGGRYSEDMDRMVAFQRGMTTWANWVDLNVDPAKTRVFFQSMSPTHYSSKEWPNPVSKNCYGETVPLAGLNSTAQPMGQEQVTKTVLQGMKSPVRLLDITALSALRKDAHPSVYSGDFSPAQRGNPAGSADCSHWCLPGLPDTWNQLFYTLLFYQ

SEQ ID NO: 15682 - protein, 377 aa, Triticum aestivum
  peptide (1)..(377): Ceres Seq. ID no. 12625901
  misc_feature (44)..(376): NCBI GI NO: 15237711 NR Description: putative protein; protein id: At5g58600
  misc_feature (44)..(376): NCBI GI NO: 21553643 NR Description: unknown [Arabidopsis thaliana]
  misc_feature (32)..(376): NCBI GI NO: 18402220 NR Description: expressed protein; protein id: At2g30010
  misc_feature (30)..(374): NCBI GI NO: 18396930 NR Description: expressed protein; protein id: At1g29050
  misc_feature (28)..(374): NCBI GI NO: 34911864 NR Description: OSJNBb0032K15.9
  misc_feature (16)..(374): NCBI GI NO: 18403435 NR Description: expressed protein; protein id: At2g34070
  misc_feature (34)..(375): NCBI GI NO: 18406003 NR Description: expressed protein; protein id: At2g42570
  misc_feature (2)..(374): NCBI GI NO: 21593142 NR Description: unknown [Arabidopsis thaliana]
  misc_feature (29)..(374): NCBI GI NO: 28393769 NR Description: unknown protein [Arabidopsis thaliana]
  misc_feature (8)..(376): NCBI GI NO: 15224585 NR Description: hypothetical protein; protein id: At2g30900.1
MLLLCKSSVLAVLLLHALSLPASALAVGLGRRHRRDVLPGPKGCDVFSGSWVRDDGSAEAAYTGYKCPVIDAEFNCQLYGRPDSDYLRYRWKPASCELPRFDGADFLTRMKGKTVMFVGDSLGRNQWESLVCLLHAAAPQSPSQLVSADPLYTYRFMEYELVVSFYRAPYLVDIDVVQGKRVLMLDDIAENAQAWRGADVLSFNSGHWWTHTGALQGWDYMGEGGRYSEDMDRMVAFQRGMTTWANWVDLNVDPAKTRVFFQSMSPTHYSSKEWPNPVSKNCYGETVPLAGLNSTAQPMGQEQVTKTVLQGMKSPVRLLDITALSALRKDAHPSVYSGDFSPAQRGNPAGSADCSHWCLPGLPDTWNQLFYTLLFYQ

SEQ ID NO: 15683 - protein, 268 aa, Triticum aestivum
  peptide (1)..(268): Ceres Seq. ID no. 12625902
  misc_feature (1)..(267): NCBI GI NO: 15237711 NR Description: putative protein; protein id: At5g58600
  misc_feature (1)..(267): NCBI GI NO: 21553643 NR Description: unknown [Arabidopsis thaliana]
  misc_feature (1)..(267): NCBI GI NO: 18402220 NR Description: expressed protein; protein id: At2g30010
  misc_feature (1)..(265): NCBI GI NO: 18396930 NR Description: expressed protein; protein id: At1g29050
  misc_feature (1)..(265): NCBI GI NO: 34911864 NR Description: OSJNBb0032K15.9
  misc_feature (1)..(265): NCBI GI NO: 18403435 NR Description: expressed protein; protein id: At2g34070
  misc_feature (1)..(266): NCBI GI NO: 18406003 NR Description: expressed protein; protein id: At2g42570
  misc_feature (1)..(265): NCBI GI NO: 21593142 NR Description: unknown [Arabidopsis thaliana]
  misc_feature (1)..(265): NCBI GI NO: 28393769 NR Description: unknown protein [Arabidopsis thaliana]
  misc_feature (1)..(267): NCBI GI NO: 15224585 NR Description: hypothetical protein; protein id: At2g30900.1
MKGKTVMFVGDSLGRNQWESLVCLLHAAAPQSPSQLVSADPLYTYRFMEYELVVSFYRAPYLVDIDVVQGKRVLMLDDIAENAQAWRGADVLSFNSGHWWTHTGALQGWDYMGEGGRYSEDMDRMVAFQRGMTTWANWVDLNVDPAKTRVFFQSMSPTHYSSKEWPNPVSKNCYGETVPLAGLNSTAQPMGQEQVTKTVLQGMKSPVRLLDITALSALRKDAHPSVYSGDFSPAQRGNPAGSADCSHWCLPGLPDTWNQLFYTLLFYQ

SEQ ID NO: 15684 - DNA, 1368 bp, Triticum aestivum
  misc_feature (1)..(1368): Ceres Seq. ID no. 12617911
cccccgagcgcgccccgcctcgccgaccggtcgccggagatgtcccgcacgctggtgcagccggtggggcagaagcggctgaccaacgtggccgtggtgcggctgcgcaagggcggccagcggttcgagatcgcctgcttccccaacaaggtggtcaactggcgcgaccgcgtcgagaaggacctcgacgaggtgctccagtcccacaacgtctactccaacgtctccaagggcgtcctcgccaagtccaaggacctcatcaggatcttcggcaccgacgacctcgtcgaaatctgcgtcgagattttggagaaaggggagctccaggtttctggcaaggagagggaggcgcagctgtccgcgcagttcagggacatcgccaccatcgtgatggagaagactatcagtactgagacccggcgcccctacaccatgaacatgatcgagcgcatcatgcacgagatacactttgccgtcgatccaaaccttacctccaaggaacaggcactgagagttattaagaagctaatcgagaaccctaaatacaagataaagcgtgcaccattgacagtgcggttcattgcacctaagtccaatcttgctggccttatggagaagcttgatgggtggaatgcaattgttctttcaaaggatgagtctgccgatcagtcttccgttgtatgtgagattgagccatctattctgcactcgtgtgaagagaaactgaaggacgtgcaagggagggtggaagtactctcggtgtcggcacacacagaaggtggctcttctacagaccaatatgacaatgtcgaggacaatgtggagaaggcacagcccgtgcctgcgaaggagtctggtgctgttgctcagctaagtgaaaccatgcagaaacagagcctttcaagtgaagtggaaagccagggtcaggcaccaggcaagccgcagaaaagatgcagagaatgtgacgtattcatggaggacaagctgtacagagaccactgcaagtccgggtggcacaagcacaactacacacgccacaagaatgggcttcccccactcagccaagaggagtgcttgatggaaatggagatggcagattcccagaggggtctgaaggactacgatttctgaggtgggttttgtctagcactccctctcaccacgccttcaaggccgagagatggtatgcacaaggcatgaattttgcagtcttgttgtttccgtggacatagtcatcatttggtaaatgctggtatgaagtggggaactagttttgcggtacgctagcaagtttataaaatgtaatcaggttacgttgtgtgaatgtgaactgtgtgtagttggctgagtaaacttgtggcagtactc

SEQ ID NO: 15685 - protein, 376 aa, Triticum aestivum
  peptide (1)..(376): Ceres Seq. ID no. 12617912
  misc_feature (19)..(259): Pfam Name: Pfam Description:  Uncharacterized protein family UPF0023
  misc_feature (14)..(376): NCBI GI NO: 21554225 NR Description: unknown [Arabidopsis thaliana]
  misc_feature (14)..(376): NCBI GI NO: 18401084 NR Description: expressed protein; protein id: At1g43860
  misc_feature (17)..(260): NCBI GI NO: 23956138 NR Description: RIKEN cDNA 4733401P19 [Mus musculus]
  misc_feature (17)..(260): NCBI GI NO: 27664348 NR Description: similar to RIKEN cDNA 4733401P19
  misc_feature (17)..(260): NCBI GI NO: 28416940 NR Description: Shwachman-Bodian-Diamond syndrome protein
  misc_feature (17)..(260): NCBI GI NO: 4929663 NR Description: CGI-97 protein [Homo sapiens]
  misc_feature (35)..(260): NCBI GI NO: 29476858 NR Description: Unknown (protein for MGC:56700) [Danio rerio]
  misc_feature (14)..(260): NCBI GI NO: 39586134 NR Description: Hypothetical protein CBG15250
  misc_feature (17)..(266): NCBI GI NO: 28828466 NR Description: similar to Homo sapiens (Human)
  misc_feature (14)..(260): NCBI GI NO: 25144459 NR Description: Protein III (28.5 kD) [Caenorhabditis elegans]
PPSAPRLADRSPEMSRTLVQPVGQKRLTNVAVVRLRKGGQRFEIACFPNKVVNWRDRVEKDLDEVLQSHNVYSNVSKGVLAKSKDLIRIFGTDDLVEICVEILEKGELQVSGKEREAQLSAQFRDIATIVMEKTISTETRRPYTMNMIERIMHEIHFAVDPNLTSKEQALRVIKKLIENPKYKIKRAPLTVRFIAPKSNLAGLMEKLDGWNAIVLSKDESADQSSVVCEIEPSILHSCEEKLKDVQGRVEVLSVSAHTEGGSSTDQYDNVEDNVEKAQPVPAKESGAVAQLSETMQKQSLSSEVESQGQAPGKPQKRCRECDVFMEDKLYRDHCKSGWHKHNYTRHKNGLPPLSQEECLMEMEMADSQRGLKDYDF

SEQ ID NO: 15686 - protein, 363 aa, Triticum aestivum
  peptide (1)..(363): Ceres Seq. ID no. 12617913
  misc_feature (6)..(246): Pfam Name: Pfam Description:  Uncharacterized protein family UPF0023
  misc_feature (1)..(363): NCBI GI NO: 21554225 NR Description: unknown [Arabidopsis thaliana]
  misc_feature (1)..(363): NCBI GI NO: 18401084 NR Description: expressed protein; protein id: At1g43860
  misc_feature (4)..(247): NCBI GI NO: 23956138 NR Description: RIKEN cDNA 4733401P19 [Mus musculus]
  misc_feature (4)..(247): NCBI GI NO: 27664348 NR Description: similar to RIKEN cDNA 4733401P19
  misc_feature (4)..(247): NCBI GI NO: 28416940 NR Description: Shwachman-Bodian-Diamond syndrome protein
  misc_feature (4)..(247): NCBI GI NO: 4929663 NR Description: CGI-97 protein [Homo sapiens]
  misc_feature (22)..(247): NCBI GI NO: 29476858 NR Description: Unknown (protein for MGC:56700) [Danio rerio]
  misc_feature (1)..(247): NCBI GI NO: 39586134 NR Description: Hypothetical protein CBG15250
  misc_feature (4)..(253): NCBI GI NO: 28828466 NR Description: similar to Homo sapiens (Human)
  misc_feature (1)..(247): NCBI GI NO: 25144459 NR Description: Protein III (28.5 kD) [Caenorhabditis elegans]
MSRTLVQPVGQKRLTNVAVVRLRKGGQRFEIACFPNKVVNWRDRVEKDLDEVLQSHNVYSNVSKGVLAKSKDLIRIFGTDDLVEICVEILEKGELQVSGKEREAQLSAQFRDIATIVMEKTISTETRRPYTMNMIERIMHEIHFAVDPNLTSKEQALRVIKKLIENPKYKIKRAPLTVRFIAPKSNLAGLMEKLDGWNAIVLSKDESADQSSVVCEIEPSILHSCEEKLKDVQGRVEVLSVSAHTEGGSSTDQYDNVEDNVEKAQPVPAKESGAVAQLSETMQKQSLSSEVESQGQAPGKPQKRCRECDVFMEDKLYRDHCKSGWHKHNYTRHKNGLPPLSQEECLMEMEMADSQRGLKDYDF

SEQ ID NO: 15687 - protein, 246 aa, Triticum aestivum
  peptide (1)..(246): Ceres Seq. ID no. 12617914
  misc_feature (1)..(129): Pfam Name: Pfam Description:  Uncharacterized protein family UPF0023
  misc_feature (1)..(246): NCBI GI NO: 21554225 NR Description: unknown [Arabidopsis thaliana]
  misc_feature (1)..(246): NCBI GI NO: 18401084 NR Description: expressed protein; protein id: At1g43860
  misc_feature (1)..(130): NCBI GI NO: 23956138 NR Description: RIKEN cDNA 4733401P19 [Mus musculus]
  misc_feature (1)..(130): NCBI GI NO: 27664348 NR Description: similar to RIKEN cDNA 4733401P19
  misc_feature (1)..(130): NCBI GI NO: 28416940 NR Description: Shwachman-Bodian-Diamond syndrome protein
  misc_feature (1)..(130): NCBI GI NO: 4929663 NR Description: CGI-97 protein [Homo sapiens]
  misc_feature (1)..(130): NCBI GI NO: 29476858 NR Description: Unknown (protein for MGC:56700) [Danio rerio]
  misc_feature (1)..(130): NCBI GI NO: 39586134 NR Description: Hypothetical protein CBG15250
  misc_feature (1)..(136): NCBI GI NO: 28828466 NR Description: similar to Homo sapiens (Human)
  misc_feature (1)..(130): NCBI GI NO: 25144459 NR Description: Protein III (28.5 kD) [Caenorhabditis elegans]
MEKTISTETRRPYTMNMIERIMHEIHFAVDPNLTSKEQALRVIKKLIENPKYKIKRAPLTVRFIAPKSNLAGLMEKLDGWNAIVLSKDESADQSSVVCEIEPSILHSCEEKLKDVQGRVEVLSVSAHTEGGSSTDQYDNVEDNVEKAQPVPAKESGAVAQLSETMQKQSLSSEVESQGQAPGKPQKRCRECDVFMEDKLYRDHCKSGWHKHNYTRHKNGLPPLSQEECLMEMEMADSQRGLKDYDF

SEQ ID NO: 15688 - DNA, 1257 bp, Triticum aestivum
  misc_feature (1)..(1257): Ceres Seq. ID no. 13597668
accgcaaagaaccacgcgaaccgaacccacgcaccatcagcgaagaggagagggggcggccaaagacaagagaaaacgcagccgccgccgggaggagagcgcagcgtgggagcaaggagcggcagccggcaggcaatgggcaacagcatcggcggccggcgcaagggcgccaaggtgatgcagctggacggcaccgccttcagggtgaagccgccggcgtacgcgggcgccgtgctgcgcgaccacccgggcttccagctgctcgagtcggagcaggtcaagctgctcggcgtccgcgcgcgcccgctcgagcaggacgcgctgctccgcccgggccagctctacttcctcgtcgcgctgccccgccccaccgtgcccccgcgccgcgcctggtccggcgcgctccacgtcggcgcgcgcgagaggctcgagtcgctcatgctcacgcgccgctccacctccgacctcaccttcccgacctcgggcaccgcgccggcctccccgatgtccaccgcctccgagggcgggccggtccagctcaggatgcgcctgcccaaggcgcaggtcgccaagcttatgggcgagagccgggacgccgccgaggcggccgctaagatcatgcagctctgcgccgccaacggcgctgtgacgccggagcggagcccgcggttcctgccgacggcggactggggcactggtgggttcgcgcagacgccagagcggagcccgcggttcgtgccgacgccggactggggcgccggcaggttcgcgcaaaccccagagcggagtcccaggttcgccgtcacgcccgagtggggtgccaggttcatgatgccgacgacgccggagaggggcgtagagacggcgaagacgccggataggtggcccgctttaccccgcacgccggagtatgcatcagcggacgtcaaggccagccggaaggagaagcgaacgcggttcctggccttgccggatgagatcatagcatgatggcttctcgtccacctgaagtgatagatcgatcgaccacagattgccggagctggggacgagaggccgccgacggtttcctgcctcgcgcctcgcccgcttcttcttcttctccttctccttcttcttcttcatacggcatggagcgtcgttttcctctcttgtttacctttttagcctcggcctgcgataacattgctgcgagctgtggtgctctcagtagttagcttaggggagatgtatatggacctctatgtataaacttac

SEQ ID NO: 15689 - protein, 329 aa, Triticum aestivum
  peptide (1)..(329): Ceres Seq. ID no. 13597669
  misc_feature (46)..(226): NCBI GI NO: 25553695 NR Description: P0479C08.15
  misc_feature (46)..(214): NCBI GI NO: 21700771 NR Description: unknown [Glycine max]
  misc_feature (46)..(207): NCBI GI NO: 15240363 NR Description: expressed protein [Arabidopsis thaliana]
  misc_feature (46)..(212): NCBI GI NO: 30677912 NR Description: expressed protein [Arabidopsis thaliana]
  misc_feature (46)..(213): NCBI GI NO: 21700773 NR Description: unknown [Glycine max]
  misc_feature (46)..(207): NCBI GI NO: 25404626 NR Description: hypothetical protein F28G11.8
  misc_feature (46)..(207): NCBI GI NO: 30697354 NR Description: expressed protein [Arabidopsis thaliana]
  misc_feature (46)..(212): NCBI GI NO: 25371187 NR Description: hypothetical protein At2g01340
  misc_feature (46)..(139): NCBI GI NO: 16265861 NR Description: unknown [Musa acuminata]
  misc_feature (46)..(210): NCBI GI NO: 22330562 NR Description: hypothetical protein [Arabidopsis thaliana]
TAKNHANRTHAPSAKRRGGGQRQEKTQPPPGGERSVGARSGSRQAMGNSIGGRRKGAKVMQLDGTAFRVKPPAYAGAVLRDHPGFQLLESEQVKLLGVRARPLEQDALLRPGQLYFLVALPRPTVPPRRAWSGALHVGARERLESLMLTRRSTSDLTFPTSGTAPASPMSTASEGGPVQLRMRLPKAQVAKLMGESRDAAEAAAKIMQLCAANGAVTPERSPRFLPTADWGTGGFAQTPERSPRFVPTPDWGAGRFAQTPERSPRFAVTPEWGARFMMPTTPERGVETAKTPDRWPALPRTPEYASADVKASRKEKRTRFLALPDEIIA

SEQ ID NO: 15690 - protein, 284 aa, Triticum aestivum
  peptide (1)..(284): Ceres Seq. ID no. 13597670
  misc_feature (1)..(181): NCBI GI NO: 25553695 NR Description: P0479C08.15
  misc_feature (1)..(169): NCBI GI NO: 21700771 NR Description: unknown [Glycine max]
  misc_feature (1)..(162): NCBI GI NO: 15240363 NR Description: expressed protein [Arabidopsis thaliana]
  misc_feature (1)..(167): NCBI GI NO: 30677912 NR Description: expressed protein [Arabidopsis thaliana]
  misc_feature (1)..(168): NCBI GI NO: 21700773 NR Description: unknown [Glycine max]
  misc_feature (1)..(162): NCBI GI NO: 25404626 NR Description: hypothetical protein F28G11.8
  misc_feature (1)..(162): NCBI GI NO: 30697354 NR Description: expressed protein [Arabidopsis thaliana]
  misc_feature (1)..(167): NCBI GI NO: 25371187 NR Description: hypothetical protein At2g01340
  misc_feature (1)..(94): NCBI GI NO: 16265861 NR Description: unknown [Musa acuminata]
  misc_feature (1)..(165): NCBI GI NO: 22330562 NR Description: hypothetical protein [Arabidopsis thaliana]
MGNSIGGRRKGAKVMQLDGTAFRVKPPAYAGAVLRDHPGFQLLESEQVKLLGVRARPLEQDALLRPGQLYFLVALPRPTVPPRRAWSGALHVGARERLESLMLTRRSTSDLTFPTSGTAPASPMSTASEGGPVQLRMRLPKAQVAKLMGESRDAAEAAAKIMQLCAANGAVTPERSPRFLPTADWGTGGFAQTPERSPRFVPTPDWGAGRFAQTPERSPRFAVTPEWGARFMMPTTPERGVETAKTPDRWPALPRTPEYASADVKASRKEKRTRFLALPDEIIA

SEQ ID NO: 15691 - protein, 270 aa, Triticum aestivum
  peptide (1)..(270): Ceres Seq. ID no. 13597671
  misc_feature (1)..(167): NCBI GI NO: 25553695 NR Description: P0479C08.15
  misc_feature (1)..(155): NCBI GI NO: 21700771 NR Description: unknown [Glycine max]
  misc_feature (1)..(148): NCBI GI NO: 15240363 NR Description: expressed protein [Arabidopsis thaliana]
  misc_feature (1)..(153): NCBI GI NO: 30677912 NR Description: expressed protein [Arabidopsis thaliana]
  misc_feature (1)..(154): NCBI GI NO: 21700773 NR Description: unknown [Glycine max]
  misc_feature (1)..(148): NCBI GI NO: 25404626 NR Description: hypothetical protein F28G11.8
  misc_feature (1)..(148): NCBI GI NO: 30697354 NR Description: expressed protein [Arabidopsis thaliana]
  misc_feature (1)..(153): NCBI GI NO: 25371187 NR Description: hypothetical protein At2g01340
  misc_feature (1)..(80): NCBI GI NO: 16265861 NR Description: unknown [Musa acuminata]
  misc_feature (1)..(151): NCBI GI NO: 22330562 NR Description: hypothetical protein [Arabidopsis thaliana]
MQLDGTAFRVKPPAYAGAVLRDHPGFQLLESEQVKLLGVRARPLEQDALLRPGQLYFLVALPRPTVPPRRAWSGALHVGARERLESLMLTRRSTSDLTFPTSGTAPASPMSTASEGGPVQLRMRLPKAQVAKLMGESRDAAEAAAKIMQLCAANGAVTPERSPRFLPTADWGTGGFAQTPERSPRFVPTPDWGAGRFAQTPERSPRFAVTPEWGARFMMPTTPERGVETAKTPDRWPALPRTPEYASADVKASRKEKRTRFLALPDEIIA

SEQ ID NO: 15692 - DNA, 1355 bp, Triticum aestivum
  misc_feature (1)..(1355): Ceres Seq. ID no. 13598574
  misc_feature (887)..(887): n is a, c, t, g, unknown, or other
aacaagaaaggtctcctccccaccaccccaccaagaaaccgaagtcgtcacactcgcagtcactggctcactccactccgcgcaccctcactctcgctcgctccgtccgtctccgtccggcgagcccgcccgcgcctgcggcgatggccgtgagcaacaacatcacggcgtgcctcaacttcctggccctaatctgcaccatcccggtggtggccacgggcctctggttcgcctccaagcagggcgccgagtgcgcgcggctggcgcgctggcccgtggccatcctcggcgtgctcctcctcctcgtcgccctcgcgggcttcgtcggcgcctactggaaccgccagggcctgctggccgcctacctcttcgccatggcggccctcatcacgctcctcctggcgctcctcgtcttcgccttcgccgtcacccacggctccggggcgtacgacgtgcccggccgcgcctaccgcgagtaccgcctcgagggcttctctggctggctgcgcgggtatgttgctggggatccccggcggtgggaggggatcagggcgtgcctcgtcgcgtcggacacctgcaagaagctcaccatggagaccgccttcttcatcgcccccgagcagttctaccagtccgacctctccccgctccagtccggctgctgcaagccgccgacggcgtgcgggtacgcgtacgtgtccccgacggtgtgggccagcccggcaaacccggcggcggacgcggactgcggcgcctggagcaacgacccgcggcagctctgctactggtgcgaatcctgcaaggccggcatgctgggcaccctgcgcgaccagtggcgccgggccaacgtggcgctcgtcgccgccaccgtcgcgctcctcgtcgtntacgtcatcggctgcagcgccttcaagaacgcccagaccgaggacctcttccgccgctacaagtggagcaacaacacctgacgctgatagatgtaccaatcccgaacgaaggaaggagttctctggtggcagtaccagtgctagtatgctgacattgtgcactagtatgattatcggacgaaccagtgtagattatgtagtgggaagtactaaggttgaaagaagtttcactctcgtgagttgtatttggccactagacctggtgcattcgctagtgccatggtttatggctagagctatagtgtggtgagatttctcggttttcaggtcggttaatggagacattttcacccaaaattctcgatgaaatgcagtgtacgttcagatttgtgattgtttcaaggcaaaaataaataaatcatgattgtgataaaaaaaaaaaaaaaaaagcttatcgataccgtcgac

SEQ ID NO: 15693 - protein, 345 aa, Triticum aestivum
  peptide (1)..(345): Ceres Seq. ID no. 15222375
  misc_feature (296)..(296): Xaa is any aa, unknown or other
TRKVSSPPPHQETEVVTLAVTGSLHSAHPHSRSLRPSPSGEPARACGDGREQQHHGVPQLPGPNLHHPGGGHGPLVRLQAGRRVRAAGALARGHPRRAPPPRRPRGLRRRLLEPPGPAGRLPLRHGGPHHAPPGAPRLRLRRHPRLRGVRRARPRLPRVPPRGLLWLAARVCCWGSPAVGGDQGVPRRVGHLQEAHHGDRLLHRPRAVLPVRPLPAPVRLLQAADGVRVRVRVPDGVGQPGKPGGGRGLRRLEQRPAAALLLVRILQGRHAGHPARPVAPGQRGARRRHRRAPRRXRHRLQRLQERPDRGPLPPLQVEQQHLTLIDVPIPNEGRSSLVAVPVLVC

SEQ ID NO: 15694 - protein, 321 aa, Triticum aestivum
  peptide (1)..(321): Ceres Seq. ID no. 15222376
  misc_feature (50)..(292): Pfam Name: Pfam Description:  Tetraspanin family
  misc_feature (48)..(316): NCBI GI NO: 15224802 NR Description: senescence-associated protein- related
  misc_feature (48)..(316): NCBI GI NO: 17979386 NR Description: putative senescence-associated protein 5
  misc_feature (48)..(316): NCBI GI NO: 15237490 NR Description: senescence-associated protein, putative
  misc_feature (50)..(316): NCBI GI NO: 3551954 NR Description: senescence-associated protein 5
  misc_feature (47)..(317): NCBI GI NO: 29367553 NR Description: senescence-associated protein-like protein
  misc_feature (51)..(314): NCBI GI NO: 20197174 NR Description: hypothetical protein [Arabidopsis thaliana]
  misc_feature (51)..(305): NCBI GI NO: 15234374 NR Description: senescence-associated protein, putative
  misc_feature (51)..(321): NCBI GI NO: 15234743 NR Description: senescence-associated protein family
  misc_feature (51)..(321): NCBI GI NO: 21537169 NR Description: senescence-associated protein-like protein
  misc_feature (48)..(307): NCBI GI NO: 15238641 NR Description: senescence-associated protein family
  misc_feature (295)..(295): Xaa is any aa, unknown or other
QERSPPHHPTKKPKSSHSQSLAHSTPRTLTLARSVRLRPASPPAPAAMAVSNNITACLNFLALICTIPVVATGLWFASKQGAECARLARWPVAILGVLLLLVALAGFVGAYWNRQGLLAAYLFAMAALITLLLALLVFAFAVTHGSGAYDVPGRAYREYRLEGFSGWLRGYVAGDPRRWEGIRACLVASDTCKKLTMETAFFIAPEQFYQSDLSPLQSGCCKPPTACGYAYVSPTVWASPANPAADADCGAWSNDPRQLCYWCESCKAGMLGTLRDQWRRANVALVAATVALLVXYVIGCSAFKNAQTEDLFRRYKWSNNT

SEQ ID NO: 15695 - protein, 274 aa, Triticum aestivum
  peptide (1)..(274): Ceres Seq. ID no. 15222377
  misc_feature (3)..(245): Pfam Name: Pfam Description:  Tetraspanin family
  misc_feature (1)..(269): NCBI GI NO: 15224802 NR Description: senescence-associated protein- related
  misc_feature (1)..(269): NCBI GI NO: 17979386 NR Description: putative senescence-associated protein 5
  misc_feature (1)..(269): NCBI GI NO: 15237490 NR Description: senescence-associated protein, putative
  misc_feature (3)..(269): NCBI GI NO: 3551954 NR Description: senescence-associated protein 5
  misc_feature (1)..(270): NCBI GI NO: 29367553 NR Description: senescence-associated protein-like protein
  misc_feature (4)..(267): NCBI GI NO: 20197174 NR Description: hypothetical protein [Arabidopsis thaliana]
  misc_feature (4)..(258): NCBI GI NO: 15234374 NR Description: senescence-associated protein, putative
  misc_feature (4)..(274): NCBI GI NO: 15234743 NR Description: senescence-associated protein family
  misc_feature (4)..(274): NCBI GI NO: 21537169 NR Description: senescence-associated protein-like protein
  misc_feature (1)..(260): NCBI GI NO: 15238641 NR Description: senescence-associated protein family
  misc_feature (248)..(248): Xaa is any aa, unknown or other
MAVSNNITACLNFLALICTIPVVATGLWFASKQGAECARLARWPVAILGVLLLLVALAGFVGAYWNRQGLLAAYLFAMAALITLLLALLVFAFAVTHGSGAYDVPGRAYREYRLEGFSGWLRGYVAGDPRRWEGIRACLVASDTCKKLTMETAFFIAPEQFYQSDLSPLQSGCCKPPTACGYAYVSPTVWASPANPAADADCGAWSNDPRQLCYWCESCKAGMLGTLRDQWRRANVALVAATVALLVXYVIGCSAFKNAQTEDLFRRYKWSNNT

SEQ ID NO: 15696 - DNA, 1220 bp, Triticum aestivum
  misc_feature (1)..(1220): Ceres Seq. ID no. 13597757
atcgaaaacccttcgacccaacccatacaaactcaaacccccacgaaaacccctctctcctctccgcttctccctggccgccgaaaccctaacctagccgcgcgtcgccgccgccgccggcgcaccagtcaccatgtcgaaccccaaggggtcgaagatgctccagttcgtcaactaccggatgcgcgtgacgatccaggacggccgccaactcgtggggaagttcatggccttcgatcgccacatgaacctcgtcctcggcgactgcgaggagttccgcaagctcccgccctcaaaatcttccaagaccacaggcgagcgcgaggagcggaggacgctcggcctgctgcttcttcgtggcgaggaagtcgtctccatgaccgtcgagggcccgcccccgcccgacgagtcccgggccaaggcctccgctggtgttgccgcgctttccggcactggcgtcggtcgcgctgccggccgtggggtggccaccggcccgctgctccaggcgcagcccggcctctccggccctgttcggggcgtgggcggtccggcccccggcatgatgcagccccagatctcgcgtcccccaatgccgaacctctcagcgccgccggtggcgtacccacaggtcgtccgcccgccaccgatgggtatgccgcccatgcgacctggtggcccgccaccgatgcagatgcagtttcagcgcccgccgggtcccccgcctgcgccataccctggggccccgccgcagcagttcatgaggggaccgccaccgatggggcctccaccagggaggccggggatgccaagcatgccaccaccgccagggatgaggccgatgccaccaacgcagtttggacaaccacccaggcatggaatgccgccaccaccgcctggtccacagcagcctggacagaacccccagcagtagaaaaacctttctggtttggtccttgcagtcccacctgtggaagattcatcttcggaagagagaaaagtcttgtcggtgcagcactcttgcttttgatgggaggagacggactgttttccaacgcaatgtacgtaaaagaggctgaagcttgtttaactgttggttgttaagctagggacatggatagactgtttcgttgtgtcagtaccttgttgctggatgtgcttgcacttgtattgagatattatttcgcactattaacttcagatcataaattgctttgcttgcg

SEQ ID NO: 15697 - protein, 366 aa, Triticum aestivum
  peptide (1)..(366): Ceres Seq. ID no. 13597758
IENPSTQPIQTQTPTKTPLSSPLLPGRRNPNLAARRRRRRRTSHHVEPQGVEDAPVRQLPDARDDPGRPPTRGEVHGLRSPHEPRPRRLRGVPQAPALKIFQDHRRARGAEDARPAASSWRGSRLHDRRGPAPARRVPGQGLRWCCRAFRHWRRSRCRPWGGHRPAAPGAARPLRPCSGRGRSGPRHDAAPDLASPNAEPLSAAGGVPTGRPPATDGYAAHATWWPATDADAVSAPAGSPACAIPWGPAAAVHEGTATDGASTREAGDAKHATTARDEADATNAVWTTTQAWNAATTAWSTAAWTEPPAVEKPFWFGPCSPTCGRFIFGREKSLVGAALLLLMGGDGLFSNAMYVKEAEACLTVGC

SEQ ID NO: 15698 - protein, 265 aa, Triticum aestivum
  peptide (1)..(265): Ceres Seq. ID no. 13597759
  misc_feature (7)..(84): Pfam Name: Pfam Description:  LSM domain
  misc_feature (1)..(265): NCBI GI NO: 34900024 NR Description: putative snRNP protein
  misc_feature (1)..(265): NCBI GI NO: 33146808 NR Description: putative snRNP
  misc_feature (1)..(265): NCBI GI NO: 15237095 NR Description: small nuclear ribonucleoprotein, putative (snRNP)
  misc_feature (1)..(254): NCBI GI NO: 15241519 NR Description: small nuclear ribonucleoprotein, putative (snRNP)
  misc_feature (1)..(254): NCBI GI NO: 21536707 NR Description: putative snRNP protein [Arabidopsis thaliana]
  misc_feature (1)..(254): NCBI GI NO: 38150007 NR Description: small nuclear ribonucleo protein polypeptide B/B'isoform B'
  misc_feature (1)..(254): NCBI GI NO: 8099650 NR Description: snRNP-associated protein; SmB [Danio rerio]
  misc_feature (1)..(254): NCBI GI NO: 10720263 NR Description: Small nuclear ribonucleo protein associated proteinB'
  misc_feature (1)..(254): NCBI GI NO: 12643865 NR Description: Small nuclear ribonucleo protein associated proteinB'
  misc_feature (1)..(254): NCBI GI NO: 7208221 NR Description: small nuclear ribonucleoprotein B'
MSNPKGSKMLQFVNYRMRVTIQDGRQLVGKFMAFDRHMNLVLGDCEEFRKLPPSKSSKTTGEREERRTLGLLLLRGEEVVSMTVEGPPPPDESRAKASAGVAALSGTGVGRAAGRGVATGPLLQAQPGLSGPVRGVGGPAPGMMQPQISRPPMPNLSAPPVAYPQVVRPPPMGMPPMRPGGPPPMQMQFQRPPGPPPAPYPGAPPQQFMRGPPPMGPPPGRPGMPSMPPPPGMRPMPPTQFGQPPRHGMPPPPPGPQQPGQNPQQ

SEQ ID NO: 15699 - protein, 257 aa, Triticum aestivum
  peptide (1)..(257): Ceres Seq. ID no. 13597760
  misc_feature (1)..(76): Pfam Name: Pfam Description:  LSM domain
  misc_feature (1)..(257): NCBI GI NO: 34900024 NR Description: putative snRNP protein
  misc_feature (1)..(257): NCBI GI NO: 33146808 NR Description: putative snRNP
  misc_feature (1)..(257): NCBI GI NO: 15237095 NR Description: small nuclear ribonucleoprotein, putative (snRNP)
  misc_feature (1)..(246): NCBI GI NO: 15241519 NR Description: small nuclear ribonucleoprotein, putative (snRNP)
  misc_feature (1)..(246): NCBI GI NO: 21536707 NR Description: putative snRNP protein [Arabidopsis thaliana]
  misc_feature (1)..(246): NCBI GI NO: 38150007 NR Description: small nuclear ribonucleo protein polypeptide B/B'isoform B'
  misc_feature (1)..(246): NCBI GI NO: 8099650 NR Description: snRNP-associated protein; SmB [Danio rerio]
  misc_feature (1)..(246): NCBI GI NO: 10720263 NR Description: Small nuclear ribonucleo protein associated proteinB'
  misc_feature (1)..(246): NCBI GI NO: 12643865 NR Description: Small nuclear ribonucleo protein associated proteinB'
  misc_feature (1)..(246): NCBI GI NO: 7208221 NR Description: small nuclear ribonucleoprotein B'
MLQFVNYRMRVTIQDGRQLVGKFMAFDRHMNLVLGDCEEFRKLPPSKSSKTTGEREERRTLGLLLLRGEEVVSMTVEGPPPPDESRAKASAGVAALSGTGVGRAAGRGVATGPLLQAQPGLSGPVRGVGGPAPGMMQPQISRPPMPNLSAPPVAYPQVVRPPPMGMPPMRPGGPPPMQMQFQRPPGPPPAPYPGAPPQQFMRGPPPMGPPPGRPGMPSMPPPPGMRPMPPTQFGQPPRHGMPPPPPGPQQPGQNPQQ

SEQ ID NO: 15700 - DNA, 1760 bp, Triticum aestivum
  misc_feature (1)..(1760): Ceres Seq. ID no. 13597661
atcctaattgaaaaaacacccaaattccagttactcttttggtctttccatcgtcttccttagccggcgacttgcgcgcaggttttcctcccttcctcggcgacttgaggagtgtccagatctagcaattttactccggtgatgaaaacaagtgcccccgtggtttgtgggcagggaccaaggattgatcgtcgttccataaaaccttttaagatgacaagatccaaggatattcagcttcaccatctacctacagatgtactgcgtcgtatactatcacaattgacaatgaaagaagccatgcgaatgagcatactatctaagaagtggagaaggctttggaaatgctacccaaagttagtattcaccagagccatgatgtgtcgcagtaacgccacgacaggccctgcaaaacccttgcggacaaggtttatcaggggggtcaacagcatccagcgacagctcaagtcatccaacctgaataagtttgtggtcaagtttgcgcttcgcaaaaggcacacacctcacattgatagatgggtcaatttctgtgcctcgtcgatggcgaagcatgttgttctcgatttatgtccagggccgaaaggcagtaccgacacagatgacaagtacagtttcccgctgcatcttctcggcgcctcgggtggttcttgcgtgaagtctcttagtctggggttcgtctatttagcactgcctcctgatcaccgtggatttgcaaaccttaagaagctctctctggaaatagttcatgtcacaggggatctcgggcgcctgctcccaaaatgcgctgttcttgagtggctaagcctcaccaggtgtagactggacgagctaagcataggtgaggaactgagcaggctccgttgtttgcaggtcaagtactgtatgctgcagaagctgcatgtccgagctccaaacctcgccatgtttgtgttcgctggtcgtgtgatacctatattgcttggtgaatctgtgaagatttcagaggcgacggtcgacttggtcacatcctcggactgcttcaattacgtcttcactgatcttgtcgatgctctttcgcatgttccgtccctctccataggcttccgaattgaaaccaaggtgataaattttgtgaaaaatcggaccatgctcacaaatctgagacgtctggtcctgaaaatcgatattgttgggtcgccggaagtcactggtgggattcttcgtttggcctatctgttggagttagcccctgctttggaagagttagtactccatatgcattgttttgactcggcaatctatggtgaaccaagagaagatgcctaccagccacatcctcaccgtcatctcaagactatcaaaatgacggggttctatggattacttggtcaggttgagctagcactctaccttcttcggaatgcgacttctctcgagcgtatgatcatagatccggtggtgaggaataattggcctattccacccatgggtggagcaaagcaagatatagaccggggcacgtcgattgccctcaataaactttcgaggcaagagttcagaaaggtccttgacattctgtattaaggggatatgaaactatgttgcaggtgtattctagattatttgttttaaggaaggagagatgccaatagatgttttttttaaaggagatgccaatagatgtttgtttgaaggaaggagctcaggaaatgccgtccttaccatctgtcagagaaataggaaactgaatcacagctgtc

SEQ ID NO: 15701 - protein, 480 aa, Triticum aestivum
  peptide (1)..(480): Ceres Seq. ID no. 15222162
  misc_feature (24)..(438): NCBI GI NO: 34394100 NR Description: unknown protein
  misc_feature (58)..(388): NCBI GI NO: 34913938 NR Description: OSJNBa0066C06.21
  misc_feature (379)..(438): NCBI GI NO: 34913938 NR Description: OSJNBa0066C06.21
  misc_feature (27)..(479): NCBI GI NO: 34899896 NR Description: OJ1714_H10.31
  misc_feature (44)..(440): NCBI GI NO: 18481703 NR Description: hypothetical protein [Sorghum bicolor]
  misc_feature (31)..(478): NCBI GI NO: 34394889 NR Description: unknown protein
  misc_feature (31)..(382): NCBI GI NO: 34902734 NR Description: hypothetical protein~similar to Oryza sativachromsoome 1
  misc_feature (25)..(478): NCBI GI NO: 34899940 NR Description: P0428D12.10
  misc_feature (24)..(379): NCBI GI NO: 38344931 NR Description: OSJNBa0018M05.22
  misc_feature (5)..(205): NCBI GI NO: 13324796 NR Description: hypothetical protein [Oryza sativa]
MKTSAPVVCGQGPRIDRRSIKPFKMTRSKDIQLHHLPTDVLRRILSQLTMKEAMRMSILSKKWRRLWKCYPKLVFTRAMMCRSNATTGPAKPLRTRFIRGVNSIQRQLKSSNLNKFVVKFALRKRHTPHIDRWVNFCASSMAKHVVLDLCPGPKGSTDTDDKYSFPLHLLGASGGSCVKSLSLGFVYLALPPDHRGFANLKKLSLEIVHVTGDLGRLLPKCAVLEWLSLTRCRLDELSIGEELSRLRCLQVKYCMLQKLHVRAPNLAMFVFAGRVIPILLGESVKISEATVDLVTSSDCFNYVFTDLVDALSHVPSLSIGFRIETKVINFVKNRTMLTNLRRLVLKIDIVGSPEVTGGILRLAYLLELAPALEELVLHMHCFDSAIYGEPREDAYQPHPHRHLKTIKMTGFYGLLGQVELALYLLRNATSLERMIIDPVVRNNWPIPPMGGAKQDIDRGTSIALNKLSRQEFRKVLDILY

SEQ ID NO: 15702 - protein, 456 aa, Triticum aestivum
  peptide (1)..(456): Ceres Seq. ID no. 15222163
  misc_feature (1)..(414): NCBI GI NO: 34394100 NR Description: unknown protein
  misc_feature (34)..(364): NCBI GI NO: 34913938 NR Description: OSJNBa0066C06.21
  misc_feature (355)..(414): NCBI GI NO: 34913938 NR Description: OSJNBa0066C06.21
  misc_feature (3)..(455): NCBI GI NO: 34899896 NR Description: OJ1714_H10.31
  misc_feature (20)..(416): NCBI GI NO: 18481703 NR Description: hypothetical protein [Sorghum bicolor]
  misc_feature (7)..(454): NCBI GI NO: 34394889 NR Description: unknown protein
  misc_feature (7)..(358): NCBI GI NO: 34902734 NR Description: hypothetical protein~similar to Oryza sativachromsoome 1
  misc_feature (1)..(454): NCBI GI NO: 34899940 NR Description: P0428D12.10
  misc_feature (1)..(355): NCBI GI NO: 38344931 NR Description: OSJNBa0018M05.22
  misc_feature (1)..(181): NCBI GI NO: 13324796 NR Description: hypothetical protein [Oryza sativa]
MTRSKDIQLHHLPTDVLRRILSQLTMKEAMRMSILSKKWRRLWKCYPKLVFTRAMMCRSNATTGPAKPLRTRFIRGVNSIQRQLKSSNLNKFVVKFALRKRHTPHIDRWVNFCASSMAKHVVLDLCPGPKGSTDTDDKYSFPLHLLGASGGSCVKSLSLGFVYLALPPDHRGFANLKKLSLEIVHVTGDLGRLLPKCAVLEWLSLTRCRLDELSIGEELSRLRCLQVKYCMLQKLHVRAPNLAMFVFAGRVIPILLGESVKISEATVDLVTSSDCFNYVFTDLVDALSHVPSLSIGFRIETKVINFVKNRTMLTNLRRLVLKIDIVGSPEVTGGILRLAYLLELAPALEELVLHMHCFDSAIYGEPREDAYQPHPHRHLKTIKMTGFYGLLGQVELALYLLRNATSLERMIIDPVVRNNWPIPPMGGAKQDIDRGTSIALNKLSRQEFRKVLDILY

SEQ ID NO: 15703 - protein, 431 aa, Triticum aestivum
  peptide (1)..(431): Ceres Seq. ID no. 15222164
  misc_feature (1)..(389): NCBI GI NO: 34394100 NR Description: unknown protein
  misc_feature (9)..(339): NCBI GI NO: 34913938 NR Description: OSJNBa0066C06.21
  misc_feature (330)..(389): NCBI GI NO: 34913938 NR Description: OSJNBa0066C06.21
  misc_feature (1)..(430): NCBI GI NO: 34899896 NR Description: OJ1714_H10.31
  misc_feature (1)..(391): NCBI GI NO: 18481703 NR Description: hypothetical protein [Sorghum bicolor]
  misc_feature (1)..(429): NCBI GI NO: 34394889 NR Description: unknown protein
  misc_feature (1)..(333): NCBI GI NO: 34902734 NR Description: hypothetical protein~similar to Oryza sativachromsoome 1
  misc_feature (1)..(429): NCBI GI NO: 34899940 NR Description: P0428D12.10
  misc_feature (1)..(330): NCBI GI NO: 38344931 NR Description: OSJNBa0018M05.22
  misc_feature (1)..(156): NCBI GI NO: 13324796 NR Description: hypothetical protein [Oryza sativa]
MKEAMRMSILSKKWRRLWKCYPKLVFTRAMMCRSNATTGPAKPLRTRFIRGVNSIQRQLKSSNLNKFVVKFALRKRHTPHIDRWVNFCASSMAKHVVLDLCPGPKGSTDTDDKYSFPLHLLGASGGSCVKSLSLGFVYLALPPDHRGFANLKKLSLEIVHVTGDLGRLLPKCAVLEWLSLTRCRLDELSIGEELSRLRCLQVKYCMLQKLHVRAPNLAMFVFAGRVIPILLGESVKISEATVDLVTSSDCFNYVFTDLVDALSHVPSLSIGFRIETKVINFVKNRTMLTNLRRLVLKIDIVGSPEVTGGILRLAYLLELAPALEELVLHMHCFDSAIYGEPREDAYQPHPHRHLKTIKMTGFYGLLGQVELALYLLRNATSLERMIIDPVVRNNWPIPPMGGAKQDIDRGTSIALNKLSRQEFRKVLDILY

SEQ ID NO: 15704 - DNA, 1164 bp, Triticum aestivum
  misc_feature (1)..(1164): Ceres Seq. ID no. 13584797
aaaggcaactagacgctgagagctccctcctgcttacccgtgccggcggccgccgccgcaagcccagaggagggagcaacgccggcgcctggatcccccgagtgccgccgccgacccgtcccgtactccggccgtcgcccatcggctgcagcatcttggccctcgcgcgcctccgctgccgcttcctctccgccccgcctcagctgatggacatgtctggtccaagatggaagaagggcaaagacggcaaggatttcgcagctctggcagcagcccaacccatgtcaagcattgttgccaagctccagtcttcactggaaggatcaaagctcgtggcgactttatctagcaggggcggggatgcggttcttggcgtgaacccgcaggaagccgcgcttctgaaccgcgccgcctttggccgggcactggaaaatgtcggggccgagaaacagtggttccagctgggcgctgaggaggtcttctaccttcaccatgctttggagtgcatcgtggtcgagtcggcgaacaaggatctgatgagccaaggggagctgtgggatcacttgtgctccgcatcagagtcgtttcctgagatgtacagggcgtactcgcatctcaggtcgaagaactgggtggtgcggtcaggtttgcagtatggtacggatttcgtcgcttaccgtcatcaccccgcgctcgtccactcggagtttgctgtggttgtggttccggaaggatcggggttcggcggtaggtgtggccgcctgaaggtgtggtctgatctactgtgcgcgctccgagcttctggcagtgtggccaagacgctgctggttctgacaatctccagcaatgtctgtgaactgagatccccagattgtttggaacggttggttgttcatgaaagaactattacaaggtggatagcccagcagtgccgtgagcagcgatgtaaaccgtgcagagaagaagcatatacggaagaacaagatcacgcaggagaaactgtagtgttcaactattggggtctagtactaggtttcacagttctttctagcctgcttgtatacaagctgagattccgacaatcaagctaaatatttctctgtactcctattggtgatgtttaacttctcatcttattgcaatcctgtgccggtagtcttgtgc

SEQ ID NO: 15705 - protein, 362 aa, Triticum aestivum
  peptide (1)..(362): Ceres Seq. ID no. 13584798
  misc_feature (195)..(282): Pfam Name: Pfam Description:  tRNA intron endonuclease
  misc_feature (74)..(316): NCBI GI NO: 15231186 NR Description: expressed protein [Arabidopsis thaliana]
  misc_feature (74)..(314): NCBI GI NO: 15238643 NR Description: tRNA intron endonuclease - like protein
  misc_feature (74)..(316): NCBI GI NO: 6635256 NR Description: tRNA intron endonuclease [Arabidopsis thaliana]
  misc_feature (150)..(314): NCBI GI NO: 39644952 NR Description: MGC2776 protein [Homo sapiens]
  misc_feature (150)..(314): NCBI GI NO: 39841065 NR Description: similar to hypothetical protein MGC2776
  misc_feature (150)..(314): NCBI GI NO: 13376882 NR Description: hypothetical protein MGC2776 [Homo sapiens]
  misc_feature (157)..(314): NCBI GI NO: 22760473 NR Description: unnamed protein product [Homo sapiens]
  misc_feature (157)..(244): NCBI GI NO: 24584677 NR Description: CG31812-PA [Drosophila melanogaster]
  misc_feature (157)..(241): NCBI GI NO: 15897369 NR Description: tRNA intron endonuclease, putative
RQLDAESSLLLTRAGGRRRKPRGGSNAGAWIPRVPPPTRPVLRPSPIGCSILALARLRCRFLSAPPQLMDMSGPRWKKGKDGKDFAALAAAQPMSSIVAKLQSSLEGSKLVATLSSRGGDAVLGVNPQEAALLNRAAFGRALENVGAEKQWFQLGAEEVFYLHHALECIVVESANKDLMSQGELWDHLCSASESFPEMYRAYSHLRSKNWVVRSGLQYGTDFVAYRHHPALVHSEFAVVVVPEGSGFGGRCGRLKVWSDLLCALRASGSVAKTLLVLTISSNVCELRSPDCLERLVVHERTITRWIAQQCREQRCKPCREEAYTEEQDHAGETVVFNYWGLVLGFTVLSSLLVYKLRFRQSS

SEQ ID NO: 15706 - protein, 294 aa, Triticum aestivum
  peptide (1)..(294): Ceres Seq. ID no. 13584799
  misc_feature (127)..(214): Pfam Name: Pfam Description:  tRNA intron endonuclease
  misc_feature (6)..(248): NCBI GI NO: 15231186 NR Description: expressed protein [Arabidopsis thaliana]
  misc_feature (6)..(246): NCBI GI NO: 15238643 NR Description: tRNA intron endonuclease - like protein
  misc_feature (6)..(248): NCBI GI NO: 6635256 NR Description: tRNA intron endonuclease [Arabidopsis thaliana]
  misc_feature (82)..(246): NCBI GI NO: 39644952 NR Description: MGC2776 protein [Homo sapiens]
  misc_feature (82)..(246): NCBI GI NO: 39841065 NR Description: similar to hypothetical protein MGC2776
  misc_feature (82)..(246): NCBI GI NO: 13376882 NR Description: hypothetical protein MGC2776 [Homo sapiens]
  misc_feature (89)..(246): NCBI GI NO: 22760473 NR Description: unnamed protein product [Homo sapiens]
  misc_feature (89)..(176): NCBI GI NO: 24584677 NR Description: CG31812-PA [Drosophila melanogaster]
  misc_feature (89)..(173): NCBI GI NO: 15897369 NR Description: tRNA intron endonuclease, putative
MDMSGPRWKKGKDGKDFAALAAAQPMSSIVAKLQSSLEGSKLVATLSSRGGDAVLGVNPQEAALLNRAAFGRALENVGAEKQWFQLGAEEVFYLHHALECIVVESANKDLMSQGELWDHLCSASESFPEMYRAYSHLRSKNWVVRSGLQYGTDFVAYRHHPALVHSEFAVVVVPEGSGFGGRCGRLKVWSDLLCALRASGSVAKTLLVLTISSNVCELRSPDCLERLVVHERTITRWIAQQCREQRCKPCREEAYTEEQDHAGETVVFNYWGLVLGFTVLSSLLVYKLRFRQSS

SEQ ID NO: 15707 - protein, 292 aa, Triticum aestivum
  peptide (1)..(292): Ceres Seq. ID no. 13584800
  misc_feature (125)..(212): Pfam Name: Pfam Description:  tRNA intron endonuclease
  misc_feature (4)..(246): NCBI GI NO: 15231186 NR Description: expressed protein [Arabidopsis thaliana]
  misc_feature (4)..(244): NCBI GI NO: 15238643 NR Description: tRNA intron endonuclease - like protein
  misc_feature (4)..(246): NCBI GI NO: 6635256 NR Description: tRNA intron endonuclease [Arabidopsis thaliana]
  misc_feature (80)..(244): NCBI GI NO: 39644952 NR Description: MGC2776 protein [Homo sapiens]
  misc_feature (80)..(244): NCBI GI NO: 39841065 NR Description: similar to hypothetical protein MGC2776
  misc_feature (80)..(244): NCBI GI NO: 13376882 NR Description: hypothetical protein MGC2776 [Homo sapiens]
  misc_feature (87)..(244): NCBI GI NO: 22760473 NR Description: unnamed protein product [Homo sapiens]
  misc_feature (87)..(174): NCBI GI NO: 24584677 NR Description: CG31812-PA [Drosophila melanogaster]
  misc_feature (87)..(171): NCBI GI NO: 15897369 NR Description: tRNA intron endonuclease, putative
MSGPRWKKGKDGKDFAALAAAQPMSSIVAKLQSSLEGSKLVATLSSRGGDAVLGVNPQEAALLNRAAFGRALENVGAEKQWFQLGAEEVFYLHHALECIVVESANKDLMSQGELWDHLCSASESFPEMYRAYSHLRSKNWVVRSGLQYGTDFVAYRHHPALVHSEFAVVVVPEGSGFGGRCGRLKVWSDLLCALRASGSVAKTLLVLTISSNVCELRSPDCLERLVVHERTITRWIAQQCREQRCKPCREEAYTEEQDHAGETVVFNYWGLVLGFTVLSSLLVYKLRFRQSS

SEQ ID NO: 15708 - DNA, 1408 bp, Triticum aestivum
  misc_feature (1)..(1408): Ceres Seq. ID no. 12617920
agaacatcctaatcgaaaactcccgccgctggcccggcaatttccccacttttccctccctccctccgctcaaccccaccccagcgctatggccgcctcctcctccgccgccgcccccgccgacacgtacgacatcccgtgggtggagaagtaccgccccagccgcgtcgccgatgtcgtcggcaacgccgacgccgtcagccgcctcgaggtcatcgcccgcgacggcaacatgcccaacctcatcctctccgggcctccggggaccgggaagacgacgagcatcctggcgctggcccacgagatgctcgggcccagctaccgcgagggagtgctcgagctcaacgcctcggacgacagggggcttgatgtggtgaggaacaagatcaagatgttcgcgcagaagaaggtcacactgccgcccggacggcacaagatcgtcatactggacgaggctgacagcatgacaacaggggcacagcaagcactgagaagaaccatggagatttattccaacaccacaagatttgctcttgcctgcaatacttcatctaaaatcattgaacccatccaaagtcgctgcgctattgtccggttctcgaggctttcagatcaggagatccttggccgccttatgatcgtggttgctgctgagaaggtcccttatgtgccagaaggtcttgaagccatcatttttactgctgatggtgacatgagacaagctttgaacaatttgcaagctacagtcagtgggttccgttttgttaatcaagaaaatgtgttcaaggtttgcgatcaaccacatcccttgcatgtcaagagtatggtgaaaaatgtactagatgggaagtttgatgaggcctgctctggcctaaagcaactctatgatttgggctactctcctactgacataatcactactctcttccgtgtcatcaagaactatgacatggctgaatttctgaagctggagttgctgaaggaaaccggatttgcgcacatgaggatctgtgacggcgtcgggtcattccttcagctttctggccttctggccaagtttgctctggtgagagaaacagcaaaggcctaacgctgtgcagctgctctgacatcagttaacagtgttgtcatgcatagcctgttttatcgctactctgtcgtggtatctcagtgtgtaagatagttcttcgctgaagtgaactatttatgcttgtttagcatcggagatatagttgtagcctgtagtgactagtgaggagactgagtcctcttagttcgagtgcttttagcccagccatccgtggttcacgcgctgctgtatttcggaactaatctgggtatttttcgggtcattttgtagtctattgagctgtcgtgccagcatcatgaaggaaccgtcagttatccg

SEQ ID NO: 15709 - protein, 362 aa, Triticum aestivum
  peptide (1)..(362): Ceres Seq. ID no. 12617921
  misc_feature (80)..(251): Pfam Name: AAA Pfam Description: ATPase family associated with various cellular activities
  misc_feature (30)..(362): NCBI GI NO: 15991286 NR Description: replication factor C 40kDa subunit
  misc_feature (31)..(362): NCBI GI NO: 38344372 NR Description: OSJNBb0032E06.6
  misc_feature (32)..(362): NCBI GI NO: 15221697 NR Description: replication factor, putative; protein id:At1g63160
  misc_feature (27)..(352): NCBI GI NO: 11177922 NR Description: replication factor C
  misc_feature (21)..(360): NCBI GI NO: 1703053 NR Description: ACTIVATOR 1 40 KD SUBUNIT
  misc_feature (43)..(352): NCBI GI NO: 34871892 NR Description: replication factor C 2 (40kD) [Rattus norvegicus]
  misc_feature (27)..(352): NCBI GI NO: 12847419 NR Description: unnamed protein product [Mus musculus]
  misc_feature (32)..(352): NCBI GI NO: 539678 NR Description: replication factor C - human
  misc_feature (31)..(352): NCBI GI NO: 28950096 NR Description: probable REPLICATION FACTOR C (40 KDA SUBUNIT)
  misc_feature (20)..(351): NCBI GI NO: 4506491 NR Description: replication factor C
EHPNRKLPPLARQFPHFSLPPSAQPHPSAMAASSSAAAPADTYDIPWVEKYRPSRVADVVGNADAVSRLEVIARDGNMPNLILSGPPGTGKTTSILALAHEMLGPSYREGVLELNASDDRGLDVVRNKIKMFAQKKVTLPPGRHKIVILDEADSMTTGAQQALRRTMEIYSNTTRFALACNTSSKIIEPIQSRCAIVRFSRLSDQEILGRLMIVVAAEKVPYVPEGLEAIIFTADGDMRQALNNLQATVSGFRFVNQENVFKVCDQPHPLHVKSMVKNVLDGKFDEACSGLKQLYDLGYSPTDIITTLFRVIKNYDMAEFLKLELLKETGFAHMRICDGVGSFLQLSGLLAKFALVRETAKA

SEQ ID NO: 15710 - protein, 333 aa, Triticum aestivum
  peptide (1)..(333): Ceres Seq. ID no. 12617922
  misc_feature (51)..(222): Pfam Name: AAA Pfam Description: ATPase family associated with various cellular activities
  misc_feature (1)..(333): NCBI GI NO: 15991286 NR Description: replication factor C 40kDa subunit
  misc_feature (2)..(333): NCBI GI NO: 38344372 NR Description: OSJNBb0032E06.6
  misc_feature (3)..(333): NCBI GI NO: 15221697 NR Description: replication factor, putative; protein id:At1g63160
  misc_feature (1)..(323): NCBI GI NO: 11177922 NR Description: replication factor C
  misc_feature (1)..(331): NCBI GI NO: 1703053 NR Description: ACTIVATOR 1 40 KD SUBUNIT
  misc_feature (14)..(323): NCBI GI NO: 34871892 NR Description: replication factor C 2 (40kD) [Rattus norvegicus]
  misc_feature (1)..(323): NCBI GI NO: 12847419 NR Description: unnamed protein product [Mus musculus]
  misc_feature (3)..(323): NCBI GI NO: 539678 NR Description: replication factor C - human
  misc_feature (2)..(323): NCBI GI NO: 28950096 NR Description: probable REPLICATION FACTOR C (40 KDA SUBUNIT)
  misc_feature (1)..(322): NCBI GI NO: 4506491 NR Description: replication factor C
MAASSSAAAPADTYDIPWVEKYRPSRVADVVGNADAVSRLEVIARDGNMPNLILSGPPGTGKTTSILALAHEMLGPSYREGVLELNASDDRGLDVVRNKIKMFAQKKVTLPPGRHKIVILDEADSMTTGAQQALRRTMEIYSNTTRFALACNTSSKIIEPIQSRCAIVRFSRLSDQEILGRLMIVVAAEKVPYVPEGLEAIIFTADGDMRQALNNLQATVSGFRFVNQENVFKVCDQPHPLHVKSMVKNVLDGKFDEACSGLKQLYDLGYSPTDIITTLFRVIKNYDMAEFLKLELLKETGFAHMRICDGVGSFLQLSGLLAKFALVRETAKA

SEQ ID NO: 15711 - protein, 285 aa, Triticum aestivum
  peptide (1)..(285): Ceres Seq. ID no. 12617923
  misc_feature (3)..(174): Pfam Name: AAA Pfam Description: ATPase family associated with various cellular activities
  misc_feature (1)..(285): NCBI GI NO: 15991286 NR Description: replication factor C 40kDa subunit
  misc_feature (1)..(285): NCBI GI NO: 38344372 NR Description: OSJNBb0032E06.6
  misc_feature (1)..(285): NCBI GI NO: 15221697 NR Description: replication factor, putative; protein id:At1g63160
  misc_feature (1)..(275): NCBI GI NO: 11177922 NR Description: replication factor C
  misc_feature (1)..(283): NCBI GI NO: 1703053 NR Description: ACTIVATOR 1 40 KD SUBUNIT
  misc_feature (1)..(275): NCBI GI NO: 34871892 NR Description: replication factor C 2 (40kD) [Rattus norvegicus]
  misc_feature (1)..(275): NCBI GI NO: 12847419 NR Description: unnamed protein product [Mus musculus]
  misc_feature (1)..(275): NCBI GI NO: 539678 NR Description: replication factor C - human
  misc_feature (1)..(275): NCBI GI NO: 28950096 NR Description: probable REPLICATION FACTOR C (40 KDA SUBUNIT)
  misc_feature (1)..(274): NCBI GI NO: 4506491 NR Description: replication factor C
MPNLILSGPPGTGKTTSILALAHEMLGPSYREGVLELNASDDRGLDVVRNKIKMFAQKKVTLPPGRHKIVILDEADSMTTGAQQALRRTMEIYSNTTRFALACNTSSKIIEPIQSRCAIVRFSRLSDQEILGRLMIVVAAEKVPYVPEGLEAIIFTADGDMRQALNNLQATVSGFRFVNQENVFKVCDQPHPLHVKSMVKNVLDGKFDEACSGLKQLYDLGYSPTDIITTLFRVIKNYDMAEFLKLELLKETGFAHMRICDGVGSFLQLSGLLAKFALVRETAKA

SEQ ID NO: 15712 - DNA, 1339 bp, Triticum aestivum
  misc_feature (1)..(1339): Ceres Seq. ID no. 13584722
agtccagatcgccgtgtccgccgaccaccacttcaacccctccactgcagcctgtaggaagctaaagctagaactagaacaatctgcctacacctagccatggtgaagctagccacggcgcgggactgccgcgcgtacagcctcggcgccacgggcggcgagacgtcgcgcaaccggcggtgggagtacatcaacgccggggtgtacgtcttcgccgccgtcctcctcctcgccggcttcctggcgcagctgtggccgtgggcggtgtccaccaaggccggcctcgccgtggccgtcgtcgggctgctgggcgtgctggcagtgaacgcgcacgacctgctggcgcacgtcgccggcgtcgattacaaccttggcctggccgggctcgacacccagttcgtgctcgtcgagctcgccgcccccgccgtgcagctcgccggcgccgcgctcaccttggtcgcgctcatcttgttcgaaatccaggtatgaagttggagttcatccatccgagctagtagtactagtatcagtaataagttcagagttcagactggagttgcatgctgttcttttttttatctgaatccatggaacaaacgtcgcagatggagagagggcaccggcgtggcctggagaagcacggcctgaacctgctcatcgccgggccagcgctgtggtgcctcgggtccatacacaacatgtgccaagtctacgagcgagccaacgggcacgtccagatcctccagaagagcgtgcacatcccgtttctgctcggcagcaccctcttcttcatcggcggcgtcgtcaaccggaacgacgtccacggccactcctcccacagcttcaccctactggggaggagctgggcgtggtactgcctgttcgggagcttgctgttcttggcgggagggctgctgaacctgctcaaggtgttcaagatgcagcagatgggcgggcgggggctcgagaagctgcgcggcggcgcgcaggagcggcttagcagggagagggagggcaaggtgcctctcatcctggaggagggccggagggggaagcacggaggcaatgtaggggatacctgggcgccgccggcgccgcggtacgagccgagggctccgcccgttccgccgccgccggagggttcttacaaggacgctgtcgtgagcggcggcaactagtgtgattttgcagtgcaccgcggtaacgaataataagagaggacgtgccatggcagctggtagaggagaagcattggcttagggcgacgccatcctgtatttccgtatctgtacacgatgtcatgtactgtaaattatatggacttgctgcctacgattct

SEQ ID NO: 15713 - protein, 205 aa, Triticum aestivum
  peptide (1)..(205): Ceres Seq. ID no. 13584723
  misc_feature (14)..(202): NCBI GI NO: 15237898 NR Description: expressed protein [Arabidopsis thaliana]
MLFFFLSESMEQTSQMERGHRRGLEKHGLNLLIAGPALWCLGSIHNMCQVYERANGHVQILQKSVHIPFLLGSTLFFIGGVVNRNDVHGHSSHSFTLLGRSWAWYCLFGSLLFLAGGLLNLLKVFKMQQMGGRGLEKLRGGAQERLSREREGKVPLILEEGRRGKHGGNVGDTWAPPAPRYEPRAPPVPPPPEGSYKDAVVSGGN

SEQ ID NO: 15714 - protein, 196 aa, Triticum aestivum
  peptide (1)..(196): Ceres Seq. ID no. 13584724
  misc_feature (5)..(193): NCBI GI NO: 15237898 NR Description: expressed protein [Arabidopsis thaliana]
MEQTSQMERGHRRGLEKHGLNLLIAGPALWCLGSIHNMCQVYERANGHVQILQKSVHIPFLLGSTLFFIGGVVNRNDVHGHSSHSFTLLGRSWAWYCLFGSLLFLAGGLLNLLKVFKMQQMGGRGLEKLRGGAQERLSREREGKVPLILEEGRRGKHGGNVGDTWAPPAPRYEPRAPPVPPPPEGSYKDAVVSGGN

SEQ ID NO: 15715 - protein, 190 aa, Triticum aestivum
  peptide (1)..(190): Ceres Seq. ID no. 13584725
  misc_feature (1)..(187): NCBI GI NO: 15237898 NR Description: expressed protein [Arabidopsis thaliana]
MERGHRRGLEKHGLNLLIAGPALWCLGSIHNMCQVYERANGHVQILQKSVHIPFLLGSTLFFIGGVVNRNDVHGHSSHSFTLLGRSWAWYCLFGSLLFLAGGLLNLLKVFKMQQMGGRGLEKLRGGAQERLSREREGKVPLILEEGRRGKHGGNVGDTWAPPAPRYEPRAPPVPPPPEGSYKDAVVSGGN

SEQ ID NO: 15716 - DNA, 1448 bp, Triticum aestivum
  misc_feature (1)..(1448): Ceres Seq. ID no. 13584805
gtggactcctagccagccccttcacctcttcgggcttctgtggcgagccgagttttccggcggaggcgagccatggccgcagcggaggaaacggccgtgggaaccgctgcggaggggagcgacctgcgctccttcttctcgacgcgcggcgtcgccgccgatcttgctgcgttggacgaccagaccctcaaggcgctggacgagaagtacattatcgccagggacctcgacgccgccacggtgctctccaagatccaccacttggtggggcacagcgaagccagcatcgtcccctacgaagggctgtcctaccagcttccgtgccgtgacccggggcagcacgagtacgaccccacactccggcagctttgcctgcgccgcggcaaggtcgaaacttgcacggtcggcgaccccaggacctcgcgcaaggccgagatcatcacggccacgctatccttggtcaagaagaccgtcctgagtggccatcgctcgtttagcgacggtctgcgctacggcgatgaagtcttcaagcaggacaagaagaccgtggatgatgccctgctggacatctgctgcctactcgagtgcccaagggcatctctcaaaatgcttgaacttggtccgggcacggtcgttgggccactgatattcacaatggaagatggggcagagaaccattgcaggtcattcggtccgagtggagcccgggtacatgaggggatctctaatattactgtcgaacaaggcgcaacggtcaatttcatcctactagtccagagggatgatgttttttgggattttgctcggtcgcaactccgccacgaattgaattgtgtggtcatgacaggcggcgatggggaaccaaatgtcatgacacgggctttcttgcgcaaactcaaggattgtctgtctgtccctgtgtatgctctcaccgattcagatccagagggaatttcgatcttttgtacctacaagtttggatcagcagagatgccatttgacaatgtgggtcttaccattcctgatatcaagttgattgcgtatataggtgatgatgcccttcatttgagtcaccttcaaccgctggccaagcgcgacagatcgattcttaagggattgtgtgcccaaaagcatgtaataggtgatgaacaattgagggagaacatacatttcatgatgaacaggggcttaaaatgcaaaatcgaagctttatattatcttcagtaccctcctactgactacatccgcaaagcagtaggcaatctggaggacatctaagtagctcgttgtgtttaactttggtagagagacatctatgtagtttgccatgttgactttagaggataatcttctaagttagttcatgttgggtgtgcaaactatggttactactagattgtgcatgcacttatgttgtcacaatctaggttattaatgctccagattcc

SEQ ID NO: 15717 - protein, 401 aa, Triticum aestivum
  peptide (1)..(401): Ceres Seq. ID no. 13584806
  misc_feature (229)..(317): Pfam Name: Pfam Description:  Toprim domain
  misc_feature (1)..(391): NCBI GI NO: 27476077 NR Description: Hypothetical protein
  misc_feature (51)..(391): NCBI GI NO: 15241959 NR Description: meiosis specific - like protein
  misc_feature (52)..(393): NCBI GI NO: 9501147 NR Description: dJ481F12
  misc_feature (49)..(393): NCBI GI NO: 6912680 NR Description: SPO11 meiotic protein covalently bound to DSB-like
  misc_feature (114)..(393): NCBI GI NO: 9501146 NR Description: dJ481F12
  misc_feature (50)..(393): NCBI GI NO: 6755624 NR Description: sporulation protein
  misc_feature (114)..(393): NCBI GI NO: 5453474 NR Description: meiotic DNA transesterase/topoisomerase homologvariant B
  misc_feature (114)..(393): NCBI GI NO: 5453472 NR Description: meiotic DNA transesterase/topoisomerase homologvariant A
  misc_feature (147)..(393): NCBI GI NO: 5733397 NR Description: SPO11 protein [Mus musculus]
  misc_feature (113)..(380): NCBI GI NO: 13383478 NR Description: AtSPO11-1 [Arabidopsis thaliana]
MAAAEETAVGTAAEGSDLRSFFSTRGVAADLAALDDQTLKALDEKYIIARDLDAATVLSKIHHLVGHSEASIVPYEGLSYQLPCRDPGQHEYDPTLRQLCLRRGKVETCTVGDPRTSRKAEIITATLSLVKKTVLSGHRSFSDGLRYGDEVFKQDKKTVDDALLDICCLLECPRASLKMLELGPGTVVGPLIFTMEDGAENHCRSFGPSGARVHEGISNITVEQGATVNFILLVQRDDVFWDFARSQLRHELNCVVMTGGDGEPNVMTRAFLRKLKDCLSVPVYALTDSDPEGISIFCTYKFGSAEMPFDNVGLTIPDIKLIAYIGDDALHLSHLQPLAKRDRSILKGLCAQKHVIGDEQLRENIHFMMNRGLKCKIEALYYLQYPPTDYIRKAVGNLEDI

SEQ ID NO: 15718 - protein, 223 aa, Triticum aestivum
  peptide (1)..(223): Ceres Seq. ID no. 13584807
  misc_feature (51)..(139): Pfam Name: Pfam Description:  Toprim domain
  misc_feature (1)..(213): NCBI GI NO: 27476077 NR Description: Hypothetical protein
  misc_feature (1)..(213): NCBI GI NO: 15241959 NR Description: meiosis specific - like protein
  misc_feature (1)..(215): NCBI GI NO: 9501147 NR Description: dJ481F12
  misc_feature (1)..(215): NCBI GI NO: 6912680 NR Description: SPO11 meiotic protein covalently bound to DSB-like
  misc_feature (1)..(215): NCBI GI NO: 9501146 NR Description: dJ481F12
  misc_feature (1)..(215): NCBI GI NO: 6755624 NR Description: sporulation protein
  misc_feature (1)..(215): NCBI GI NO: 5453474 NR Description: meiotic DNA transesterase/topoisomerase homologvariant B
  misc_feature (1)..(215): NCBI GI NO: 5453472 NR Description: meiotic DNA transesterase/topoisomerase homologvariant A
  misc_feature (1)..(215): NCBI GI NO: 5733397 NR Description: SPO11 protein [Mus musculus]
  misc_feature (1)..(202): NCBI GI NO: 13383478 NR Description: AtSPO11-1 [Arabidopsis thaliana]
MLELGPGTVVGPLIFTMEDGAENHCRSFGPSGARVHEGISNITVEQGATVNFILLVQRDDVFWDFARSQLRHELNCVVMTGGDGEPNVMTRAFLRKLKDCLSVPVYALTDSDPEGISIFCTYKFGSAEMPFDNVGLTIPDIKLIAYIGDDALHLSHLQPLAKRDRSILKGLCAQKHVIGDEQLRENIHFMMNRGLKCKIEALYYLQYPPTDYIRKAVGNLEDI

SEQ ID NO: 15719 - protein, 207 aa, Triticum aestivum
  peptide (1)..(207): Ceres Seq. ID no. 13584808
  misc_feature (35)..(123): Pfam Name: Pfam Description:  Toprim domain
  misc_feature (1)..(197): NCBI GI NO: 27476077 NR Description: Hypothetical protein
  misc_feature (1)..(197): NCBI GI NO: 15241959 NR Description: meiosis specific - like protein
  misc_feature (1)..(199): NCBI GI NO: 9501147 NR Description: dJ481F12
  misc_feature (1)..(199): NCBI GI NO: 6912680 NR Description: SPO11 meiotic protein covalently bound to DSB-like
  misc_feature (1)..(199): NCBI GI NO: 9501146 NR Description: dJ481F12
  misc_feature (1)..(199): NCBI GI NO: 6755624 NR Description: sporulation protein
  misc_feature (1)..(199): NCBI GI NO: 5453474 NR Description: meiotic DNA transesterase/topoisomerase homologvariant B
  misc_feature (1)..(199): NCBI GI NO: 5453472 NR Description: meiotic DNA transesterase/topoisomerase homologvariant A
  misc_feature (1)..(199): NCBI GI NO: 5733397 NR Description: SPO11 protein [Mus musculus]
  misc_feature (1)..(186): NCBI GI NO: 13383478 NR Description: AtSPO11-1 [Arabidopsis thaliana]
MEDGAENHCRSFGPSGARVHEGISNITVEQGATVNFILLVQRDDVFWDFARSQLRHELNCVVMTGGDGEPNVMTRAFLRKLKDCLSVPVYALTDSDPEGISIFCTYKFGSAEMPFDNVGLTIPDIKLIAYIGDDALHLSHLQPLAKRDRSILKGLCAQKHVIGDEQLRENIHFMMNRGLKCKIEALYYLQYPPTDYIRKAVGNLEDI

SEQ ID NO: 15720 - DNA, 2135 bp, Triticum aestivum
  misc_feature (1)..(2135): Ceres Seq. ID no. 13656138
aaaccctaaagccccctcgtcccgtcctcctcctccgcatctcaaccctaaccaaacccactcaaccctcgcgccgccgcctccggatccatccgcatcgccgccgccgccgccgccgccgcgagcatgggcttcgacgtgggcgtcgtccccttcaacccggacggctggggccctcccgacttgccgggcgcggcgccgctgctgggcggggccgtcgcgacggcctcgatccccttcgcgcccttctcccgctccgacaagctgggccgcatcgccgactggacgcgcaacccgggccacccgggcgcgcacggccaccacggcgcggccgccgcctcccgcgactcggtcttcgacttctcctcggccgacgactcgctcgccgccgccgccgaggactcgtccttcagcctcgtcgacgccaagccgccgcccaagcacccgcgcttcgggcccaagtggcgcttcaaccagcggccccagctcccccagcgccgcgacgaggaggtcgaggccaagcgccgcgaggccgagaaggagcgcgcccgccgcgagcgccactaccagaaccaccgctcccaccaccaccagggcttccgcggcaaccagcagaacaccgccaagccctcggtcgacatccagcccgactggaccatcctcgagcagatccccttcgccaacttcaccaagctctccttcgccgtcgccgaccagcccgaggacctgctcgtctgcggcgccgtcgactcgtacgaccgcgcctacgaccgcgtcaaccccaagacggcccgccgcctcgagcgcttcaagaaccgccagttcttcaagatcaccaccaccgacgaccccatcatccgccgcctcgccgaggaggacaaggccaccgtcttcgccaccgacgccatcctcgccgccctcatgtgcacgccccgcagcatcctctcctgggacattgtcgtgcagcgcgtcggcaacaagctcttcttcgacaagcgcgagggctcccagctcgatctgctcactgtcaacgagactgcgcaggagcagctccctgagaacaaggatgacatcaattccgcgccggcccttgctgtcgaggccacctacatcaaccagaacttctcgcagcaggtgctggtgcgtgatggcgagaaggttacctttgatgagcctaacccgtttgcctctgagaatgaggaggcggcgcctgtttgctaccgttatcgccgctggaagctggatgatgatattagcatcattgcccgctgtgaagtgcatgctgctggtgttgatcccagtggtgctcgccagttcctcacgcttaatgcactcaatgagtttgatcctaagattactggtgttgactggaagcagaagctcgagtcccagcgtggtgctgtgcttgctacagagctcaagaacaatgccaacaagctcgctcgctggactgcccaggctttactttctggtgctgacatgatgaagttgggttatgtgtcacgtgtgcacccccgcgaccacttcaaccactccatactcactgtgatgggctacaagccaagggattttgctacccagatcaacctcaacactgcaaacatgtggggcattgtcaagtcgattgtggacatctgcatgaagtttgaagagggaaagtatgtgcttgtgaaagatcctgccaagccacagatgaggatttatcaggttcctaatgatgcatttgagaatgattatgttgaagagccacttccagaggaggagcagattcgtccggctacagatgatgtcgatgctactgcacaggagatggatgctgctgccgaggcagaggctaataaagcaactactcagggtggtgagggtgagaagagtgcagatgctgctgctgcttgaagggtataatgggccatctttgctttatctagataatgtgtcttttctgttttatgacctgtttttgtggattaaagagttgaactgccttgtcttgatacagtggtcttgttttggtccatgagaaaacttggtactcttaaatttcatgcttagatgtgctaagcttagcacctaccgttttggattaatgactattctggtagttgaatattgattatatgtgattgatctgctgt

SEQ ID NO: 15721 - protein, 589 aa, Triticum aestivum
  peptide (1)..(589): Ceres Seq. ID no. 15219799
  misc_feature (3)..(546): Pfam Name: eIF-3 Pfam Description: Eukaryotic translation initiation factor 3 subunit 7
  misc_feature (3)..(573): NCBI GI NO: 15233469 NR Description: translation initiation factor eIF3 - like protein
  misc_feature (3)..(573): NCBI GI NO: 17528988 NR Description: putative translation initiation factor eIF3
  misc_feature (3)..(560): NCBI GI NO: 15241470 NR Description: eukaryotic translation initiation factor 3 subunit7
  misc_feature (167)..(573): NCBI GI NO: 12407755 NR Description: initiation factor 3d [Arabidopsis thaliana]
  misc_feature (3)..(584): NCBI GI NO: 31207329 NR Description: ENSANGP00000015368 [Anopheles gambiae]
  misc_feature (3)..(547): NCBI GI NO: 4503523 NR Description: eukaryotic translation initiation factor 3 subunit7
  misc_feature (3)..(554): NCBI GI NO: 31418925 NR Description: Unknown (protein for MGC:64097) [Danio rerio]
  misc_feature (3)..(547): NCBI GI NO: 34866902 NR Description: similar to eukaryotic translation initiation factor3 subunit 7
  misc_feature (3)..(547): NCBI GI NO: 38174024 NR Description: Unknown (protein for MGC:75703)
  misc_feature (3)..(547): NCBI GI NO: 26337171 NR Description: unnamed protein product [Mus musculus]
MGFDVGVVPFNPDGWGPPDLPGAAPLLGGAVATASIPFAPFSRSDKLGRIADWTRNPGHPGAHGHHGAAAASRDSVFDFSSADDSLAAAAEDSSFSLVDAKPPPKHPRFGPKWRFNQRPQLPQRRDEEVEAKRREAEKERARRERHYQNHRSHHHQGFRGNQQNTAKPSVDIQPDWTILEQIPFANFTKLSFAVADQPEDLLVCGAVDSYDRAYDRVNPKTARRLERFKNRQFFKITTTDDPIIRRLAEEDKATVFATDAILAALMCTPRSILSWDIVVQRVGNKLFFDKREGSQLDLLTVNETAQEQLPENKDDINSAPALAVEATYINQNFSQQVLVRDGEKVTFDEPNPFASENEEAAPVCYRYRRWKLDDDISIIARCEVHAAGVDPSGARQFLTLNALNEFDPKITGVDWKQKLESQRGAVLATELKNNANKLARWTAQALLSGADMMKLGYVSRVHPRDHFNHSILTVMGYKPRDFATQINLNTANMWGIVKSIVDICMKFEEGKYVLVKDPAKPQMRIYQVPNDAFENDYVEEPLPEEEQIRPATDDVDATAQEMDAAAEAEANKATTQGGEGEKSADAAAA

SEQ ID NO: 15722 - protein, 493 aa, Triticum aestivum
  peptide (1)..(493): Ceres Seq. ID no. 15219800
  misc_feature (12)..(374): Pfam Name: Pfam Description:  Equine herpesvirus glycoprotein gp2
  misc_feature (2)..(377): NCBI GI NO: 13592175 NR Description: ppg3 [Leishmania major]
  misc_feature (2)..(372): NCBI GI NO: 13592175 NR Description: ppg3 [Leishmania major]
  misc_feature (4)..(372): NCBI GI NO: 13592175 NR Description: ppg3 [Leishmania major]
  misc_feature (2)..(372): NCBI GI NO: 13592175 NR Description: ppg3 [Leishmania major]
  misc_feature (1)..(339): NCBI GI NO: 188864 NR Description: mucin
  misc_feature (2)..(379): NCBI GI NO: 188864 NR Description: mucin
  misc_feature (16)..(377): NCBI GI NO: 13592175 NR Description: ppg3 [Leishmania major]
  misc_feature (2)..(372): NCBI GI NO: 186396 NR Description: mucin
  misc_feature (2)..(338): NCBI GI NO: 13592175 NR Description: ppg3 [Leishmania major]
  misc_feature (2)..(372): NCBI GI NO: 2135765 NR Description: mucin 2 precursor, intestinal - human (fragments)
NPKAPSSRPPPPHLNPNQTHSTLAPPPPDPSASPPPPPPPRAWASTWASSPSTRTAGALPTCRARRRCWAGPSRRPRSPSRPSPAPTSWAASPTGRATRATRARTATTARPPPPATRSSTSPRPTTRSPPPPRTRPSASSTPSRRPSTRASGPSGASTSGPSSPSAATRRSRPSAARPRRSAPAASATTRTTAPTTTRASAATSRTPPSPRSTSSPTGPSSSRSPSPTSPSSPSPSPTSPRTCSSAAPSTRTTAPTTASTPRRPAASSASRTASSSRSPPPTTPSSAASPRRTRPPSSPPTPSSPPSCARPAASSPGTLSCSASATSSSSTSARAPSSICSLSTRLRRSSSLRTRMTSIPRRPLLSRPPTSTRTSRSRCWCVMARRLPLMSLTRLPLRMRRRRLFATVIAAGSWMMILASLPAVKCMLLVLIPVVLASSSRLMHSMSLILRLLVLTGSRSSSPSVVLCLLQSSRTMPTSSLAGLPRLYFLVLT

SEQ ID NO: 15723 - protein, 351 aa, Triticum aestivum
  peptide (1)..(351): Ceres Seq. ID no. 15219801
TLKPPRPVLLLRISTLTKPTQPSRRRLRIHPHRRRRRRRREHGLRRGRRPLQPGRLGPSRLAGRGAAAGRGRRDGLDPLRALLPLRQAGPHRRLDAQPGPPGRARPPRRGRRLPRLGLRLLLGRRLARRRRRGLVLQPRRRQAAAQAPALRAQVALQPAAPAPPAPRRGGRGQAPRGREGARPPRAPLPEPPLPPPPGLPRQPAEHRQALGRHPARLDHPRADPLRQLHQALLRRRRPARGPARLRRRRLVRPRLRPRQPQDGPPPRALQEPPVLQDHHHRRPHHPPPRRGGQGHRLRHRRHPRRPHVHAPQHPLLGHCRAARRQQALLRQARGLPARSAHCQRDCAGAAP

SEQ ID NO: 15724 - DNA, 1225 bp, Triticum aestivum
  misc_feature (1)..(1225): Ceres Seq. ID no. 12626036
tagaccaaagcctcgcacccaaatccgcaaagaaagaaagcaagcaagccaaacaaacgacgtttcagccaagaagaagacatgggggagcggcgcagtgacgaccgacgccaggagcccacggtggccagggcggacggccccccgattcccgccgacgagtccgacgacgagttcgagttctccttcgggagccgggagcctgccacgggcggcgccgcggccgacgagctcttcgccgacggccgcatcaggccgttctacccggtgttcggccgggtcttcgacgacgcgcacgtgccgtcggcgcccggccggaggccgctgggccggctgttcctcgaggaggcgcggaactcgtccgtcgggtccacgtcctcgtcctcctcctccgccgccacggacgccggggacctcgacggcgcgtccccggacagctactgcgtctggacgcccggcgcctcggccgcgtcctcgccggcgcggtcgccgcggaagagcggatccacggggtccttgtcgcggtggcgccgcgtcagcgacctcgtcgtcggccgcagccacagcgacggcagggacaagttccgattcctttccgcgccgccctcgcccgccagggagcagcccaaggggaagccacgaggccgggacagcaaagccgccaccgagctcgacacggtggccgccagccaccggcagttctacggcactaaggcctcccccggcgcggcgcggcggacgttcttgccgtaccggcaggatctcgtcggcctcttctccgcgcccaaggggctcagccggagccaatacttctgacttccaagctggcgcgtcccccgccccgccgtggagaaccagtttcaaaatgtgagatttcacatttgggttgaagtttcgaacttttgacccgggagcaactttgtgttcgtaaatggcgatggtaatactggattgttgcacgggattgagctagtccaaaaagacgaggcgtcaagtcagagcaagggaaatgtgaggcctaaattttggatccagtctgggataccgggctctccaagtcaatgtgaagttgtgatcgacatgtgaacatagtactaggaccaaaaaaaggactgtataggagattaaaatacacgtggaagctcagaaaagttttgtagtaatcatgtgttacctgtacatgcatgtatattgtactaccagaataatagattttttttcttgc

SEQ ID NO: 15725 - protein, 289 aa, Triticum aestivum
  peptide (1)..(289): Ceres Seq. ID no. 12626037
  misc_feature (13)..(262): Pfam Name: Pfam Description:  Glycoprotein GG/GX
  misc_feature (37)..(282): NCBI GI NO: 23017082 NR Description: hypothetical protein [Thermobifida fusca]
  misc_feature (37)..(279): NCBI GI NO: 40747082 NR Description: hypothetical protein AN1120.2
  misc_feature (9)..(222): NCBI GI NO: 39580893 NR Description: Hypothetical protein CBG21491
  misc_feature (37)..(276): NCBI GI NO: 15805485 NR Description: hypothetical protein [Deinococcus radiodurans]
  misc_feature (15)..(281): NCBI GI NO: 13592175 NR Description: ppg3 [Leishmania major]
  misc_feature (32)..(282): NCBI GI NO: 27375632 NR Description: blr0521 [Bradyrhizobium japonicum]
  misc_feature (84)..(282): NCBI GI NO: 39580893 NR Description: Hypothetical protein CBG21491
  misc_feature (2)..(287): NCBI GI NO: 13592175 NR Description: ppg3 [Leishmania major]
  misc_feature (15)..(281): NCBI GI NO: 13592175 NR Description: ppg3 [Leishmania major]
  misc_feature (39)..(281): NCBI GI NO: 11360318 NR Description: probable mucin DKFZp434C196.1 - human (fragment)
RPKPRTQIRKERKQASQTNDVSAKKKTWGSGAVTTDARSPRWPGRTAPRFPPTSPTTSSSSPSGAGSLPRAAPRPTSSSPTAASGRSTRCSAGSSTTRTCRRRPAGGRWAGCSSRRRGTRPSGPRPRPPPPPPRTPGTSTARPRTATASGRPAPRPRPRRRGRRGRADPRGPCRGGAASATSSSAAATATAGTSSDSFPRRPRPPGSSPRGSHEAGTAKPPPSSTRWPPATGSSTALRPPPARRGGRSCRTGRISSASSPRPRGSAGANTSDFQAGASPAPPWRTSFKM

SEQ ID NO: 15726 - protein, 244 aa, Triticum aestivum
  peptide (1)..(244): Ceres Seq. ID no. 12626038
  misc_feature (7)..(243): NCBI GI NO: 34911600 NR Description: P0004A09.25
  misc_feature (79)..(242): NCBI GI NO: 34912066 NR Description: P0445H04.35
  misc_feature (1)..(240): NCBI GI NO: 15241966 NR Description: putative protein; protein id: At5g62770.1
  misc_feature (26)..(198): NCBI GI NO: 21593128 NR Description: unknown [Arabidopsis thaliana]
  misc_feature (26)..(198): NCBI GI NO: 18395275 NR Description: expressed protein; protein id: At1g23710
  misc_feature (1)..(241): NCBI GI NO: 18409540 NR Description: expressed protein; protein id: At1g70420
MGERRSDDRRQEPTVARADGPPIPADESDDEFEFSFGSREPATGGAAADELFADGRIRPFYPVFGRVFDDAHVPSAPGRRPLGRLFLEEARNSSVGSTSSSSSSAATDAGDLDGASPDSYCVWTPGASAASSPARSPRKSGSTGSLSRWRRVSDLVVGRSHSDGRDKFRFLSAPPSPAREQPKGKPRGRDSKAATELDTVAASHRQFYGTKASPGAARRTFLPYRQDLVGLFSAPKGLSRSQYF

SEQ ID NO: 15727 - DNA, 1420 bp, Triticum aestivum
  misc_feature (1)..(1420): Ceres Seq. ID no. 13598597
agtacacacctcggtttggaacttggaagtcgagacacatacacacacacatactagatacatatccatacttctgttgctcattgcatctcctagttcagcaaattgccaaactgagacatgggaattgatcgtgtcaacacggcagccactggccgcggacgcaccgtctgtgtgaccggcgccggcggtttcatcgcgtcctggctagtgaagctcctcctggagaagggctacgccgtccacggcaccgtccggaaccctgatgacgtggcaaggaatgcgcacctgagagccttggaaggggcgacggagcgactgaccctcttccaggtggacctgcttgacaaggagagcctcgtcgctgctttccaaggatgcgaaggcgtattccacaccgcatgccccgtcaccgatgacccggaaaaaatgatcgagccggcagtgaacggaacgagaaacgtgttcaacgccgcggcagaggtgggcggcatccggcgtgtggtaatgacgtcgtcgatcggctccgtgtacatggatcctcgtcgtagcatcgatggggaggccgatgagacatgttggagcgacctcgagttctgcaagaacacaaagaattggtactgctatgcgaagacggtggcggagcaggccgcatgggagctcgccaaggagaggaagcttgaccttgtggtgatcaacccgtctctagtgttgggccctctgctacagatggcggtgaacgccagtacgtggcatattgccaagtatctggacggctcggtgcagacgtatgccaacgcggcacaggcgtacgtgcacgtccaggacgtcgcggacgcgcacgcgcgtgcgtacgagacgcccgatgcgcatggccggtacctctgcgcggggcgcacgctgcaccgtgccgaggtgtgtcgcatccttgccaagttcttcccggagtaccccgtgcccacgaggtgcaaggaaggggcgggcgagatgaagaagggttgtcggttcagcagtcggaggatcatggatctcggcgtcggcatcacgccggcgagccagtgtctctacgacacggtcaccagccttcaggacaagggcatcttaccacgtcgcgacgctgatatgtcctgacaactccatggtcaccttggtcaagttagcagcatgcatgcccgcttgatgattacaaagtcatggcatttaattctttatttacttcttagttgttcaaatataaggccctgtccagagcacctccaccccacaactccactccccaagttgatggagttacagttgaaaactgtggagcagctatttcctggctccacagctcccagaatttcgtggagctggtggatttccgaacaggccctaagtgtccattgtaaaagaatatgttatgatatgatgtttatcc

SEQ ID NO: 15728 - protein, 336 aa, Triticum aestivum
  peptide (1)..(336): Ceres Seq. ID no. 13598598
  misc_feature (15)..(270): Pfam Name: Pfam Description:  3-beta hydroxysteroid dehydrogenase/ isomerase family
  misc_feature (10)..(329): NCBI GI NO: 28544965 NR Description: cinnamoyl-CoA reductase [Zea mays]
  misc_feature (10)..(329): NCBI GI NO: 3668115 NR Description: cinnamoyl-CoA reductase [Zea mays]
  misc_feature (10)..(329): NCBI GI NO: 28544959 NR Description: cinnamoyl-CoA reductase [Zea mays]
  misc_feature (8)..(329): NCBI GI NO: 9998901 NR Description: cinnamoyl-CoA reductase
  misc_feature (8)..(329): NCBI GI NO: 2960364 NR Description: cinnamoyl CoA reductase
  misc_feature (8)..(329): NCBI GI NO: 40233135 NR Description: cinnamoyl CoA reductase [Populus tomentosa]
  misc_feature (12)..(329): NCBI GI NO: 3341511 NR Description: cinnamoyl-CoA reductase [Saccharum officinarum]
  misc_feature (12)..(329): NCBI GI NO: 3242328 NR Description: cinnamoyl-CoA reductase [Zea mays]
  misc_feature (8)..(329): NCBI GI NO: 7239228 NR Description: cinnamoyl CoA reductase; CCR [Populus tremuloides]
  misc_feature (12)..(329): NCBI GI NO: 7431410 NR Description: cinnamoyl CoA reductase - maize
MGIDRVNTAATGRGRTVCVTGAGGFIASWLVKLLLEKGYAVHGTVRNPDDVARNAHLRALEGATERLTLFQVDLLDKESLVAAFQGCEGVFHTACPVTDDPEKMIEPAVNGTRNVFNAAAEVGGIRRVVMTSSIGSVYMDPRRSIDGEADETCWSDLEFCKNTKNWYCYAKTVAEQAAWELAKERKLDLVVINPSLVLGPLLQMAVNASTWHIAKYLDGSVQTYANAAQAYVHVQDVADAHARAYETPDAHGRYLCAGRTLHRAEVCRILAKFFPEYPVPTRCKEGAGEMKKGCRFSSRRIMDLGVGITPASQCLYDTVTSLQDKGILPRRDADMS

SEQ ID NO: 15729 - protein, 233 aa, Triticum aestivum
  peptide (1)..(233): Ceres Seq. ID no. 13598599
  misc_feature (1)..(167): Pfam Name: Pfam Description:  3-beta hydroxysteroid dehydrogenase/ isomerase family
  misc_feature (1)..(226): NCBI GI NO: 28544965 NR Description: cinnamoyl-CoA reductase [Zea mays]
  misc_feature (1)..(226): NCBI GI NO: 3668115 NR Description: cinnamoyl-CoA reductase [Zea mays]
  misc_feature (1)..(226): NCBI GI NO: 28544959 NR Description: cinnamoyl-CoA reductase [Zea mays]
  misc_feature (1)..(226): NCBI GI NO: 9998901 NR Description: cinnamoyl-CoA reductase
  misc_feature (1)..(226): NCBI GI NO: 2960364 NR Description: cinnamoyl CoA reductase
  misc_feature (1)..(226): NCBI GI NO: 40233135 NR Description: cinnamoyl CoA reductase [Populus tomentosa]
  misc_feature (1)..(226): NCBI GI NO: 3341511 NR Description: cinnamoyl-CoA reductase [Saccharum officinarum]
  misc_feature (1)..(226): NCBI GI NO: 3242328 NR Description: cinnamoyl-CoA reductase [Zea mays]
  misc_feature (1)..(226): NCBI GI NO: 7239228 NR Description: cinnamoyl CoA reductase; CCR [Populus tremuloides]
  misc_feature (1)..(226): NCBI GI NO: 7431410 NR Description: cinnamoyl CoA reductase - maize
MIEPAVNGTRNVFNAAAEVGGIRRVVMTSSIGSVYMDPRRSIDGEADETCWSDLEFCKNTKNWYCYAKTVAEQAAWELAKERKLDLVVINPSLVLGPLLQMAVNASTWHIAKYLDGSVQTYANAAQAYVHVQDVADAHARAYETPDAHGRYLCAGRTLHRAEVCRILAKFFPEYPVPTRCKEGAGEMKKGCRFSSRRIMDLGVGITPASQCLYDTVTSLQDKGILPRRDADMS

SEQ ID NO: 15730 - protein, 207 aa, Triticum aestivum
  peptide (1)..(207): Ceres Seq. ID no. 13598600
  misc_feature (1)..(141): Pfam Name: Pfam Description:  3-beta hydroxysteroid dehydrogenase/ isomerase family
  misc_feature (1)..(200): NCBI GI NO: 28544965 NR Description: cinnamoyl-CoA reductase [Zea mays]
  misc_feature (1)..(200): NCBI GI NO: 3668115 NR Description: cinnamoyl-CoA reductase [Zea mays]
  misc_feature (1)..(200): NCBI GI NO: 28544959 NR Description: cinnamoyl-CoA reductase [Zea mays]
  misc_feature (1)..(200): NCBI GI NO: 9998901 NR Description: cinnamoyl-CoA reductase
  misc_feature (1)..(200): NCBI GI NO: 2960364 NR Description: cinnamoyl CoA reductase
  misc_feature (1)..(200): NCBI GI NO: 40233135 NR Description: cinnamoyl CoA reductase [Populus tomentosa]
  misc_feature (1)..(200): NCBI GI NO: 3341511 NR Description: cinnamoyl-CoA reductase [Saccharum officinarum]
  misc_feature (1)..(200): NCBI GI NO: 3242328 NR Description: cinnamoyl-CoA reductase [Zea mays]
  misc_feature (1)..(200): NCBI GI NO: 7239228 NR Description: cinnamoyl CoA reductase; CCR [Populus tremuloides]
  misc_feature (1)..(200): NCBI GI NO: 7431410 NR Description: cinnamoyl CoA reductase - maize
MTSSIGSVYMDPRRSIDGEADETCWSDLEFCKNTKNWYCYAKTVAEQAAWELAKERKLDLVVINPSLVLGPLLQMAVNASTWHIAKYLDGSVQTYANAAQAYVHVQDVADAHARAYETPDAHGRYLCAGRTLHRAEVCRILAKFFPEYPVPTRCKEGAGEMKKGCRFSSRRIMDLGVGITPASQCLYDTVTSLQDKGILPRRDADMS

SEQ ID NO: 15731 - DNA, 1493 bp, Triticum aestivum
  misc_feature (1)..(1493): Ceres Seq. ID no. 15226223
tccgatgcatgccatggcggagcccggcggcgcgctcgacccccctcctcccccctctccggctgcgccgaccccgccggtccagtggcccaaggacggctcgctcgacccgcctccttccccctctccggtcgcgcagcccccgccggtcgagtggcccgaggacggcgtgctgacgcgggactgggtggccagcttcaccgcggcgctggactggtgctcgcggagcatcccgccggaccagctcccctcggtgctctccgcggatttcgtgcggcggctcgtcgtcgccgcggccgtcatcctccaccgcgagcccaacatcgtccgcgtcgacccgcggcccgaccagtccgtcgtcgtcgtgggggacgtccacggccagctccacgatgtcatgttcctgctccgggacgccgggttcccctcggaggagcgaatctttgtctttaacggggattacgtggatcgcggcgcttggggcctcgagaccttgctcctcctcctggcttggaaggtattccttccaaattgtgtgtttcttctccgaggaaatcatgaatccaagtactgcacgtcagtatatggtttcgaacaggaggtaatggttaaatataaaggtcaaggcactcaagtttatcggaagtttttaagatgttttgaagatctccctctagcatcaataatagcaggatgtgtgtatactgctcatggagggatttttcgtggggcggttgtactaccgttgaaaaggtcgaaaagggcaaagaaaggtcacaaatataaggcgggtcctactgatgactctactactttgaagcttggatccctggacgaattgttaaaagcaaggagaactgttcttgacaccccgtatgagggttcaaacttgattcctggagatgtgctttggtctgatccttccttagataagggtctttccctgaataatgaaaggggcattggtttgctttggggtctagatatcactcaacagtttctatatacaaataatctgaagttaatcatcagatcacatgaaggcccagatgcaagagataagcggcatgatctattagcaatggacagtggatatacaatcgaccatcatgtcgcatgcggaaagttaataactctcttcagtgccccagactatccacaatttcaggcctcagtggaccgttacaacaattctggagcatatattgtcctcagtccccctgattttgctacccctgatttccatacttttcaagctgtaaagcctcggcctaaggcgcatccctactatgattttgaagacgtaattgattctgatgaagagttaaatctaggcgccatggacactggcacgtcgagcagttgatcacaacctgtattgtaattgtacttagcatgcgaattgtcaccgcgaactggagaagtggtaacgagtagttcttttgattggtactaacattgcagacttcgtaactaatattttgtcacgtcct

SEQ ID NO: 15732 - protein, 454 aa, Triticum aestivum
  peptide (1)..(454): Ceres Seq. ID no. 15226224
  misc_feature (118)..(350): Pfam Name: Pfam Description:  Calcineurin-like phosphoesterase
  misc_feature (47)..(449): NCBI GI NO: 11358619 NR Description: phosphoprotein phosphatase (EC 3.1.3.16) PP7
  misc_feature (47)..(449): NCBI GI NO: 30697908 NR Description: ser/thr protein phosphatase catalytic subunit
  misc_feature (20)..(442): NCBI GI NO: 15221080 NR Description: calcineurin-like phosphoesterase family
  misc_feature (20)..(442): NCBI GI NO: 25405918 NR Description: protein F21D18.16
  misc_feature (47)..(341): NCBI GI NO: 18424758 NR Description: ser/thr protein phosphatase catalytic subunit
  misc_feature (49)..(246): NCBI GI NO: 15238894 NR Description: serine/threonine protein phosphatase
  misc_feature (271)..(423): NCBI GI NO: 15238894 NR Description: serine/threonine protein phosphatase
  misc_feature (70)..(241): NCBI GI NO: 19347799 NR Description: putative phosphoprotein phosphatase
  misc_feature (289)..(385): NCBI GI NO: 19347799 NR Description: putative phosphoprotein phosphatase
  misc_feature (90)..(264): NCBI GI NO: 32414785 NR Description: hypothetical protein
PMHAMAEPGGALDPPPPPSPAAPTPPVQWPKDGSLDPPPSPSPVAQPPPVEWPEDGVLTRDWVASFTAALDWCSRSIPPDQLPSVLSADFVRRLVVAAAVILHREPNIVRVDPRPDQSVVVVGDVHGQLHDVMFLLRDAGFPSEERIFVFNGDYVDRGAWGLETLLLLLAWKVFLPNCVFLLRGNHESKYCTSVYGFEQEVMVKYKGQGTQVYRKFLRCFEDLPLASIIAGCVYTAHGGIFRGAVVLPLKRSKRAKKGHKYKAGPTDDSTTLKLGSLDELLKARRTVLDTPYEGSNLIPGDVLWSDPSLDKGLSLNNERGIGLLWGLDITQQFLYTNNLKLIIRSHEGPDARDKRHDLLAMDSGYTIDHHVACGKLITLFSAPDYPQFQASVDRYNNSGAYIVLSPPDFATPDFHTFQAVKPRPKAHPYYDFEDVIDSDEELNLGAMDTGTSSS

SEQ ID NO: 15733 - protein, 453 aa, Triticum aestivum
  peptide (1)..(453): Ceres Seq. ID no. 15226225
  misc_feature (117)..(349): Pfam Name: Pfam Description:  Calcineurin-like phosphoesterase
  misc_feature (46)..(448): NCBI GI NO: 11358619 NR Description: phosphoprotein phosphatase (EC 3.1.3.16) PP7
  misc_feature (46)..(448): NCBI GI NO: 30697908 NR Description: ser/thr protein phosphatase catalytic subunit
  misc_feature (19)..(441): NCBI GI NO: 15221080 NR Description: calcineurin-like phosphoesterase family
  misc_feature (19)..(441): NCBI GI NO: 25405918 NR Description: protein F21D18.16
  misc_feature (46)..(340): NCBI GI NO: 18424758 NR Description: ser/thr protein phosphatase catalytic subunit
  misc_feature (48)..(245): NCBI GI NO: 15238894 NR Description: serine/threonine protein phosphatase
  misc_feature (270)..(422): NCBI GI NO: 15238894 NR Description: serine/threonine protein phosphatase
  misc_feature (69)..(240): NCBI GI NO: 19347799 NR Description: putative phosphoprotein phosphatase
  misc_feature (288)..(384): NCBI GI NO: 19347799 NR Description: putative phosphoprotein phosphatase
  misc_feature (89)..(263): NCBI GI NO: 32414785 NR Description: hypothetical protein
MHAMAEPGGALDPPPPPSPAAPTPPVQWPKDGSLDPPPSPSPVAQPPPVEWPEDGVLTRDWVASFTAALDWCSRSIPPDQLPSVLSADFVRRLVVAAAVILHREPNIVRVDPRPDQSVVVVGDVHGQLHDVMFLLRDAGFPSEERIFVFNGDYVDRGAWGLETLLLLLAWKVFLPNCVFLLRGNHESKYCTSVYGFEQEVMVKYKGQGTQVYRKFLRCFEDLPLASIIAGCVYTAHGGIFRGAVVLPLKRSKRAKKGHKYKAGPTDDSTTLKLGSLDELLKARRTVLDTPYEGSNLIPGDVLWSDPSLDKGLSLNNERGIGLLWGLDITQQFLYTNNLKLIIRSHEGPDARDKRHDLLAMDSGYTIDHHVACGKLITLFSAPDYPQFQASVDRYNNSGAYIVLSPPDFATPDFHTFQAVKPRPKAHPYYDFEDVIDSDEELNLGAMDTGTSSS

SEQ ID NO: 15734 - protein, 450 aa, Triticum aestivum
  peptide (1)..(450): Ceres Seq. ID no. 15226226
  misc_feature (114)..(346): Pfam Name: Pfam Description:  Calcineurin-like phosphoesterase
  misc_feature (43)..(445): NCBI GI NO: 11358619 NR Description: phosphoprotein phosphatase (EC 3.1.3.16) PP7
  misc_feature (43)..(445): NCBI GI NO: 30697908 NR Description: ser/thr protein phosphatase catalytic subunit
  misc_feature (16)..(438): NCBI GI NO: 15221080 NR Description: calcineurin-like phosphoesterase family
  misc_feature (16)..(438): NCBI GI NO: 25405918 NR Description: protein F21D18.16
  misc_feature (43)..(337): NCBI GI NO: 18424758 NR Description: ser/thr protein phosphatase catalytic subunit
  misc_feature (45)..(242): NCBI GI NO: 15238894 NR Description: serine/threonine protein phosphatase
  misc_feature (267)..(419): NCBI GI NO: 15238894 NR Description: serine/threonine protein phosphatase
  misc_feature (66)..(237): NCBI GI NO: 19347799 NR Description: putative phosphoprotein phosphatase
  misc_feature (285)..(381): NCBI GI NO: 19347799 NR Description: putative phosphoprotein phosphatase
  misc_feature (86)..(260): NCBI GI NO: 32414785 NR Description: hypothetical protein
MAEPGGALDPPPPPSPAAPTPPVQWPKDGSLDPPPSPSPVAQPPPVEWPEDGVLTRDWVASFTAALDWCSRSIPPDQLPSVLSADFVRRLVVAAAVILHREPNIVRVDPRPDQSVVVVGDVHGQLHDVMFLLRDAGFPSEERIFVFNGDYVDRGAWGLETLLLLLAWKVFLPNCVFLLRGNHESKYCTSVYGFEQEVMVKYKGQGTQVYRKFLRCFEDLPLASIIAGCVYTAHGGIFRGAVVLPLKRSKRAKKGHKYKAGPTDDSTTLKLGSLDELLKARRTVLDTPYEGSNLIPGDVLWSDPSLDKGLSLNNERGIGLLWGLDITQQFLYTNNLKLIIRSHEGPDARDKRHDLLAMDSGYTIDHHVACGKLITLFSAPDYPQFQASVDRYNNSGAYIVLSPPDFATPDFHTFQAVKPRPKAHPYYDFEDVIDSDEELNLGAMDTGTSSS

SEQ ID NO: 15735 - DNA, 1569 bp, Triticum aestivum
  misc_feature (1)..(1569): Ceres Seq. ID no. 13656091
gaaagccggctcttgctcttgttcttcgtcttcctctacactgcatatttacacatgcaagaattgagaagcacaacaaagagcgcgcagagctaattaagctaagctaggtaaacaaggtagtccacttggttgcaggatggcgtgggtgagggacatgaagacgaagctcgaggacgccgagctgccggacaaggtgcagagatggccgaagcactgcattttcagcgtcccaccgcgcttcaagatggtcgacagcagcgtctacaagccgcagactgtgtctctcggcccattccatcatggcgctcaggacctgaaatccatggaggagcacaagttgagggctgtccgtcacctcctggcccgggacagctacataacctcccttgacgaccttgtcagggccgtggaagaggtggccgacgagctggaggactcctacatggacctaagtggagagtggcgtggcaaggagaacaggggcaagttcctcgagatgatgatcacggacggctgcttcctgctggaggtgatgaggacggacgcgacccaaaaggaggactccgttgtaaagggctatgcgcacgaccccgtcttcagctggtatggcatacaacacatcaagccgttcgtccaacgtgacatgctcttggtagagaaccagctgccactcaggttgctccagagaatcgttgccatggaggaaacgcactctccgaggcagaacacagattccataaattgcatggtgctcaagttcctggggcagaaagatgcacagcccagatatgagttgggactccacccgctcgacatctaccggacgagccagttcaggggcatccaagagcatattaacactgccagttgtctgatgatccatcatcaacatatgatgcgggaggagacccatcgtccacagagacccctggcccgatctgcgcgggagctgaccgaggcagggatccggttactgcccatagagacaagccgcctcaacgatttccggttcgataggagtgatgggacgctccaaatgcccaagatccacgtgcatgactccaccgcctacatgttccgcaacatgatggcgttcgaggtgctgcgcgtcggcaccaccaacgacgtgacggcgtacgtcatgtttctcaaggacatcgtcgactccgcctacgatgttcgcctgctggtgaggaacggggtcctggagcacgaccttgccaacgacaacgccgtggtgaggctcttcaacggcctcaccagggacgtgacaaggaactgggagaatcagctggcgtacatgaaggtgcgtgaagacgtggagaactactgcatgacccaccaccgcaccaactgcgtgcgcctctttctcaatcaatcctgggcctacctcatgaccaagtacttgagcaacccctggacattccttggcctcgtcaccgccaccttgctcctcgtcgcagatatcgtgcaggccgtgtatgcagtcaaatcgtacaaagagggcaaatgaatgtattaatcagaagcatttcatacatttgttgtttttattcaattgttttg

SEQ ID NO: 15736 - protein, 458 aa, Triticum aestivum
  peptide (1)..(458): Ceres Seq. ID no. 13656092
  misc_feature (23)..(440): Pfam Name: Pfam Description:  Plant protein of unknown function
  misc_feature (1)..(454): NCBI GI NO: 38636935 NR Description: hypothetical protein
  misc_feature (1)..(454): NCBI GI NO: 15229684 NR Description: hypothetical protein [Arabidopsis thaliana]
  misc_feature (1)..(454): NCBI GI NO: 15229680 NR Description: hypothetical protein [Arabidopsis thaliana]
  misc_feature (1)..(454): NCBI GI NO: 15229681 NR Description: hypothetical protein [Arabidopsis thaliana]
  misc_feature (2)..(454): NCBI GI NO: 15229687 NR Description: hypothetical protein [Arabidopsis thaliana]
  misc_feature (222)..(454): NCBI GI NO: 32490273 NR Description: OSJNBb0116K07.15
  misc_feature (1)..(208): NCBI GI NO: 32490273 NR Description: OSJNBb0116K07.15
  misc_feature (181)..(378): NCBI GI NO: 15229691 NR Description: hypothetical protein [Arabidopsis thaliana]
  misc_feature (1)..(179): NCBI GI NO: 15229691 NR Description: hypothetical protein [Arabidopsis thaliana]
  misc_feature (1)..(189): NCBI GI NO: 15229682 NR Description: expressed protein [Arabidopsis thaliana]
MAWVRDMKTKLEDAELPDKVQRWPKHCIFSVPPRFKMVDSSVYKPQTVSLGPFHHGAQDLKSMEEHKLRAVRHLLARDSYITSLDDLVRAVEEVADELEDSYMDLSGEWRGKENRGKFLEMMITDGCFLLEVMRTDATQKEDSVVKGYAHDPVFSWYGIQHIKPFVQRDMLLVENQLPLRLLQRIVAMEETHSPRQNTDSINCMVLKFLGQKDAQPRYELGLHPLDIYRTSQFRGIQEHINTASCLMIHHQHMMREETHRPQRPLARSARELTEAGIRLLPIETSRLNDFRFDRSDGTLQMPKIHVHDSTAYMFRNMMAFEVLRVGTTNDVTAYVMFLKDIVDSAYDVRLLVRNGVLEHDLANDNAVVRLFNGLTRDVTRNWENQLAYMKVREDVENYCMTHHRTNCVRLFLNQSWAYLMTKYLSNPWTFLGLVTATLLLVADIVQAVYAVKSYKEGK

SEQ ID NO: 15737 - protein, 452 aa, Triticum aestivum
  peptide (1)..(452): Ceres Seq. ID no. 13656093
  misc_feature (17)..(434): Pfam Name: Pfam Description:  Plant protein of unknown function
  misc_feature (1)..(448): NCBI GI NO: 38636935 NR Description: hypothetical protein
  misc_feature (1)..(448): NCBI GI NO: 15229684 NR Description: hypothetical protein [Arabidopsis thaliana]
  misc_feature (1)..(448): NCBI GI NO: 15229680 NR Description: hypothetical protein [Arabidopsis thaliana]
  misc_feature (1)..(448): NCBI GI NO: 15229681 NR Description: hypothetical protein [Arabidopsis thaliana]
  misc_feature (1)..(448): NCBI GI NO: 15229687 NR Description: hypothetical protein [Arabidopsis thaliana]
  misc_feature (216)..(448): NCBI GI NO: 32490273 NR Description: OSJNBb0116K07.15
  misc_feature (1)..(202): NCBI GI NO: 32490273 NR Description: OSJNBb0116K07.15
  misc_feature (175)..(372): NCBI GI NO: 15229691 NR Description: hypothetical protein [Arabidopsis thaliana]
  misc_feature (1)..(173): NCBI GI NO: 15229691 NR Description: hypothetical protein [Arabidopsis thaliana]
  misc_feature (1)..(183): NCBI GI NO: 15229682 NR Description: expressed protein [Arabidopsis thaliana]
MKTKLEDAELPDKVQRWPKHCIFSVPPRFKMVDSSVYKPQTVSLGPFHHGAQDLKSMEEHKLRAVRHLLARDSYITSLDDLVRAVEEVADELEDSYMDLSGEWRGKENRGKFLEMMITDGCFLLEVMRTDATQKEDSVVKGYAHDPVFSWYGIQHIKPFVQRDMLLVENQLPLRLLQRIVAMEETHSPRQNTDSINCMVLKFLGQKDAQPRYELGLHPLDIYRTSQFRGIQEHINTASCLMIHHQHMMREETHRPQRPLARSARELTEAGIRLLPIETSRLNDFRFDRSDGTLQMPKIHVHDSTAYMFRNMMAFEVLRVGTTNDVTAYVMFLKDIVDSAYDVRLLVRNGVLEHDLANDNAVVRLFNGLTRDVTRNWENQLAYMKVREDVENYCMTHHRTNCVRLFLNQSWAYLMTKYLSNPWTFLGLVTATLLLVADIVQAVYAVKSYKEGK

SEQ ID NO: 15738 - protein, 422 aa, Triticum aestivum
  peptide (1)..(422): Ceres Seq. ID no. 13656094
  misc_feature (1)..(404): Pfam Name: Pfam Description:  Plant protein of unknown function
  misc_feature (1)..(418): NCBI GI NO: 38636935 NR Description: hypothetical protein
  misc_feature (1)..(418): NCBI GI NO: 15229684 NR Description: hypothetical protein [Arabidopsis thaliana]
  misc_feature (1)..(418): NCBI GI NO: 15229680 NR Description: hypothetical protein [Arabidopsis thaliana]
  misc_feature (1)..(418): NCBI GI NO: 15229681 NR Description: hypothetical protein [Arabidopsis thaliana]
  misc_feature (1)..(418): NCBI GI NO: 15229687 NR Description: hypothetical protein [Arabidopsis thaliana]
  misc_feature (186)..(418): NCBI GI NO: 32490273 NR Description: OSJNBb0116K07.15
  misc_feature (1)..(172): NCBI GI NO: 32490273 NR Description: OSJNBb0116K07.15
  misc_feature (145)..(342): NCBI GI NO: 15229691 NR Description: hypothetical protein [Arabidopsis thaliana]
  misc_feature (1)..(143): NCBI GI NO: 15229691 NR Description: hypothetical protein [Arabidopsis thaliana]
  misc_feature (1)..(153): NCBI GI NO: 15229682 NR Description: expressed protein [Arabidopsis thaliana]
MVDSSVYKPQTVSLGPFHHGAQDLKSMEEHKLRAVRHLLARDSYITSLDDLVRAVEEVADELEDSYMDLSGEWRGKENRGKFLEMMITDGCFLLEVMRTDATQKEDSVVKGYAHDPVFSWYGIQHIKPFVQRDMLLVENQLPLRLLQRIVAMEETHSPRQNTDSINCMVLKFLGQKDAQPRYELGLHPLDIYRTSQFRGIQEHINTASCLMIHHQHMMREETHRPQRPLARSARELTEAGIRLLPIETSRLNDFRFDRSDGTLQMPKIHVHDSTAYMFRNMMAFEVLRVGTTNDVTAYVMFLKDIVDSAYDVRLLVRNGVLEHDLANDNAVVRLFNGLTRDVTRNWENQLAYMKVREDVENYCMTHHRTNCVRLFLNQSWAYLMTKYLSNPWTFLGLVTATLLLVADIVQAVYAVKSYKEGK

SEQ ID NO: 15739 - DNA, 1358 bp, Triticum aestivum
  misc_feature (1)..(1358): Ceres Seq. ID no. 13655992
atcctaatcaaaaacccatcaaacagccctcgcgaactcaacgggaagcgactcacgcccccctccgccccccgcagatcgcccgctccgccacgcgccgccgacgccgccgccaatggccgccgccgccgacgccgggcccgagctgcggcggagctccagcatcgaccgcatcccggcggaggcgcgccgcatcctgcaccgcctcgccggcgagctctggggcgccgacgtcgaccccgccgcgctcgtcgtgtcccagctcaagggcgccctcaccaacgaggtcttccgcatcacctggcccggcggcgagggcgacccgcgcaaggtgctcgtgcgcatctacggccagggcgtcgaggtcttcttcgaccgcgccgacgaggtccgcaccttcgagtgcatgtcccgccacggccagggcccccgcctcctcggccgcttcccccagggccgcgtcgaggagttcatcaacgccaggacgctctcggcgccggatctgcgcgacccggagatttccggcctgattgccaggaagctgcgggagtttcacgagctcgacatgcctggacccaaggacatctcactctggcagaggctgaggcgttggcttgaggaagctcgcagcaggtgctcgactgaggaggccagggaattgcggttggagacgctcggcgatgagattgcggagctggagaatgtattgtccggggtcgatcagagagtagtattttgccataatgatttgcagtatggcaacattatgatatacgaagagaccagacaagtgaccttaatcgactatgaatacgccagttttaaccctgttgcgttcgacattgcgaatcacttctgtgagatggctgctgattatcatagtgatacaccgcacgtgatggactttacaaaatatcctgacgtggatgaacagcggagatttcttgaggcttaccttagttcttcaggagaaaacacatccgatgtagaagtcgaaacattgcttggcttgattgcaaagtacagtctcacaagccatctcttctggggtctctggggaatagtctcggcgcatgtgaacaagaacatcgactttgagtacaaggagtacgcgaggcatcggttcgaccagtactgggacacgaagcctagaatactgcaagcctgcaacccaaccagctgatcacgcgcatggctcattctttttcttattatagcacccatcgcctctcgagtagctctgtagagtcctgtgactgaatcttgttcatcagccaatttggttgcaaatcgtttaggctagtagttgaccgtgtcgtgtaattaaacctgcgcagaatagtcgattctacggtttt

SEQ ID NO: 15740 - protein, 355 aa, Triticum aestivum
  peptide (1)..(355): Ceres Seq. ID no. 13655993
  misc_feature (69)..(341): Pfam Name: Pfam Description:  Choline/ethanolamine kinase
  misc_feature (1)..(348): NCBI GI NO: 34906246 NR Description: P0489A01.8
  misc_feature (8)..(348): NCBI GI NO: 7488654 NR Description: choline kinase (EC 2
  misc_feature (19)..(350): NCBI GI NO: 22330627 NR Description: choline kinase -related [Arabidopsis thaliana]
  misc_feature (19)..(350): NCBI GI NO: 25348157 NR Description: protein choline kinase F1O17.1
  misc_feature (23)..(348): NCBI GI NO: 12311795 NR Description: choline kinase [Pisum sativum]
  misc_feature (23)..(350): NCBI GI NO: 7488652 NR Description: choline kinase (EC 2.7.1.32) CK1 - soybean
  misc_feature (23)..(350): NCBI GI NO: 7488653 NR Description: choline kinase (EC 2.7.1.32) CK2 - soybean
  misc_feature (21)..(349): NCBI GI NO: 15217543 NR Description: choline kinase -related [Arabidopsis thaliana]
  misc_feature (8)..(348): NCBI GI NO: 33149685 NR Description: choline kinase
  misc_feature (21)..(348): NCBI GI NO: 15234032 NR Description: choline kinase GmCK2p -related protein
MAAAADAGPELRRSSSIDRIPAEARRILHRLAGELWGADVDPAALVVSQLKGALTNEVFRITWPGGEGDPRKVLVRIYGQGVEVFFDRADEVRTFECMSRHGQGPRLLGRFPQGRVEEFINARTLSAPDLRDPEISGLIARKLREFHELDMPGPKDISLWQRLRRWLEEARSRCSTEEARELRLETLGDEIAELENVLSGVDQRVVFCHNDLQYGNIMIYEETRQVTLIDYEYASFNPVAFDIANHFCEMAADYHSDTPHVMDFTKYPDVDEQRRFLEAYLSSSGENTSDVEVETLLGLIAKYSLTSHLFWGLWGIVSAHVNKNIDFEYKEYARHRFDQYWDTKPRILQACNPTS

SEQ ID NO: 15741 - protein, 258 aa, Triticum aestivum
  peptide (1)..(258): Ceres Seq. ID no. 13655994
  misc_feature (1)..(244): Pfam Name: Pfam Description:  Choline/ethanolamine kinase
  misc_feature (1)..(251): NCBI GI NO: 34906246 NR Description: P0489A01.8
  misc_feature (1)..(251): NCBI GI NO: 7488654 NR Description: choline kinase (EC 2
  misc_feature (1)..(253): NCBI GI NO: 22330627 NR Description: choline kinase -related [Arabidopsis thaliana]
  misc_feature (1)..(253): NCBI GI NO: 25348157 NR Description: protein choline kinase F1O17.1
  misc_feature (1)..(251): NCBI GI NO: 12311795 NR Description: choline kinase [Pisum sativum]
  misc_feature (1)..(253): NCBI GI NO: 7488652 NR Description: choline kinase (EC 2.7.1.32) CK1 - soybean
  misc_feature (1)..(253): NCBI GI NO: 7488653 NR Description: choline kinase (EC 2.7.1.32) CK2 - soybean
  misc_feature (1)..(252): NCBI GI NO: 15217543 NR Description: choline kinase -related [Arabidopsis thaliana]
  misc_feature (1)..(251): NCBI GI NO: 33149685 NR Description: choline kinase
  misc_feature (1)..(251): NCBI GI NO: 15234032 NR Description: choline kinase GmCK2p -related protein
MSRHGQGPRLLGRFPQGRVEEFINARTLSAPDLRDPEISGLIARKLREFHELDMPGPKDISLWQRLRRWLEEARSRCSTEEARELRLETLGDEIAELENVLSGVDQRVVFCHNDLQYGNIMIYEETRQVTLIDYEYASFNPVAFDIANHFCEMAADYHSDTPHVMDFTKYPDVDEQRRFLEAYLSSSGENTSDVEVETLLGLIAKYSLTSHLFWGLWGIVSAHVNKNIDFEYKEYARHRFDQYWDTKPRILQACNPTS

SEQ ID NO: 15742 - protein, 205 aa, Triticum aestivum
  peptide (1)..(205): Ceres Seq. ID no. 13655995
  misc_feature (1)..(191): Pfam Name: Pfam Description:  Choline/ethanolamine kinase
  misc_feature (1)..(198): NCBI GI NO: 34906246 NR Description: P0489A01.8
  misc_feature (1)..(198): NCBI GI NO: 7488654 NR Description: choline kinase (EC 2
  misc_feature (1)..(200): NCBI GI NO: 22330627 NR Description: choline kinase -related [Arabidopsis thaliana]
  misc_feature (1)..(200): NCBI GI NO: 25348157 NR Description: protein choline kinase F1O17.1
  misc_feature (1)..(198): NCBI GI NO: 12311795 NR Description: choline kinase [Pisum sativum]
  misc_feature (1)..(200): NCBI GI NO: 7488652 NR Description: choline kinase (EC 2.7.1.32) CK1 - soybean
  misc_feature (1)..(200): NCBI GI NO: 7488653 NR Description: choline kinase (EC 2.7.1.32) CK2 - soybean
  misc_feature (1)..(199): NCBI GI NO: 15217543 NR Description: choline kinase -related [Arabidopsis thaliana]
  misc_feature (1)..(198): NCBI GI NO: 33149685 NR Description: choline kinase
  misc_feature (1)..(198): NCBI GI NO: 15234032 NR Description: choline kinase GmCK2p -related protein
MPGPKDISLWQRLRRWLEEARSRCSTEEARELRLETLGDEIAELENVLSGVDQRVVFCHNDLQYGNIMIYEETRQVTLIDYEYASFNPVAFDIANHFCEMAADYHSDTPHVMDFTKYPDVDEQRRFLEAYLSSSGENTSDVEVETLLGLIAKYSLTSHLFWGLWGIVSAHVNKNIDFEYKEYARHRFDQYWDTKPRILQACNPTS

SEQ ID NO: 15743 - DNA, 1289 bp, Triticum aestivum
  misc_feature (1)..(1289): Ceres Seq. ID no. 13597662
gaactgaacccggaagtccaaagccaacccgtcgcgcagaataacctctcgactctcgagcgcctcctccccgaaccccgaccgtccgctccgcccaccctgcgccaaaatcaaacccccgctcgtccgctccggtgatccgccgctccgggaggcgaagccccacgacccgaccgcgcggagcctctgcccgccatgaccgagtattgggtgagccaaggaaacaaatggtgcgacttgtgcaaaatcttcatatccaacaatcccttcagcatcagaacacatgaactcggcaaacgccacaaggacaatgtcacccaaagattgtctacgatgcaaaaggatggtgctgctaaggaaaaggagcagcaacaagcagcaaaagctctccaactgatagaggctaaagctaaaaagagttaccagaaagatttagagaataaccagagaaacactgatggtgacagttctgcagcacctggagaaggatgggtatttgactcaacttcaggatattattatgataaagccactggactttattacgactcgaactctggtttctattattccgacggattaggcaaatgggtaacccaggaagaggcatacaagtgggcggaaacctcaaaaaccaatgttgcgcaatcctcgacctcgcaaccaaaaccggctggtggaggcgggcctgtcgccggtattaaaggagggccagccccaggtgtggttgtcacgaaaccactgaatccgatgagagctgtgaagggtgctccttcagctcttgctgctaataagagaaaaagagaggacaccaagaagcccaaggtggtctcgaaggaggaggaggcagcactcagagcacgggaagcagctcggaaaagagtggaggacagggagaagcctctcatgggattgtacaagacgtactgagttgtcaatgttcccaagctcaaggggcgcgcccatcagttgcgctaaaacagtggagatgctaatggatggaattgttctgaaagaaaagacggggagaccagcactgagtcccgagctcttgagcgtcagtggcacatgtatgcattgtacaatacctcgtcaaaagttcctaaatcagccacaggttccctttgtgcgaaacatgtaaatgatcagctcatcgattatcatctctcgtgttgtgttttcccaatggattgcatgcatgatataatgccgtcaactgtggccgatgtgagcgctgctggagatagattgtactgccatctctacatcatcagttcatttaagttgtg

SEQ ID NO: 15744 - protein, 244 aa, Triticum aestivum
  peptide (1)..(244): Ceres Seq. ID no. 13597663
  misc_feature (1)..(241): NCBI GI NO: 15222782 NR Description: expressed protein [Arabidopsis thaliana]
  misc_feature (132)..(241): NCBI GI NO: 15010772 NR Description: At1g49590/F14J22_9 [Arabidopsis thaliana]
  misc_feature (1)..(81): NCBI GI NO: 34874540 NR Description: WW domain binding protein 4
  misc_feature (1)..(81): NCBI GI NO: 6005948 NR Description: WW domain-containing binding protein 4
  misc_feature (1)..(81): NCBI GI NO: 22028154 NR Description: WW domain binding protein 4 [Mus musculus]
  misc_feature (1)..(81): NCBI GI NO: 9055380 NR Description: WW domain binding protein 4
  misc_feature (1)..(82): NCBI GI NO: 24580725 NR Description: CG4291-PA [Drosophila melanogaster]
  misc_feature (1)..(82): NCBI GI NO: 40882429 NR Description: SD18110p [Drosophila melanogaster]
  misc_feature (92)..(214): NCBI GI NO: 17979131 NR Description: unknown protein [Arabidopsis thaliana]
  misc_feature (1)..(54): NCBI GI NO: 26385554 NR Description: unnamed protein product [Mus musculus]
MTEYWVSQGNKWCDLCKIFISNNPFSIRTHELGKRHKDNVTQRLSTMQKDGAAKEKEQQQAAKALQLIEAKAKKSYQKDLENNQRNTDGDSSAAPGEGWVFDSTSGYYYDKATGLYYDSNSGFYYSDGLGKWVTQEEAYKWAETSKTNVAQSSTSQPKPAGGGGPVAGIKGGPAPGVVVTKPLNPMRAVKGAPSALAANKRKREDTKKPKVVSKEEEAALRAREAARKRVEDREKPLMGLYKTY

SEQ ID NO: 15745 - protein, 198 aa, Triticum aestivum
  peptide (1)..(198): Ceres Seq. ID no. 13597664
  misc_feature (1)..(195): NCBI GI NO: 15222782 NR Description: expressed protein [Arabidopsis thaliana]
  misc_feature (86)..(195): NCBI GI NO: 15010772 NR Description: At1g49590/F14J22_9 [Arabidopsis thaliana]
  misc_feature (1)..(35): NCBI GI NO: 34874540 NR Description: WW domain binding protein 4
  misc_feature (1)..(35): NCBI GI NO: 6005948 NR Description: WW domain-containing binding protein 4
  misc_feature (1)..(35): NCBI GI NO: 22028154 NR Description: WW domain binding protein 4 [Mus musculus]
  misc_feature (1)..(35): NCBI GI NO: 9055380 NR Description: WW domain binding protein 4
  misc_feature (1)..(36): NCBI GI NO: 24580725 NR Description: CG4291-PA [Drosophila melanogaster]
  misc_feature (1)..(36): NCBI GI NO: 40882429 NR Description: SD18110p [Drosophila melanogaster]
  misc_feature (46)..(168): NCBI GI NO: 17979131 NR Description: unknown protein [Arabidopsis thaliana]
MQKDGAAKEKEQQQAAKALQLIEAKAKKSYQKDLENNQRNTDGDSSAAPGEGWVFDSTSGYYYDKATGLYYDSNSGFYYSDGLGKWVTQEEAYKWAETSKTNVAQSSTSQPKPAGGGGPVAGIKGGPAPGVVVTKPLNPMRAVKGAPSALAANKRKREDTKKPKVVSKEEEAALRAREAARKRVEDREKPLMGLYKTY

SEQ ID NO: 15746 - DNA, 1378 bp, Triticum aestivum
  misc_feature (1)..(1378): Ceres Seq. ID no. 13597697
  misc_feature (107)..(107): n is a, c, t, g, unknown, or other
agcagatatttaatccgtttgcgtgccacggcagccatggcgagcgcgcccaatggggtcgcggcctttcacgtgctgccgctgcccgtcgggggccaggtggtgtngcgagaccaatcatatcccgctcccactcgcgacacctgtgctccctgacgcgtgtcccttgcgcgtccttgtataaaaccaacctgcttgccgccgtggtctactcgcaccgcgccgagaaagtagcactcagcgtaactgagactagtcgctgccgttctcttctgcttccgccgaggcgtctggtgtatgatggagaggaagggagggtgctgcttggcgccgaggtacgcagccggggcccaggcaggccaggggtggcacatgggaagggccatgctgaagtttaggcccatcgcgccaaagccggcggtgatggcgcctgcgccgatgccggccgtgcccgctgggaaggggaaggggagacggaaggcggttgcagggccagggggtaccgggaggaggggacggaagcccaagaagcaggccacggtggctgcaccgacgacgcaaaagttggactacgtgcaggacaagcctttgtcctcgccgtcctcctcctcgtcggggatgacgtccgtcgactcgtcgcctcctccacccctgccgctcatgcctgtgctgccggcagaggaggggttcggtggggcggcgccggtggcgaatctggcgcctgcccacgttgccggactggtcctgccgccgcaggcgctgcggcaagcggtgtcctgggtgacggttgaggacgtcacaggcatctggcgcgacggcgaggcgccgtacgctgcggcctgcggcggcgacgaggccccaacgttcgtgtccgaccagtgcggccgcgtcacgtggacaaacgtggctttcaaccgggcagtgtccggtagggaggacgtagacgcagccatggccccgtcggcggccgcttccgaggtgcgggtggtgctcgccgccaaggatggcgcccccgtgccggcgtggggctcctgtgccggtttcacctgtcgggtgcgcgtcccgtacgcatgccctcgccgaggttccctcgtggccccgtgcgacgtgtggcggctagacgctggtggctacctctggcggctcgaccttcaggccaccctcagcctctccctcggcggcttcatttgactgcgtacgcattccatgtacggagacgtatgaaccaatcaaaatcatgtgttagtctgcgctatgattatggtattgatttagcggtcatgactcattaccggatttggtatactcttattatgaactgaactgtagagtagtttaagaagaggggtagagatgcaagtgcaaaagatttctttcc

SEQ ID NO: 15747 - protein, 297 aa, Triticum aestivum
  peptide (1)..(297): Ceres Seq. ID no. 13597698
  misc_feature (2)..(291): NCBI GI NO: 18408645 NR Description: expressed protein [Arabidopsis thaliana]
  misc_feature (2)..(291): NCBI GI NO: 21537225 NR Description: unknown [Arabidopsis thaliana]
  misc_feature (2)..(291): NCBI GI NO: 15242729 NR Description: expressed protein [Arabidopsis thaliana]
  misc_feature (2)..(291): NCBI GI NO: 15240662 NR Description: expressed protein [Arabidopsis thaliana]
  misc_feature (160)..(293): NCBI GI NO: 15232126 NR Description: expressed protein [Arabidopsis thaliana]
  misc_feature (185)..(293): NCBI GI NO: 15237494 NR Description: hypothetical protein [Arabidopsis thaliana]
  misc_feature (154)..(293): NCBI GI NO: 15237495 NR Description: hypothetical protein [Arabidopsis thaliana]
MMERKGGCCLAPRYAAGAQAGQGWHMGRAMLKFRPIAPKPAVMAPAPMPAVPAGKGKGRRKAVAGPGGTGRRGRKPKKQATVAAPTTQKLDYVQDKPLSSPSSSSSGMTSVDSSPPPPLPLMPVLPAEEGFGGAAPVANLAPAHVAGLVLPPQALRQAVSWVTVEDVTGIWRDGEAPYAAACGGDEAPTFVSDQCGRVTWTNVAFNRAVSGREDVDAAMAPSAAASEVRVVLAAKDGAPVPAWGSCAGFTCRVRVPYACPRRGSLVAPCDVWRLDAGGYLWRLDLQATLSLSLGGFI

SEQ ID NO: 15748 - protein, 296 aa, Triticum aestivum
  peptide (1)..(296): Ceres Seq. ID no. 13597699
  misc_feature (1)..(290): NCBI GI NO: 18408645 NR Description: expressed protein [Arabidopsis thaliana]
  misc_feature (1)..(290): NCBI GI NO: 21537225 NR Description: unknown [Arabidopsis thaliana]
  misc_feature (1)..(290): NCBI GI NO: 15242729 NR Description: expressed protein [Arabidopsis thaliana]
  misc_feature (1)..(290): NCBI GI NO: 15240662 NR Description: expressed protein [Arabidopsis thaliana]
  misc_feature (159)..(292): NCBI GI NO: 15232126 NR Description: expressed protein [Arabidopsis thaliana]
  misc_feature (184)..(292): NCBI GI NO: 15237494 NR Description: hypothetical protein [Arabidopsis thaliana]
  misc_feature (153)..(292): NCBI GI NO: 15237495 NR Description: hypothetical protein [Arabidopsis thaliana]
MERKGGCCLAPRYAAGAQAGQGWHMGRAMLKFRPIAPKPAVMAPAPMPAVPAGKGKGRRKAVAGPGGTGRRGRKPKKQATVAAPTTQKLDYVQDKPLSSPSSSSSGMTSVDSSPPPPLPLMPVLPAEEGFGGAAPVANLAPAHVAGLVLPPQALRQAVSWVTVEDVTGIWRDGEAPYAAACGGDEAPTFVSDQCGRVTWTNVAFNRAVSGREDVDAAMAPSAAASEVRVVLAAKDGAPVPAWGSCAGFTCRVRVPYACPRRGSLVAPCDVWRLDAGGYLWRLDLQATLSLSLGGFI

SEQ ID NO: 15749 - protein, 272 aa, Triticum aestivum
  peptide (1)..(272): Ceres Seq. ID no. 13597700
  misc_feature (1)..(266): NCBI GI NO: 18408645 NR Description: expressed protein [Arabidopsis thaliana]
  misc_feature (1)..(266): NCBI GI NO: 21537225 NR Description: unknown [Arabidopsis thaliana]
  misc_feature (1)..(266): NCBI GI NO: 15242729 NR Description: expressed protein [Arabidopsis thaliana]
  misc_feature (1)..(266): NCBI GI NO: 15240662 NR Description: expressed protein [Arabidopsis thaliana]
  misc_feature (135)..(268): NCBI GI NO: 15232126 NR Description: expressed protein [Arabidopsis thaliana]
  misc_feature (160)..(268): NCBI GI NO: 15237494 NR Description: hypothetical protein [Arabidopsis thaliana]
  misc_feature (129)..(268): NCBI GI NO: 15237495 NR Description: hypothetical protein [Arabidopsis thaliana]
MGRAMLKFRPIAPKPAVMAPAPMPAVPAGKGKGRRKAVAGPGGTGRRGRKPKKQATVAAPTTQKLDYVQDKPLSSPSSSSSGMTSVDSSPPPPLPLMPVLPAEEGFGGAAPVANLAPAHVAGLVLPPQALRQAVSWVTVEDVTGIWRDGEAPYAAACGGDEAPTFVSDQCGRVTWTNVAFNRAVSGREDVDAAMAPSAAASEVRVVLAAKDGAPVPAWGSCAGFTCRVRVPYACPRRGSLVAPCDVWRLDAGGYLWRLDLQATLSLSLGGFI

SEQ ID NO: 15750 - DNA, 550 bp, Triticum aestivum
  misc_feature (1)..(550): Ceres Seq. ID no. 13656096
aaaccacacccaaacacgtagtgcacctcctccactaaaagatcatcagccttcagcagagctacactagctccaagccaccgagagaaaaatggccggcttctcgtgcacgagcacgagccatgctgcagttgcactggtttcggcgctgctgctgagcctcgcgcacggcttgctgggggctcatggagccaggaggctcatggagctgtacaagccggaccccagcgagctcctcacttaccacaacggcgccgtgctgcagggcgccatcccggtcaccgtgctctggtacggccgcttcacgccggtccagaaggccgtcgtctccgacttcctcctctcgctcaccgccgcctccccggcgccgaccccgtccgtctcgcagtggtggggcaccatcgcccagctctacctctccaaggccaagggcgccaacgccaagcgcgcgacgcaggtagcgctcgccgggcaggtctccgaagagcgctgctcgctcgggaagagcctcgcgctgcccccaagctcgcggcgctggccgccagggcca

SEQ ID NO: 15751 - protein, 153 aa, Triticum aestivum
  peptide (1)..(153): Ceres Seq. ID no. 13656097
  misc_feature (49)..(141): Pfam Name: Pfam Description:  Phosphate-induced protein 1 conserved region
  misc_feature (40)..(141): NCBI GI NO: 37533672 NR Description: putative phosphate-induced protein
  misc_feature (8)..(140): NCBI GI NO: 3759184 NR Description: phi-1 [Nicotiana tabacum]
  misc_feature (15)..(140): NCBI GI NO: 21593043 NR Description: putative phi-1-like phosphate-induced protein
  misc_feature (16)..(140): NCBI GI NO: 15236667 NR Description: phi-1 phosphate-induced protein -related
  misc_feature (15)..(140): NCBI GI NO: 31074969 NR Description: erg-1 [Solanum tuberosum]
  misc_feature (51)..(140): NCBI GI NO: 11762144 NR Description: At1g35140 [Arabidopsis thaliana]
  misc_feature (51)..(140): NCBI GI NO: 15219504 NR Description: phosphate-induced (phi-1) protein -related
  misc_feature (48)..(143): NCBI GI NO: 15237656 NR Description: phi-1-related protein [Arabidopsis thaliana]
  misc_feature (49)..(140): NCBI GI NO: 18403760 NR Description: expressed protein [Arabidopsis thaliana]
  misc_feature (49)..(140): NCBI GI NO: 25408357 NR Description: hypothetical protein At2g35150
MAGFSCTSTSHAAVALVSALLLSLAHGLLGAHGARRLMELYKPDPSELLTYHNGAVLQGAIPVTVLWYGRFTPVQKAVVSDFLLSLTAASPAPTPSVSQWWGTIAQLYLSKAKGANAKRATQVALAGQVSEERCSLGKSLALPPSSRRWPPGP

SEQ ID NO: 15752 - protein, 116 aa, Triticum aestivum
  peptide (1)..(116): Ceres Seq. ID no. 13656098
  misc_feature (12)..(104): Pfam Name: Pfam Description:  Phosphate-induced protein 1 conserved region
  misc_feature (3)..(104): NCBI GI NO: 37533672 NR Description: putative phosphate-induced protein
  misc_feature (1)..(103): NCBI GI NO: 3759184 NR Description: phi-1 [Nicotiana tabacum]
  misc_feature (1)..(103): NCBI GI NO: 21593043 NR Description: putative phi-1-like phosphate-induced protein
  misc_feature (1)..(103): NCBI GI NO: 15236667 NR Description: phi-1 phosphate-induced protein -related
  misc_feature (1)..(103): NCBI GI NO: 31074969 NR Description: erg-1 [Solanum tuberosum]
  misc_feature (14)..(103): NCBI GI NO: 11762144 NR Description: At1g35140 [Arabidopsis thaliana]
  misc_feature (14)..(103): NCBI GI NO: 15219504 NR Description: phosphate-induced (phi-1) protein -related
  misc_feature (11)..(106): NCBI GI NO: 15237656 NR Description: phi-1-related protein [Arabidopsis thaliana]
  misc_feature (12)..(103): NCBI GI NO: 18403760 NR Description: expressed protein [Arabidopsis thaliana]
  misc_feature (12)..(103): NCBI GI NO: 25408357 NR Description: hypothetical protein At2g35150
MELYKPDPSELLTYHNGAVLQGAIPVTVLWYGRFTPVQKAVVSDFLLSLTAASPAPTPSVSQWWGTIAQLYLSKAKGANAKRATQVALAGQVSEERCSLGKSLALPPSSRRWPPGP

SEQ ID NO: 15753 - protein, 91 aa, Triticum aestivum
  peptide (1)..(91): Ceres Seq. ID no. 13656099
  misc_feature (1)..(91): NCBI GI NO: 141449 NR Description: Hypothetical 35.5 kDa protein in transposon TN4556
  misc_feature (8)..(91): NCBI GI NO: 32699068 NR Description: hypothetical protein FLJ35107 [Homo sapiens]
  misc_feature (1)..(91): NCBI GI NO: 31203637 NR Description: ENSANGP00000015599 [Anopheles gambiae]
  misc_feature (12)..(91): NCBI GI NO: 13376335 NR Description: hypothetical protein FLJ14280 [Homo sapiens]
  misc_feature (1)..(91): NCBI GI NO: 30684163 NR Description: proline-rich protein -related
  misc_feature (1)..(91): NCBI GI NO: 9843651 NR Description: SRM102 [Arabidopsis thaliana]
  misc_feature (1)..(91): NCBI GI NO: 25408026 NR Description: probable proline-rich protein
  misc_feature (3)..(91): NCBI GI NO: 25143299 NR Description: pre-mRNA splicing SR protein related RSR-1 (68
  misc_feature (3)..(91): NCBI GI NO: 32699068 NR Description: hypothetical protein FLJ35107 [Homo sapiens]
  misc_feature (13)..(91): NCBI GI NO: 14719279 NR Description: MAP kinase kinase [Zea mays]
MEPGGSWSCTSRTPASSSLTTTAPCCRAPSRSPCSGTAASRRSRRPSSPTSSSRSPPPPRRRPRPSRSGGAPSPSSTSPRPRAPTPSARRR

SEQ ID NO: 15754 - DNA, 1993 bp, Triticum aestivum
  misc_feature (1)..(1993): Ceres Seq. ID no. 13585587
ttcagactcctccctctttcggtctctacgacacgtttctttctctctccctctcccctcggctaccaaggcgtctctctcttctccaaggaggctctcgatttgcatggacaagggccacctcggtggtggcggaggaggaggaggactgctagccctggacgcctcgccgcggcagctcggcttcttgaacttgctgtcgccggcgccgttccataggagcatggaggcggacgacggcggaggcggtggcggcggcggcagggggaggaggtccatcgaggttgacttcttttccgacgagaagaagaacatgaagaagagccgggcttcgtccggggccgacgcggaggaccacaaggatcaagcctccgccgccggactcgccatcaagaaggaggacctcaccattaacctccttcccgggaacaacacgaggagcgaccggtccatggtggtcgacgacgacggagcgtcccgggccgaccaagacaggaacggcaggaacaccggcgagctggcggtgatacaggccgagctgagccgcatgaacgaggagaaccagcggctgcgagggatgttgacccaggtcaacaacagctaccatgcgctgcagatgcatctcgtcgcgctcatgcagcaaaggacccagatgcctccggtccagccgcaacaacctccgacccacgaggatggcaagaacgagagtgccatcgtgccgaggcagttcctgggtctgggcccgtcgggagccagcgctgacgtggcggaagagccctccaactcgtccacggaggtcgggagcccgcggcggtcgtcgtccaacggaaacgaggaccctgagcgcggcgaaaaccctgacggcccgtccaccgcggggtggttgcccggacgcgggatgagccagcagcagcagcagcagctgggggcggcggcgaagggccacgaccagcaagcgcaggaggccaccatgaggaaggcccgtgtctccgttcgcgcccgatccgaagccccgattatcgccgatggatgccaatggaggaagtacggtcagaagatggccaagggaaacccttgcccacccgcctactaccggtgcaccatggccaccggctgcccggtgcgcaagcaggtgcaacgatgcgccgaggaccggaccatcctcatcaccacgtacgagggcacgcacaaccacccgctcccgccggccgccatggccatggcgtctaccacgtcggccgctgcgtccatgctgctctccggctccatgcccagcgccgacggcgcggggctcatgagctccaacttcctcgcgcgcaccgtgcttccgtgctcgtccagcatggccaccatctcggcgtccgcgccgttcccgacggtcacgctcgacctcacccacgccccgcccggggcgcccaacgccatgccgctaaacgtcgcccgaccgcatgcaccggggcagttccatgttccgatgcccggcggtgggatggccccggccttcgcgatgccgccgcacatgctgtacaaccagtccaagttctctgggctgcagatgtcctccgactcggtggacgccgggcagttcgcgcagcctaggccgccgatgggcctgccaggccagctgtcagacaccgtcagcgcagcggcggctgcgatcaccgcggacccgaacttcaccgtggcgctcgcggcggccatctcgtcgatcatggccggccagcacgccgccggcaacagcaacgctaacaacagcaataataacaccagtaacaacaacgtgacgacgaccagtaacaacacgacgagcaacaacaccaacagcgagactcaatgaacggcttcgtcaagttcggaaagagttgagaaaccagatagctaggttgcaagttatacacggatggtgttccattcttctttggtcaggattagcttctcgagacgtttctttggttttgataccaagcattatatacgatcaccctttttcttt

SEQ ID NO: 15755 - protein, 611 aa, Triticum aestivum
  peptide (1)..(611): Ceres Seq. ID no. 13585588
  misc_feature (340)..(400): Pfam Name: Pfam Description:  WRKY DNA -binding domain
  misc_feature (74)..(611): NCBI GI NO: 34904618 NR Description: putative WRKY DNA binding protein
  misc_feature (172)..(611): NCBI GI NO: 5042446 NR Description: putative WRKY DNA binding protein
  misc_feature (94)..(601): NCBI GI NO: 18415833 NR Description: WRKY family transcription factor
  misc_feature (127)..(584): NCBI GI NO: 18407554 NR Description: WRKY family transcription factor
  misc_feature (94)..(591): NCBI GI NO: 15233516 NR Description: WRKY family transcription factor
  misc_feature (156)..(601): NCBI GI NO: 11357339 NR Description: hypothetical protein AT4g22070 - Arabidopsisthaliana
  misc_feature (137)..(362): NCBI GI NO: 25404372 NR Description: hypothetical protein F19K23.22
  misc_feature (378)..(584): NCBI GI NO: 25404372 NR Description: hypothetical protein F19K23.22
  misc_feature (42)..(611): NCBI GI NO: 34894308 NR Description: unnamed protein product
  misc_feature (345)..(584): NCBI GI NO: 13506739 NR Description: WRKY DNA-binding protein 6 [Arabidopsis thaliana]
SDSSLFRSLRHVSFSLPLPSATKASLSSPRRLSICMDKGHLGGGGGGGGLLALDASPRQLGFLNLLSPAPFHRSMEADDGGGGGGGGRGRRSIEVDFFSDEKKNMKKSRASSGADAEDHKDQASAAGLAIKKEDLTINLLPGNNTRSDRSMVVDDDGASRADQDRNGRNTGELAVIQAELSRMNEENQRLRGMLTQVNNSYHALQMHLVALMQQRTQMPPVQPQQPPTHEDGKNESAIVPRQFLGLGPSGASADVAEEPSNSSTEVGSPRRSSSNGNEDPERGENPDGPSTAGWLPGRGMSQQQQQQLGAAAKGHDQQAQEATMRKARVSVRARSEAPIIADGCQWRKYGQKMAKGNPCPPAYYRCTMATGCPVRKQVQRCAEDRTILITTYEGTHNHPLPPAAMAMASTTSAAASMLLSGSMPSADGAGLMSSNFLARTVLPCSSSMATISASAPFPTVTLDLTHAPPGAPNAMPLNVARPHAPGQFHVPMPGGGMAPAFAMPPHMLYNQSKFSGLQMSSDSVDAGQFAQPRPPMGLPGQLSDTVSAAAAAITADPNFTVALAAAISSIMAGQHAAGNSNANNSNNNTSNNNVTTTSNNTTSNNTNSETQ

SEQ ID NO: 15756 - protein, 576 aa, Triticum aestivum
  peptide (1)..(576): Ceres Seq. ID no. 13585589
  misc_feature (305)..(365): Pfam Name: Pfam Description:  WRKY DNA -binding domain
  misc_feature (39)..(576): NCBI GI NO: 34904618 NR Description: putative WRKY DNA binding protein
  misc_feature (137)..(576): NCBI GI NO: 5042446 NR Description: putative WRKY DNA binding protein
  misc_feature (59)..(566): NCBI GI NO: 18415833 NR Description: WRKY family transcription factor
  misc_feature (92)..(549): NCBI GI NO: 18407554 NR Description: WRKY family transcription factor
  misc_feature (59)..(556): NCBI GI NO: 15233516 NR Description: WRKY family transcription factor
  misc_feature (121)..(566): NCBI GI NO: 11357339 NR Description: hypothetical protein AT4g22070 - Arabidopsisthaliana
  misc_feature (102)..(327): NCBI GI NO: 25404372 NR Description: hypothetical protein F19K23.22
  misc_feature (343)..(549): NCBI GI NO: 25404372 NR Description: hypothetical protein F19K23.22
  misc_feature (7)..(576): NCBI GI NO: 34894308 NR Description: unnamed protein product
  misc_feature (310)..(549): NCBI GI NO: 13506739 NR Description: WRKY DNA-binding protein 6 [Arabidopsis thaliana]
MDKGHLGGGGGGGGLLALDASPRQLGFLNLLSPAPFHRSMEADDGGGGGGGGRGRRSIEVDFFSDEKKNMKKSRASSGADAEDHKDQASAAGLAIKKEDLTINLLPGNNTRSDRSMVVDDDGASRADQDRNGRNTGELAVIQAELSRMNEENQRLRGMLTQVNNSYHALQMHLVALMQQRTQMPPVQPQQPPTHEDGKNESAIVPRQFLGLGPSGASADVAEEPSNSSTEVGSPRRSSSNGNEDPERGENPDGPSTAGWLPGRGMSQQQQQQLGAAAKGHDQQAQEATMRKARVSVRARSEAPIIADGCQWRKYGQKMAKGNPCPPAYYRCTMATGCPVRKQVQRCAEDRTILITTYEGTHNHPLPPAAMAMASTTSAAASMLLSGSMPSADGAGLMSSNFLARTVLPCSSSMATISASAPFPTVTLDLTHAPPGAPNAMPLNVARPHAPGQFHVPMPGGGMAPAFAMPPHMLYNQSKFSGLQMSSDSVDAGQFAQPRPPMGLPGQLSDTVSAAAAAITADPNFTVALAAAISSIMAGQHAAGNSNANNSNNNTSNNNVTTTSNNTTSNNTNSETQ

SEQ ID NO: 15757 - protein, 537 aa, Triticum aestivum
  peptide (1)..(537): Ceres Seq. ID no. 13585590
  misc_feature (266)..(326): Pfam Name: Pfam Description:  WRKY DNA -binding domain
  misc_feature (1)..(537): NCBI GI NO: 34904618 NR Description: putative WRKY DNA binding protein
  misc_feature (98)..(537): NCBI GI NO: 5042446 NR Description: putative WRKY DNA binding protein
  misc_feature (20)..(527): NCBI GI NO: 18415833 NR Description: WRKY family transcription factor
  misc_feature (53)..(510): NCBI GI NO: 18407554 NR Description: WRKY family transcription factor
  misc_feature (20)..(517): NCBI GI NO: 15233516 NR Description: WRKY family transcription factor
  misc_feature (82)..(527): NCBI GI NO: 11357339 NR Description: hypothetical protein AT4g22070 - Arabidopsisthaliana
  misc_feature (63)..(288): NCBI GI NO: 25404372 NR Description: hypothetical protein F19K23.22
  misc_feature (304)..(510): NCBI GI NO: 25404372 NR Description: hypothetical protein F19K23.22
  misc_feature (1)..(537): NCBI GI NO: 34894308 NR Description: unnamed protein product
  misc_feature (271)..(510): NCBI GI NO: 13506739 NR Description: WRKY DNA-binding protein 6 [Arabidopsis thaliana]
MEADDGGGGGGGGRGRRSIEVDFFSDEKKNMKKSRASSGADAEDHKDQASAAGLAIKKEDLTINLLPGNNTRSDRSMVVDDDGASRADQDRNGRNTGELAVIQAELSRMNEENQRLRGMLTQVNNSYHALQMHLVALMQQRTQMPPVQPQQPPTHEDGKNESAIVPRQFLGLGPSGASADVAEEPSNSSTEVGSPRRSSSNGNEDPERGENPDGPSTAGWLPGRGMSQQQQQQLGAAAKGHDQQAQEATMRKARVSVRARSEAPIIADGCQWRKYGQKMAKGNPCPPAYYRCTMATGCPVRKQVQRCAEDRTILITTYEGTHNHPLPPAAMAMASTTSAAASMLLSGSMPSADGAGLMSSNFLARTVLPCSSSMATISASAPFPTVTLDLTHAPPGAPNAMPLNVARPHAPGQFHVPMPGGGMAPAFAMPPHMLYNQSKFSGLQMSSDSVDAGQFAQPRPPMGLPGQLSDTVSAAAAAITADPNFTVALAAAISSIMAGQHAAGNSNANNSNNNTSNNNVTTTSNNTTSNNTNSETQ

SEQ ID NO: 15758 - DNA, 1188 bp, Triticum aestivum
  misc_feature (1)..(1188): Ceres Seq. ID no. 12586854
gtcgcagaacagtccgccacgcgaacaccacagcccaaacctcgcgaaccaaaccctgcacagcagatggcgcccgtggcgggcagcagcttctttcaggaagcgcggctcccggagcagcgggccgtcgagggcgtcgccttccccgcggtgctcgtcccgaccgccgggcccccggggccgggagaggggagcctcgacgagttcctggccgccgtgcggtcggagcgggcgtcccgggtggagccgctgctgcgggaggcaggggcggtgctgctgcgggggttccccgcgcggacggcggcggacttcgacgccgccgtggaggcgttcgggtacgaggagctgccgtacgtcggcggcgcggcgccccggaccaacgtggtggggcgggtgttcaccgccaacgagtcgccgcccgaccagaagatccccttccaccatgagatggcgcaggttccgacttttccggcaaaactgttcttcttctgtgaggtagaaccaaaaagtggtggagagacaccaatagtgctgagccactatgtgtataagaggatgaaggaaaacttccctgaatttgtggagaaattggagaagcatggcctgatatacacaagggtattgggagagggtgacgacccatcttctccaatcggccgtggatggcaatctacatttctcactaaagataaatccgttgccgaggaaagggctgcgaagcttgggatgaagctggaatggacccacgacggggttaaaacagtgatgggtccaataccagcagtcaagtgggacgagagccgagggaggaagatatggttcaacagcatggtcgccgcctacacagggtggaaggacgcccgcaatgatccagttaaggccgtcaccttcggcgacggctcgcccttgcccgccgatgtcatagaggaatgtggcaagatcctagaagaagaatgcgtcgcggttccatggcagcaaggtgacatccttctcatcgacaactgggcggtgctgcactcacggcggtcctttgagcccccacggcgcgtacttgcttctctctgtaaatagcatgtaaatgttcgacattagagatgaggctttgctcgggattgatccgcacttctgcgggttgtatgtaccatgtacgtgatcggatttgcacatacaaaactggaataattttgt

SEQ ID NO: 15759 - protein, 356 aa, Triticum aestivum
  peptide (1)..(356): Ceres Seq. ID no. 12586855
  misc_feature (23)..(354): NCBI GI NO: 34906388 NR Description: P0710E05.6
  misc_feature (34)..(356): NCBI GI NO: 15232542 NR Description: unknown protein; protein id: At3g21360.1
  misc_feature (59)..(356): NCBI GI NO: 26990914 NR Description: syrP protein, putative [Pseudomonas putida KT2440]
  misc_feature (85)..(356): NCBI GI NO: 23128425 NR Description: hypothetical protein [Nostoc punctiforme]
  misc_feature (44)..(354): NCBI GI NO: 26541507 NR Description: putative regulatory protein
  misc_feature (53)..(356): NCBI GI NO: 22985582 NR Description: hypothetical protein [Burkholderia fungorum]
  misc_feature (76)..(356): NCBI GI NO: 23468981 NR Description: hypothetical protein
  misc_feature (59)..(356): NCBI GI NO: 23106239 NR Description: hypothetical protein [Azotobacter vinelandii]
  misc_feature (63)..(354): NCBI GI NO: 29830181 NR Description: putative SyrP-like protein
  misc_feature (76)..(356): NCBI GI NO: 28869349 NR Description: pyoverdine biosynthesis regulatory gene, putative
VAEQSATRTPQPKPREPNPAQQMAPVAGSSFFQEARLPEQRAVEGVAFPAVLVPTAGPPGPGEGSLDEFLAAVRSERASRVEPLLREAGAVLLRGFPARTAADFDAAVEAFGYEELPYVGGAAPRTNVVGRVFTANESPPDQKIPFHHEMAQVPTFPAKLFFFCEVEPKSGGETPIVLSHYVYKRMKENFPEFVEKLEKHGLIYTRVLGEGDDPSSPIGRGWQSTFLTKDKSVAEERAAKLGMKLEWTHDGVKTVMGPIPAVKWDESRGRKIWFNSMVAAYTGWKDARNDPVKAVTFGDGSPLPADVIEECGKILEEECVAVPWQQGDILLIDNWAVLHSRRSFEPPRRVLASLCK

SEQ ID NO: 15760 - protein, 334 aa, Triticum aestivum
  peptide (1)..(334): Ceres Seq. ID no. 12586856
  misc_feature (1)..(332): NCBI GI NO: 34906388 NR Description: P0710E05.6
  misc_feature (12)..(334): NCBI GI NO: 15232542 NR Description: unknown protein; protein id: At3g21360.1
  misc_feature (37)..(334): NCBI GI NO: 26990914 NR Description: syrP protein, putative [Pseudomonas putida KT2440]
  misc_feature (63)..(334): NCBI GI NO: 23128425 NR Description: hypothetical protein [Nostoc punctiforme]
  misc_feature (22)..(332): NCBI GI NO: 26541507 NR Description: putative regulatory protein
  misc_feature (31)..(334): NCBI GI NO: 22985582 NR Description: hypothetical protein [Burkholderia fungorum]
  misc_feature (54)..(334): NCBI GI NO: 23468981 NR Description: hypothetical protein
  misc_feature (37)..(334): NCBI GI NO: 23106239 NR Description: hypothetical protein [Azotobacter vinelandii]
  misc_feature (41)..(332): NCBI GI NO: 29830181 NR Description: putative SyrP-like protein
  misc_feature (54)..(334): NCBI GI NO: 28869349 NR Description: pyoverdine biosynthesis regulatory gene, putative
MAPVAGSSFFQEARLPEQRAVEGVAFPAVLVPTAGPPGPGEGSLDEFLAAVRSERASRVEPLLREAGAVLLRGFPARTAADFDAAVEAFGYEELPYVGGAAPRTNVVGRVFTANESPPDQKIPFHHEMAQVPTFPAKLFFFCEVEPKSGGETPIVLSHYVYKRMKENFPEFVEKLEKHGLIYTRVLGEGDDPSSPIGRGWQSTFLTKDKSVAEERAAKLGMKLEWTHDGVKTVMGPIPAVKWDESRGRKIWFNSMVAAYTGWKDARNDPVKAVTFGDGSPLPADVIEECGKILEEECVAVPWQQGDILLIDNWAVLHSRRSFEPPRRVLASLCK

SEQ ID NO: 15761 - protein, 207 aa, Triticum aestivum
  peptide (1)..(207): Ceres Seq. ID no. 12586857
  misc_feature (1)..(205): NCBI GI NO: 34906388 NR Description: P0710E05.6
  misc_feature (1)..(207): NCBI GI NO: 15232542 NR Description: unknown protein; protein id: At3g21360.1
  misc_feature (1)..(207): NCBI GI NO: 26990914 NR Description: syrP protein, putative [Pseudomonas putida KT2440]
  misc_feature (1)..(207): NCBI GI NO: 23128425 NR Description: hypothetical protein [Nostoc punctiforme]
  misc_feature (1)..(205): NCBI GI NO: 26541507 NR Description: putative regulatory protein
  misc_feature (1)..(207): NCBI GI NO: 22985582 NR Description: hypothetical protein [Burkholderia fungorum]
  misc_feature (1)..(207): NCBI GI NO: 23468981 NR Description: hypothetical protein
  misc_feature (1)..(207): NCBI GI NO: 23106239 NR Description: hypothetical protein [Azotobacter vinelandii]
  misc_feature (1)..(205): NCBI GI NO: 29830181 NR Description: putative SyrP-like protein
  misc_feature (1)..(207): NCBI GI NO: 28869349 NR Description: pyoverdine biosynthesis regulatory gene, putative
MAQVPTFPAKLFFFCEVEPKSGGETPIVLSHYVYKRMKENFPEFVEKLEKHGLIYTRVLGEGDDPSSPIGRGWQSTFLTKDKSVAEERAAKLGMKLEWTHDGVKTVMGPIPAVKWDESRGRKIWFNSMVAAYTGWKDARNDPVKAVTFGDGSPLPADVIEECGKILEEECVAVPWQQGDILLIDNWAVLHSRRSFEPPRRVLASLCK

SEQ ID NO: 15762 - DNA, 1402 bp, Triticum aestivum
  misc_feature (1)..(1402): Ceres Seq. ID no. 13662846
atccttcttctcactctcaggtctcagcgcgcccatcctctgccccttgggcgtctggtctggatccaagagccggccgccaactgcaatgccgtccctcctggagatcttcctgggatcctgttcctcctcggcgccgccggtggactgggaggcggaggcctacccggagtacgccgactacgccgtcctccccctgctcctcgccttcttccccgccctgcgcctcctcctcaaccagttcctcttcgaggtgttagcaagacgacttatatttggaaagggatatgacaagcttgctgaaacagatgaaaggagaaagaaaatcaataaatttaaggaatcggcatggaaatttgtttattatctttctgcagaactcttttcactatctgtaacatacaatgaatcgtggtttacaaatacaagatacttttgggtagggcctggcgagcagctgtggcccgaccaaaagatgaagctgaagcttaaggctgtatacatgtatgccgctggattttacgtatattctatctttgatcttctgttctgggaaacaagacgcaaggacttcggagtcatgatgtctcaccatgtggcaactattgttctgattgttgtgtcctatatttgcagattatctcgtcctggctcggtcattttacccctccatgatgcaagtgatatattcctagagattggaaagatggccaagtacagtagctgtgagtggctagctgttgtagcatttctactttttgtggcttcatggatccttcttcggctaatagtgtttcctttctggatcctaagaagcacaagttatgaaatagctatgatcgtggacaacgagaacagaaaaatctacagaacttcgtactactatcttttcaacactctcttgttttcacttctggtctttcacatatattggtgggtactgatttatcggatgctcgtcaaacaaattcaatccagaggtcatgttggtgaggatgtccgatccgattctgaaggcgaaaacaaccatgaagattaagctgaaggttgttggatgcttaactgaagaactgtatagttcgcagttgggaatgagaatggtgcaagcgggttgtataaagaatgagaatgtcaaggaggagctagttagcatatccattagtaggaaattcaggcacaaaacgaaaactgaaaaggctcgaatctcggtgccactggaacaagcctccttgatatgtatcttttttgtatattgaatgtataaggtgaggctatcattcagggtcttgaggcatcaatcatacatcgtgatattaatctccatatgtatgtgaagatgtcttttcagaaatactgagcctccgagttataaaaattctcttttatatatgtggtttgcttg

SEQ ID NO: 15763 - protein, 345 aa, Triticum aestivum
  peptide (1)..(345): Ceres Seq. ID no. 13662847
  misc_feature (130)..(341): Pfam Name: LAG1 Pfam Description: Longevity-assurance protein
  misc_feature (44)..(345): NCBI GI NO: 25518747 NR Description: hypothetical protein F13B4
  misc_feature (48)..(345): NCBI GI NO: 16974114 NR Description: putative resistance protein
  misc_feature (44)..(345): NCBI GI NO: 18404559 NR Description: LAG1 homolog 1 [Arabidopsis thaliana]
  misc_feature (45)..(345): NCBI GI NO: 7688742 NR Description: ASC1 [Lycopersicon esculentum]
  misc_feature (44)..(275): NCBI GI NO: 30683361 NR Description: longevity assurance protein -related
  misc_feature (64)..(342): NCBI GI NO: 15230323 NR Description: longevity factor-related protein
  misc_feature (64)..(342): NCBI GI NO: 7658241 NR Description: LAG1 homolog 2 [Arabidopsis thaliana]
  misc_feature (56)..(340): NCBI GI NO: 34901974 NR Description: unknown protein
  misc_feature (44)..(160): NCBI GI NO: 8920562 NR Description: Contains similarity to LAG1 homolog 1 fromArabidopsis thaliana gb|AF198179
  misc_feature (104)..(345): NCBI GI NO: 24119257 NR Description: trh3 protein [Danio rerio]
SFFSLSGLSAPILCPLGVWSGSKSRPPTAMPSLLEIFLGSCSSSAPPVDWEAEAYPEYADYAVLPLLLAFFPALRLLLNQFLFEVLARRLIFGKGYDKLAETDERRKKINKFKESAWKFVYYLSAELFSLSVTYNESWFTNTRYFWVGPGEQLWPDQKMKLKLKAVYMYAAGFYVYSIFDLLFWETRRKDFGVMMSHHVATIVLIVVSYICRLSRPGSVILPLHDASDIFLEIGKMAKYSSCEWLAVVAFLLFVASWILLRLIVFPFWILRSTSYEIAMIVDNENRKIYRTSYYYLFNTLLFSLLVFHIYWWVLIYRMLVKQIQSRGHVGEDVRSDSEGENNHED

SEQ ID NO: 15764 - protein, 316 aa, Triticum aestivum
  peptide (1)..(316): Ceres Seq. ID no. 13662848
  misc_feature (101)..(312): Pfam Name: LAG1 Pfam Description: Longevity-assurance protein
  misc_feature (15)..(316): NCBI GI NO: 25518747 NR Description: hypothetical protein F13B4
  misc_feature (19)..(316): NCBI GI NO: 16974114 NR Description: putative resistance protein
  misc_feature (15)..(316): NCBI GI NO: 18404559 NR Description: LAG1 homolog 1 [Arabidopsis thaliana]
  misc_feature (16)..(316): NCBI GI NO: 7688742 NR Description: ASC1 [Lycopersicon esculentum]
  misc_feature (15)..(246): NCBI GI NO: 30683361 NR Description: longevity assurance protein -related
  misc_feature (35)..(313): NCBI GI NO: 15230323 NR Description: longevity factor-related protein
  misc_feature (35)..(313): NCBI GI NO: 7658241 NR Description: LAG1 homolog 2 [Arabidopsis thaliana]
  misc_feature (27)..(311): NCBI GI NO: 34901974 NR Description: unknown protein
  misc_feature (15)..(131): NCBI GI NO: 8920562 NR Description: Contains similarity to LAG1 homolog 1 fromArabidopsis thaliana gb|AF198179
  misc_feature (75)..(316): NCBI GI NO: 24119257 NR Description: trh3 protein [Danio rerio]
MPSLLEIFLGSCSSSAPPVDWEAEAYPEYADYAVLPLLLAFFPALRLLLNQFLFEVLARRLIFGKGYDKLAETDERRKKINKFKESAWKFVYYLSAELFSLSVTYNESWFTNTRYFWVGPGEQLWPDQKMKLKLKAVYMYAAGFYVYSIFDLLFWETRRKDFGVMMSHHVATIVLIVVSYICRLSRPGSVILPLHDASDIFLEIGKMAKYSSCEWLAVVAFLLFVASWILLRLIVFPFWILRSTSYEIAMIVDNENRKIYRTSYYYLFNTLLFSLLVFHIYWWVLIYRMLVKQIQSRGHVGEDVRSDSEGENNHED

SEQ ID NO: 15765 - protein, 187 aa, Triticum aestivum
  peptide (1)..(187): Ceres Seq. ID no. 13662849
  misc_feature (1)..(183): Pfam Name: LAG1 Pfam Description: Longevity-assurance protein
  misc_feature (1)..(187): NCBI GI NO: 25518747 NR Description: hypothetical protein F13B4
  misc_feature (1)..(187): NCBI GI NO: 16974114 NR Description: putative resistance protein
  misc_feature (1)..(187): NCBI GI NO: 18404559 NR Description: LAG1 homolog 1 [Arabidopsis thaliana]
  misc_feature (1)..(187): NCBI GI NO: 7688742 NR Description: ASC1 [Lycopersicon esculentum]
  misc_feature (1)..(117): NCBI GI NO: 30683361 NR Description: longevity assurance protein -related
  misc_feature (1)..(184): NCBI GI NO: 15230323 NR Description: longevity factor-related protein
  misc_feature (1)..(184): NCBI GI NO: 7658241 NR Description: LAG1 homolog 2 [Arabidopsis thaliana]
  misc_feature (1)..(182): NCBI GI NO: 34901974 NR Description: unknown protein
  misc_feature (1)..(187): NCBI GI NO: 24119257 NR Description: trh3 protein [Danio rerio]
  misc_feature (1)..(187): NCBI GI NO: 27769146 NR Description: Similar to RIKEN cDNA 0610013I17 gene
MKLKLKAVYMYAAGFYVYSIFDLLFWETRRKDFGVMMSHHVATIVLIVVSYICRLSRPGSVILPLHDASDIFLEIGKMAKYSSCEWLAVVAFLLFVASWILLRLIVFPFWILRSTSYEIAMIVDNENRKIYRTSYYYLFNTLLFSLLVFHIYWWVLIYRMLVKQIQSRGHVGEDVRSDSEGENNHED

SEQ ID NO: 15766 - DNA, 798 bp, Triticum aestivum
  misc_feature (1)..(798): Ceres Seq. ID no. 13598579
cctaattcgctagctcgctctcgctcccgctgccgctctcaagctacctggcttctagctagctagggttcgtctacggaagctgaccgcgagctggctggccggagagaccgagcagctccgcgcgccgcagcgggcctggagctgcctagctagcaaagctcggtggagttcttgtgaagctagctagcggacgatcgaaagccgatcgacgatgcgcctcgtcgtcggaggtcacgtgagatgatgagcggcaacaaccagcaccagcagtcggcggcggcggcggcggcggaggaggagcaggagctagcgcggaagcacgcggccgcggtggctacgtcgcggcaatggtcgtcgcagacggagtcacggatagtgcgcgtgtcgcgcgtcttcggcggcaaggaccgccacagcaaggtgaagaccgtcaagggtctccgcgaccggcgcgtgcggctgtccgtgcagacggcgatccagctctacgacctgcaggaccggctgggccttaaccagcccagcaaggtcgtcgactggctgctcaacgcggcccgccacgagatcgacaagctgccgccgctccagttcccgccgcaccaggtcgacctcatggaccacatgatgacctcctcctccatgccactcatgccgcacgtcgatgacaagttctgccactttgcgtccacgctcgcccgagatggtggcgtcaaggccggggccgacgctgacggcggtggagctcaccacaacattgggaggttcggctaccaccggttcatggggctcaacaac

SEQ ID NO: 15767 - protein, 185 aa, Triticum aestivum
  peptide (1)..(185): Ceres Seq. ID no. 13598580
  misc_feature (38)..(167): Pfam Name: Pfam Description:  TCP family transcription factor
  misc_feature (1)..(167): NCBI GI NO: 34909780 NR Description: P0512C01.32
  misc_feature (23)..(118): NCBI GI NO: 15239489 NR Description: TCP family transcription factor, putative
  misc_feature (1)..(178): NCBI GI NO: 18396089 NR Description: TCP family transcription factor TFPD
  misc_feature (1)..(178): NCBI GI NO: 30678498 NR Description: TCP family transcription factor TFPD
  misc_feature (25)..(123): NCBI GI NO: 15241512 NR Description: TCP family transcription factor, putative
  misc_feature (35)..(141): NCBI GI NO: 33146716 NR Description: putative transcription factor PCF6
  misc_feature (18)..(115): NCBI GI NO: 18397402 NR Description: TCP family transcription factor, putative
  misc_feature (36)..(131): NCBI GI NO: 7486304 NR Description: hypothetical protein F28J12
  misc_feature (36)..(131): NCBI GI NO: 18415079 NR Description: TCP family transcription factor, putative
  misc_feature (43)..(131): NCBI GI NO: 25369264 NR Description: probable basic helix-loop-helix DNA binding proteinTCP2
MMSGNNQHQQSAAAAAAEEEQELARKHAAAVATSRQWSSQTESRIVRVSRVFGGKDRHSKVKTVKGLRDRRVRLSVQTAIQLYDLQDRLGLNQPSKVVDWLLNAARHEIDKLPPLQFPPHQVDLMDHMMTSSSMPLMPHVDDKFCHFASTLARDGGVKAGADADGGGAHHNIGRFGYHRFMGLNN

SEQ ID NO: 15768 - protein, 184 aa, Triticum aestivum
  peptide (1)..(184): Ceres Seq. ID no. 13598581
  misc_feature (37)..(166): Pfam Name: Pfam Description:  TCP family transcription factor
  misc_feature (1)..(166): NCBI GI NO: 34909780 NR Description: P0512C01.32
  misc_feature (22)..(117): NCBI GI NO: 15239489 NR Description: TCP family transcription factor, putative
  misc_feature (1)..(177): NCBI GI NO: 18396089 NR Description: TCP family transcription factor TFPD
  misc_feature (1)..(177): NCBI GI NO: 30678498 NR Description: TCP family transcription factor TFPD
  misc_feature (24)..(122): NCBI GI NO: 15241512 NR Description: TCP family transcription factor, putative
  misc_feature (34)..(140): NCBI GI NO: 33146716 NR Description: putative transcription factor PCF6
  misc_feature (17)..(114): NCBI GI NO: 18397402 NR Description: TCP family transcription factor, putative
  misc_feature (35)..(130): NCBI GI NO: 7486304 NR Description: hypothetical protein F28J12
  misc_feature (35)..(130): NCBI GI NO: 18415079 NR Description: TCP family transcription factor, putative
  misc_feature (42)..(130): NCBI GI NO: 25369264 NR Description: probable basic helix-loop-helix DNA binding proteinTCP2
MSGNNQHQQSAAAAAAEEEQELARKHAAAVATSRQWSSQTESRIVRVSRVFGGKDRHSKVKTVKGLRDRRVRLSVQTAIQLYDLQDRLGLNQPSKVVDWLLNAARHEIDKLPPLQFPPHQVDLMDHMMTSSSMPLMPHVDDKFCHFASTLARDGGVKAGADADGGGAHHNIGRFGYHRFMGLNN

SEQ ID NO: 15769 - DNA, 1140 bp, Triticum aestivum
  misc_feature (1)..(1140): Ceres Seq. ID no. 13585461
aatcgagcacgccgtccacttccgaggtcgcgtgcgtggatagggtttgcttcgccgccgtcccgccgactgcgcctccccggccctcatcgtcgcgccaccgccggggagaccaggccaccaccagccgagccaccgatcgatcgatcgaccgaggcggtgatggcgcaccagatccccaaggtcgcgcacaccctcgtcgagatcgccgaggtcgcgcgctacgcctacgagcaccgctccggccacgctccggaccacgacggcgccacggcgctggccgccgacggggaggaggccgcgcggctgcgggcggagaacgccgtcctccgcgcccgcctcgcggacgacctcgccctccttcgcgagcttcagggcgcgccctttgtttcccaggagtgccctcccgacttgcataatcgtcttgtagcatcagtcaacaatgctggcttccttgctcatcttgagaaagtacgagacgagccgctgcatcaacataccaaactatctattggcggtgtgacagaggtggatattggagatattccttacactaaagatgaggggaagactgggtcatggctcttggtttcctgtgacactgctgggggcaatttggaggaaattagtggaattgatgacgaaaattatgtgatggttaatgaagatgacatcgtcgatgctattgctacctttgttgctaggtgcattcttgaagatccaaagtccaagtcattatcatcgaaagagctgcaaaaagctgttgcatcggcattgagcagcatgacagaccggaagaaatggataagtttctgggaggctggaaaggtgatttacatactggcaacttgggggatcacaatagcagggctgtacaggagtcgtgctgtcctgaagatggcagccaaaggagctgtcgtctccaccaaatttatcatgaaggcattgtgaggtgccaagtgccgaatagtggcatcatgatcacacgcaacggtcagcaagttgtaaatacaaactcatcgtgtcaactgtacatatgtgttgtgtgatatgatttatctgagaactattcgttggtcagatgtgctgtaacttctgaaatgataacgatttctctcatcgtgtatgaataatgggggc

SEQ ID NO: 15770 - protein, 316 aa, Triticum aestivum
  peptide (1)..(316): Ceres Seq. ID no. 13585462
  misc_feature (55)..(307): NCBI GI NO: 19033559 NR Description: putative growth factor
  misc_feature (56)..(316): NCBI GI NO: 15219442 NR Description: expressed protein [Arabidopsis thaliana]
  misc_feature (56)..(316): NCBI GI NO: 25373234 NR Description: hypothetical protein T12C22.4
  misc_feature (191)..(314): NCBI GI NO: 30686591 NR Description: expressed protein [Arabidopsis thaliana]
  misc_feature (191)..(314): NCBI GI NO: 30695733 NR Description: expressed protein [Arabidopsis thaliana]
NRARRPLPRSRAWIGFASPPSRRLRLPGPHRRATAGETRPPPAEPPIDRSTEAVMAHQIPKVAHTLVEIAEVARYAYEHRSGHAPDHDGATALAADGEEAARLRAENAVLRARLADDLALLRELQGAPFVSQECPPDLHNRLVASVNNAGFLAHLEKVRDEPLHQHTKLSIGGVTEVDIGDIPYTKDEGKTGSWLLVSCDTAGGNLEEISGIDDENYVMVNEDDIVDAIATFVARCILEDPKSKSLSSKELQKAVASALSSMTDRKKWISFWEAGKVIYILATWGITIAGLYRSRAVLKMAAKGAVVSTKFIMKAL

SEQ ID NO: 15771 - protein, 262 aa, Triticum aestivum
  peptide (1)..(262): Ceres Seq. ID no. 13585463
  misc_feature (1)..(253): NCBI GI NO: 19033559 NR Description: putative growth factor
  misc_feature (2)..(262): NCBI GI NO: 15219442 NR Description: expressed protein [Arabidopsis thaliana]
  misc_feature (2)..(262): NCBI GI NO: 25373234 NR Description: hypothetical protein T12C22.4
  misc_feature (137)..(260): NCBI GI NO: 30686591 NR Description: expressed protein [Arabidopsis thaliana]
  misc_feature (137)..(260): NCBI GI NO: 30695733 NR Description: expressed protein [Arabidopsis thaliana]
MAHQIPKVAHTLVEIAEVARYAYEHRSGHAPDHDGATALAADGEEAARLRAENAVLRARLADDLALLRELQGAPFVSQECPPDLHNRLVASVNNAGFLAHLEKVRDEPLHQHTKLSIGGVTEVDIGDIPYTKDEGKTGSWLLVSCDTAGGNLEEISGIDDENYVMVNEDDIVDAIATFVARCILEDPKSKSLSSKELQKAVASALSSMTDRKKWISFWEAGKVIYILATWGITIAGLYRSRAVLKMAAKGAVVSTKFIMKAL

SEQ ID NO: 15772 - DNA, 426 bp, Triticum aestivum
  misc_feature (1)..(426): Ceres Seq. ID no. 13655970
acaagcccaccaccattgcactcgaaagcttcagctcaagctcaagctccacatcaacaatggcgagcagcagctcaatgctggccgtcctagccaccctggccctgctgctctccccagccgcctcagccctgtcgtccacgctgtccccggacttccacgcggagacgtgcccgcagctggacggcatcgtgcgcgcggcggtgcaggccgccctcacgagcgaaatcgccatcgccgctggcctcgtccgcatctacttccacgactgcttcccgcagggctgcgacgcctccatcctcctcaactccacctccgcccgcgagacggcgctgggccccaacctcagcatccagccgcgcgccatgcagctcgtcgagtccatccgctccacggcgcacgccgcctgcgggcccgttgtctcct

SEQ ID NO: 15773 - protein, 141 aa, Triticum aestivum
  peptide (1)..(141): Ceres Seq. ID no. 13655971
QAHHHCTRKLQLKLKLHINNGEQQLNAGRPSHPGPAALPSRLSPVVHAVPGLPRGDVPAAGRHRARGGAGRPHERNRHRRWPRPHLLPRLLPAGLRRLHPPQLHLRPRDGAGPQPQHPAARHAARRVHPLHGARRLRARCL

SEQ ID NO: 15774 - protein, 141 aa, Triticum aestivum
  peptide (1)..(141): Ceres Seq. ID no. 13655972
  misc_feature (64)..(140): Pfam Name: Pfam Description:  Peroxidase
  misc_feature (20)..(140): NCBI GI NO: 38345511 NR Description: OSJNBa0039K24.14
  misc_feature (16)..(140): NCBI GI NO: 32480046 NR Description: OSJNBa0039K24.9
  misc_feature (26)..(140): NCBI GI NO: 38345508 NR Description: OSJNBa0039K24.10
  misc_feature (33)..(140): NCBI GI NO: 5777624 NR Description: CAA303712.1 protein [Oryza sativa]
  misc_feature (26)..(140): NCBI GI NO: 5777628 NR Description: CAA303716.1 protein [Oryza sativa]
  misc_feature (26)..(140): NCBI GI NO: 32480042 NR Description: OSJNBa0039K24.5
  misc_feature (20)..(140): NCBI GI NO: 5777627 NR Description: CAA303715.1 protein [Oryza sativa]
  misc_feature (27)..(140): NCBI GI NO: 38345507 NR Description: OSJNBa0039K24.8
  misc_feature (27)..(140): NCBI GI NO: 7433075 NR Description: probable peroxidase (EC 1
  misc_feature (20)..(140): NCBI GI NO: 7433077 NR Description: probable peroxidase (EC 1
KPTTIALESFSSSSSSTSTMASSSSMLAVLATLALLLSPAASALSSTLSPDFHAETCPQLDGIVRAAVQAALTSEIAIAAGLVRIYFHDCFPQGCDASILLNSTSARETALGPNLSIQPRAMQLVESIRSTAHAACGPVVS

SEQ ID NO: 15775 - protein, 122 aa, Triticum aestivum
  peptide (1)..(122): Ceres Seq. ID no. 13655973
  misc_feature (45)..(121): Pfam Name: Pfam Description:  Peroxidase
  misc_feature (1)..(121): NCBI GI NO: 38345511 NR Description: OSJNBa0039K24.14
  misc_feature (1)..(121): NCBI GI NO: 32480046 NR Description: OSJNBa0039K24.9
  misc_feature (7)..(121): NCBI GI NO: 38345508 NR Description: OSJNBa0039K24.10
  misc_feature (14)..(121): NCBI GI NO: 5777624 NR Description: CAA303712.1 protein [Oryza sativa]
  misc_feature (7)..(121): NCBI GI NO: 5777628 NR Description: CAA303716.1 protein [Oryza sativa]
  misc_feature (7)..(121): NCBI GI NO: 32480042 NR Description: OSJNBa0039K24.5
  misc_feature (1)..(121): NCBI GI NO: 5777627 NR Description: CAA303715.1 protein [Oryza sativa]
  misc_feature (8)..(121): NCBI GI NO: 38345507 NR Description: OSJNBa0039K24.8
  misc_feature (8)..(121): NCBI GI NO: 7433075 NR Description: probable peroxidase (EC 1
  misc_feature (1)..(121): NCBI GI NO: 7433077 NR Description: probable peroxidase (EC 1
MASSSSMLAVLATLALLLSPAASALSSTLSPDFHAETCPQLDGIVRAAVQAALTSEIAIAAGLVRIYFHDCFPQGCDASILLNSTSARETALGPNLSIQPRAMQLVESIRSTAHAACGPVVS

SEQ ID NO: 15776 - DNA, 1664 bp, Triticum aestivum
  misc_feature (1)..(1664): Ceres Seq. ID no. 12617887
gacaaccgcaccgcaccgcgcccacacacgccacgcagcgcctcggtaccatcgcgttcctgctcgtagcttcgtgtcccgtcccacccccggcggcccgcaggatccgtccggctgcggtgatttgatttgatttgtgatttcggttcgtgcggcggcgatggggatgctgtcgcggccggaggaggtgccggcgctgctcaggctcaagctggcggcggggcggatcaggcgccagatcccgccgcaggagcactgggccttcgcctacgacatgctgcagcgggtctcccgcagcttcgcgctcctcatccagcagctaggccccgagctccgcaatgccgtctgcgtcttctacctcgtgctccgggccctggacaccgtcgaggacgacaccgccatccctaacgaggtcaagctgcccatccttcgggacttctaccgccacatctacaacccggactggctcttttcatgtggagcaaacgactacagagtgctcatggataattttaggcaagtctccacggctttcctggagctaggcgaaggataccaaaaggctattgaagaaatcactaggcgaatgggagaaggaatggctaaatttatatgcacggaggttgaaaccattgatgactatgatgagtactgccactatgtagcagggctagtaggctatggactttctaggctctttcatgctactggcacagaagatctggctccggatcatctttcaaattcaatgggtttatttctacagaaaaccaatataataagggattatttggaggacataaatgagataccaaggtgccgtatgttctggcctcgggaaatatggagtaaatatgtcgataaacttgaggatttaaaatatgaggaaaattcagaaaaggccgtgcagtgcttgaatgatatggtgaccaatgctttgatccatgcccaagattgccttcaatacatgtcagcattgaaggacaactccaattttcgattttgtgcaatacctcagataatggcaattgggacatgtgctatttgctacaataatgtgaaagtctttagaggagttgttaagatgaggcgtgggctcactgcacgggtgattgatgagacaaaatcgatatctgatgtctattctgctttctatgagttctcttcattgctagagtcgaagattgatgataacgacccaaatgctgcgctgacacggaggcgtgtggatgcaataaagaaaacttgcaagtcatccggcctgctgaagagaaggggttacgatctggagaaatcaaagtacagaatgcctatgctgatcatgatcatgcttctgttggtggctattatcttgggtgtactgtatggcaagtgatccggtcaagatggtcctcttatgttcttagtggcaccgcctcccctatgtggttttgcacgtgtacttcctgactgcagatggatggctggtttgcatgtagtattgtgctatgtaccctgctggtgccatgcatgctagttctttttgttctttgtttctgtcgtcccgtatgttgtttcagcttgtaatttgtttgaatctaggagagacttccttagtgacatgtatcctatgaatttggcgtggcgccttggttgtcaatgattctacattttgtttatttgtg

SEQ ID NO: 15777 - protein, 404 aa, Triticum aestivum
  peptide (1)..(404): Ceres Seq. ID no. 12617888
  misc_feature (40)..(327): Pfam Name: Pfam Description:  Squalene/phytoene synthase
  misc_feature (1)..(402): NCBI GI NO: 7434086 NR Description: farnesyl-diphosphate farnesyltransferase (EC2
  misc_feature (1)..(404): NCBI GI NO: 2463565 NR Description: squalene synthase
  misc_feature (1)..(402): NCBI GI NO: 34394799 NR Description: putative squalene synthase
  misc_feature (3)..(401): NCBI GI NO: 27475614 NR Description: farnesyl-diphosphate farnesyltransferase
  misc_feature (1)..(404): NCBI GI NO: 2144186 NR Description: farnesyl-diphosphate farnesyltransferase (EC2
  misc_feature (3)..(401): NCBI GI NO: 2780361 NR Description: squalene synthase [Panax ginseng]
  misc_feature (3)..(401): NCBI GI NO: 7434084 NR Description: farnesyl-diphosphate farnesyltransferase (EC2
  misc_feature (3)..(401): NCBI GI NO: 2144187 NR Description: farnesyl-diphosphate farnesyltransferase (EC2
  misc_feature (3)..(403): NCBI GI NO: 5360655 NR Description: squalene synthase [Solanum tuberosum]
  misc_feature (3)..(397): NCBI GI NO: 28208268 NR Description: squalene synthase [Lotus japonicus]
MGMLSRPEEVPALLRLKLAAGRIRRQIPPQEHWAFAYDMLQRVSRSFALLIQQLGPELRNAVCVFYLVLRALDTVEDDTAIPNEVKLPILRDFYRHIYNPDWLFSCGANDYRVLMDNFRQVSTAFLELGEGYQKAIEEITRRMGEGMAKFICTEVETIDDYDEYCHYVAGLVGYGLSRLFHATGTEDLAPDHLSNSMGLFLQKTNIIRDYLEDINEIPRCRMFWPREIWSKYVDKLEDLKYEENSEKAVQCLNDMVTNALIHAQDCLQYMSALKDNSNFRFCAIPQIMAIGTCAICYNNVKVFRGVVKMRRGLTARVIDETKSISDVYSAFYEFSSLLESKIDDNDPNAALTRRRVDAIKKTCKSSGLLKRRGYDLEKSKYRMPMLIMIMLLLVAIILGVLYGK

SEQ ID NO: 15778 - protein, 402 aa, Triticum aestivum
  peptide (1)..(402): Ceres Seq. ID no. 12617889
  misc_feature (38)..(325): Pfam Name: Pfam Description:  Squalene/phytoene synthase
  misc_feature (1)..(400): NCBI GI NO: 7434086 NR Description: farnesyl-diphosphate farnesyltransferase (EC2
  misc_feature (1)..(402): NCBI GI NO: 2463565 NR Description: squalene synthase
  misc_feature (1)..(400): NCBI GI NO: 34394799 NR Description: putative squalene synthase
  misc_feature (1)..(399): NCBI GI NO: 27475614 NR Description: farnesyl-diphosphate farnesyltransferase
  misc_feature (1)..(402): NCBI GI NO: 2144186 NR Description: farnesyl-diphosphate farnesyltransferase (EC2
  misc_feature (1)..(399): NCBI GI NO: 2780361 NR Description: squalene synthase [Panax ginseng]
  misc_feature (1)..(399): NCBI GI NO: 7434084 NR Description: farnesyl-diphosphate farnesyltransferase (EC2
  misc_feature (1)..(399): NCBI GI NO: 2144187 NR Description: farnesyl-diphosphate farnesyltransferase (EC2
  misc_feature (1)..(401): NCBI GI NO: 5360655 NR Description: squalene synthase [Solanum tuberosum]
  misc_feature (1)..(395): NCBI GI NO: 28208268 NR Description: squalene synthase [Lotus japonicus]
MLSRPEEVPALLRLKLAAGRIRRQIPPQEHWAFAYDMLQRVSRSFALLIQQLGPELRNAVCVFYLVLRALDTVEDDTAIPNEVKLPILRDFYRHIYNPDWLFSCGANDYRVLMDNFRQVSTAFLELGEGYQKAIEEITRRMGEGMAKFICTEVETIDDYDEYCHYVAGLVGYGLSRLFHATGTEDLAPDHLSNSMGLFLQKTNIIRDYLEDINEIPRCRMFWPREIWSKYVDKLEDLKYEENSEKAVQCLNDMVTNALIHAQDCLQYMSALKDNSNFRFCAIPQIMAIGTCAICYNNVKVFRGVVKMRRGLTARVIDETKSISDVYSAFYEFSSLLESKIDDNDPNAALTRRRVDAIKKTCKSSGLLKRRGYDLEKSKYRMPMLIMIMLLLVAIILGVLYGK

SEQ ID NO: 15779 - protein, 366 aa, Triticum aestivum
  peptide (1)..(366): Ceres Seq. ID no. 12617890
  misc_feature (2)..(289): Pfam Name: Pfam Description:  Squalene/phytoene synthase
  misc_feature (1)..(364): NCBI GI NO: 7434086 NR Description: farnesyl-diphosphate farnesyltransferase (EC2
  misc_feature (1)..(366): NCBI GI NO: 2463565 NR Description: squalene synthase
  misc_feature (1)..(364): NCBI GI NO: 34394799 NR Description: putative squalene synthase
  misc_feature (1)..(363): NCBI GI NO: 27475614 NR Description: farnesyl-diphosphate farnesyltransferase
  misc_feature (1)..(366): NCBI GI NO: 2144186 NR Description: farnesyl-diphosphate farnesyltransferase (EC2
  misc_feature (1)..(363): NCBI GI NO: 2780361 NR Description: squalene synthase [Panax ginseng]
  misc_feature (1)..(363): NCBI GI NO: 7434084 NR Description: farnesyl-diphosphate farnesyltransferase (EC2
  misc_feature (1)..(363): NCBI GI NO: 2144187 NR Description: farnesyl-diphosphate farnesyltransferase (EC2
  misc_feature (1)..(365): NCBI GI NO: 5360655 NR Description: squalene synthase [Solanum tuberosum]
  misc_feature (1)..(359): NCBI GI NO: 28208268 NR Description: squalene synthase [Lotus japonicus]
MLQRVSRSFALLIQQLGPELRNAVCVFYLVLRALDTVEDDTAIPNEVKLPILRDFYRHIYNPDWLFSCGANDYRVLMDNFRQVSTAFLELGEGYQKAIEEITRRMGEGMAKFICTEVETIDDYDEYCHYVAGLVGYGLSRLFHATGTEDLAPDHLSNSMGLFLQKTNIIRDYLEDINEIPRCRMFWPREIWSKYVDKLEDLKYEENSEKAVQCLNDMVTNALIHAQDCLQYMSALKDNSNFRFCAIPQIMAIGTCAICYNNVKVFRGVVKMRRGLTARVIDETKSISDVYSAFYEFSSLLESKIDDNDPNAALTRRRVDAIKKTCKSSGLLKRRGYDLEKSKYRMPMLIMIMLLLVAIILGVLYGK

SEQ ID NO: 15780 - DNA, 1752 bp, Triticum aestivum
  misc_feature (1)..(1752): Ceres Seq. ID no. 14303572
agttgtcgttccaaaggaaaaggaaaattggcagctggttgtggtgttcgctgctcgccaccgactttcccggcgccaccgcaccgtgcaccggccccaccggcggcgacgatgggtaactcacaggcctctcccttgtccgcctcctctgccagcttcgtcatggcctccagggccttctcgaagcaggcgctggacgaactgcgcgcgcacttctcctcgctcgccgcgcagtcggggacccaggggcgcgccatatcccgccccgttttccttgattatttcggggtacgtggggcgctcggcgataggctattccagttggtggcgaaggagagcagcgtggaagatggagtcaccttcgagggtttgattatcaccaaagcaacatatgaaaggggaactaaagatgaagccgatgagttcatttttcaactgtgcgatgtgatgggagatagtatcttaacaaggtctgatctggaagctgtatttgtgtccattcatgaaaccatatttgcagataataatgaagccaaggaaggttctaacaagagtacatttgaagcatttctcaactctgcggtattttcgaaggatgctgaaggggtctctgagaagtctatgtcattatcagactttagaaactggtgtattgtcatgccaaaactgaggaaattccttggaagtttgttgatgccccctgactcaggcagagccggcttccagatacctctacttcattatccagaaaacatctcctccgagttgctactcttaaataaagagtatgcttggcatataggaggtggcttctctcaacatgatgtgcaagagtggaagcttctatatcacagttctcttcatggacaaagcttcaacactttcttaggcaatgtgacgaatggagatgtacagactgttttggttattaaagatgcagaaggttccatttatggtgcatatgcatcacaaccatgggaaaggcacagtgatttttatggtgacatgaagacattccttttcaagttatatcccgaagcgtccatattttgccctacaggagcaaacaaaagtttgcaatggtgtgctgtaaacttcacctctgagaacattccaaatggcatcggctttggaggcaagccacatcactttggcctcttcctctctgcgggtttcgatcaagggcactcatttacctccagcacattcaccaatcctcccctttccaacacgagcaggttcagaccagaagttattgaatgttgggggatacaagtgaagggatcaaatgatgaaaagccggagcttgtcaaggggacggtccttgagagattcaaggaggatcggaacatgctgaagctgattggtatggcgagtgcgagtgactgagcactgaaaaaaatcacaatagcagatatttggaggttgtgtacagcactctttttatgggaaataataccttacttgtatctggttgctactcttgagttttatttagctcttggagcttttttgtttcacatccagagtgatacaaggttagctgcatggagttgttggtttatactgtatggatccaggacgtcattttctgcccagttcgagagcagggagtaactgtctgttcatttgtcaagatggatcttcgaaagctggctgctgattaaaggatgtatgaaatgtgttctaaaactaaatcagtgtagcatgtattggggtggataaagtaatgagtggatacagttcagttcg

SEQ ID NO: 15781 - protein, 462 aa, Triticum aestivum
  peptide (1)..(462): Ceres Seq. ID no. 14303573
  misc_feature (38)..(462): NCBI GI NO: 15239986 NR Description: expressed protein [Arabidopsis thaliana]
  misc_feature (17)..(302): NCBI GI NO: 22329148 NR Description: expressed protein [Arabidopsis thaliana]
  misc_feature (17)..(237): NCBI GI NO: 7486284 NR Description: hypothetical protein F28A23
  misc_feature (188)..(302): NCBI GI NO: 17065420 NR Description: Unknown protein [Arabidopsis thaliana]
  misc_feature (277)..(462): NCBI GI NO: 28077021 NR Description: RIKEN cDNA 4632415K11 [Mus musculus]
  misc_feature (278)..(462): NCBI GI NO: 31226704 NR Description: ENSANGP00000010196 [Anopheles gambiae]
  misc_feature (266)..(462): NCBI GI NO: 23270886 NR Description: Unknown (protein for MGC:25024) [Homo sapiens]
  misc_feature (266)..(462): NCBI GI NO: 10047293 NR Description: KIAA1609 protein [Homo sapiens]
  misc_feature (242)..(462): NCBI GI NO: 19920876 NR Description: CG5149-PA [Drosophila melanogaster]
  misc_feature (279)..(425): NCBI GI NO: 13278166 NR Description: Oxr1 protein [Mus musculus]
SCRSKGKGKLAAGCGVRCSPPTFPAPPHRAPAPPAATMGNSQASPLSASSASFVMASRAFSKQALDELRAHFSSLAAQSGTQGRAISRPVFLDYFGVRGALGDRLFQLVAKESSVEDGVTFEGLIITKATYERGTKDEADEFIFQLCDVMGDSILTRSDLEAVFVSIHETIFADNNEAKEGSNKSTFEAFLNSAVFSKDAEGVSEKSMSLSDFRNWCIVMPKLRKFLGSLLMPPDSGRAGFQIPLLHYPENISSELLLLNKEYAWHIGGGFSQHDVQEWKLLYHSSLHGQSFNTFLGNVTNGDVQTVLVIKDAEGSIYGAYASQPWERHSDFYGDMKTFLFKLYPEASIFCPTGANKSLQWCAVNFTSENIPNGIGFGGKPHHFGLFLSAGFDQGHSFTSSTFTNPPLSNTSRFRPEVIECWGIQVKGSNDEKPELVKGTVLERFKEDRNMLKLIGMASASD

SEQ ID NO: 15782 - protein, 425 aa, Triticum aestivum
  peptide (1)..(425): Ceres Seq. ID no. 14303574
  misc_feature (1)..(425): NCBI GI NO: 15239986 NR Description: expressed protein [Arabidopsis thaliana]
  misc_feature (1)..(265): NCBI GI NO: 22329148 NR Description: expressed protein [Arabidopsis thaliana]
  misc_feature (1)..(200): NCBI GI NO: 7486284 NR Description: hypothetical protein F28A23
  misc_feature (151)..(265): NCBI GI NO: 17065420 NR Description: Unknown protein [Arabidopsis thaliana]
  misc_feature (240)..(425): NCBI GI NO: 28077021 NR Description: RIKEN cDNA 4632415K11 [Mus musculus]
  misc_feature (241)..(425): NCBI GI NO: 31226704 NR Description: ENSANGP00000010196 [Anopheles gambiae]
  misc_feature (229)..(425): NCBI GI NO: 23270886 NR Description: Unknown (protein for MGC:25024) [Homo sapiens]
  misc_feature (229)..(425): NCBI GI NO: 10047293 NR Description: KIAA1609 protein [Homo sapiens]
  misc_feature (205)..(425): NCBI GI NO: 19920876 NR Description: CG5149-PA [Drosophila melanogaster]
  misc_feature (242)..(388): NCBI GI NO: 13278166 NR Description: Oxr1 protein [Mus musculus]
MGNSQASPLSASSASFVMASRAFSKQALDELRAHFSSLAAQSGTQGRAISRPVFLDYFGVRGALGDRLFQLVAKESSVEDGVTFEGLIITKATYERGTKDEADEFIFQLCDVMGDSILTRSDLEAVFVSIHETIFADNNEAKEGSNKSTFEAFLNSAVFSKDAEGVSEKSMSLSDFRNWCIVMPKLRKFLGSLLMPPDSGRAGFQIPLLHYPENISSELLLLNKEYAWHIGGGFSQHDVQEWKLLYHSSLHGQSFNTFLGNVTNGDVQTVLVIKDAEGSIYGAYASQPWERHSDFYGDMKTFLFKLYPEASIFCPTGANKSLQWCAVNFTSENIPNGIGFGGKPHHFGLFLSAGFDQGHSFTSSTFTNPPLSNTSRFRPEVIECWGIQVKGSNDEKPELVKGTVLERFKEDRNMLKLIGMASASD

SEQ ID NO: 15783 - protein, 408 aa, Triticum aestivum
  peptide (1)..(408): Ceres Seq. ID no. 14303575
  misc_feature (1)..(408): NCBI GI NO: 15239986 NR Description: expressed protein [Arabidopsis thaliana]
  misc_feature (1)..(248): NCBI GI NO: 22329148 NR Description: expressed protein [Arabidopsis thaliana]
  misc_feature (1)..(183): NCBI GI NO: 7486284 NR Description: hypothetical protein F28A23
  misc_feature (134)..(248): NCBI GI NO: 17065420 NR Description: Unknown protein [Arabidopsis thaliana]
  misc_feature (223)..(408): NCBI GI NO: 28077021 NR Description: RIKEN cDNA 4632415K11 [Mus musculus]
  misc_feature (224)..(408): NCBI GI NO: 31226704 NR Description: ENSANGP00000010196 [Anopheles gambiae]
  misc_feature (212)..(408): NCBI GI NO: 23270886 NR Description: Unknown (protein for MGC:25024) [Homo sapiens]
  misc_feature (212)..(408): NCBI GI NO: 10047293 NR Description: KIAA1609 protein [Homo sapiens]
  misc_feature (188)..(408): NCBI GI NO: 19920876 NR Description: CG5149-PA [Drosophila melanogaster]
  misc_feature (225)..(371): NCBI GI NO: 13278166 NR Description: Oxr1 protein [Mus musculus]
MASRAFSKQALDELRAHFSSLAAQSGTQGRAISRPVFLDYFGVRGALGDRLFQLVAKESSVEDGVTFEGLIITKATYERGTKDEADEFIFQLCDVMGDSILTRSDLEAVFVSIHETIFADNNEAKEGSNKSTFEAFLNSAVFSKDAEGVSEKSMSLSDFRNWCIVMPKLRKFLGSLLMPPDSGRAGFQIPLLHYPENISSELLLLNKEYAWHIGGGFSQHDVQEWKLLYHSSLHGQSFNTFLGNVTNGDVQTVLVIKDAEGSIYGAYASQPWERHSDFYGDMKTFLFKLYPEASIFCPTGANKSLQWCAVNFTSENIPNGIGFGGKPHHFGLFLSAGFDQGHSFTSSTFTNPPLSNTSRFRPEVIECWGIQVKGSNDEKPELVKGTVLERFKEDRNMLKLIGMASASD

SEQ ID NO: 15784 - DNA, 2241 bp, Triticum aestivum
  misc_feature (1)..(2241): Ceres Seq. ID no. 12626078
aacgttctagaatcttcacaaaccctcaacaaggttcccctccctcccctcccctgctccccctctgttcctccgccccctcatcgcagccgcctctctcccgaccaaaagccctagctagctagacccaccccatccatggcgaccatccccaccaccggctccgcctccctcctccggggctccgccgccctccagagggacgggaggtcaaccaggccgtcgtcggcggccaggccgctgccggggcgacgcgcgcgctcgttgtcggtcgtgcgcgcctccgccaaggacatcgccttcgaccaggcgtcgcgctccgccctccaggccggcgtcgagaagctcgccgccgccgtcggcgtcaccctcggccccagaggaaggaatgtcgttttggacgagtttggcagccccaaagtggtcaatgatggagttacaatcgcccgggctattgagcttgctgatcccatggagaatgctggtgctgctttgattcgtgaagttgctagcaagacaaatgactcggcgggtgatgggaccacgaccgcatctgttctggctcgtgagatcattaaactgggattgctgagtgttacctcaggggcaaatccagtgtcaattaagaagggcatagataagactgtgcaaagtttagttgaggaactcgagaagaagtcacgacctgtgaagggcagcggggacattaaagctattgctgccatatctgctggaaatgatgactttattggtaccatgatcgcggaggctattaacaaagttggccctgatggtgtcctctcgattgagtcatcatcgtcgtttgagaccactgttgaagttgaagaaggaatggagattgacagaggatacatctctcctcagtttgtcacaaactctgagaagtcagttgttgagtttgaaaacgctagagttcttgtcactgatcagaagatttcctcaatcaaagaaatccttcctttgttggagcaaactacgcagttgagagcaccacttctcataattgcagaggacgtatctggtgaggctttggcaactctagttgtcaacaagcttagaggaattctgaatgtagctgcgattaaagctcctggttttggtgaaaggcgcaaggctctccttcaggacattgccattgttacaggtgctgaatttcaagccaaagatcttggccaactgatcgagcagacaacagtggagcagctcggcatagccaggaaggtgacaatctccgggtcatccacaaccataatagcagatgttgccaccaaggatgagatccaggccagaatcgcacagctgaagagagagctttctcagacagactccacatatgattctgagaagctggcagagagaatagcaaagctctctggcggagttgccgtgatcaaggttggagctgcaaccgagacggagctcgaggaccgcaagctccgcatagaggatgccaagaatgcaacttttgcagccattgaggaaggtatagtacctggaggtggtgcggcctatgttcacctgtccacatttgtaccagccatcaaggagaagctggatgaccctgaggagcgcctcggtgctgatatcattcagaaggctctagtggcacccgcatcgttgatagcacacaatgcgggagtcgaaggggaggtgatcgtggagaaaatcaaggacagcgagtgggagtttggatacaacgcgatgaccgacaagcatgagaacctggtagaggctggcgtcatcgaccccgcgaaggtgacgaggtgtgccctgcagaacgcggcgtcggtggccggaatggtcctgaccacgcaggcgatcgtcgtggagaagcctagcaagaaggcccccgcgcccgccgggatgccccagggcatgatgtagaagcgcaatgatacgtagcaacctgggggcatgcaattttaggggcagtgggagtgatcatttctccaagggagataactgtgggtacctcgagaaatcattggtgtgtaatggatagtgatgacctgttctattgtctatttggtaccgctaatatcgtgaaaactattttgcctagctgagtttgagaagagtaataaatgagtaaagttgagcatgcccctgatttttctcttgattgtttgatctgggattttaggcaacaactggatgttctctctaggggaatgaaagcatgtaggcaggcagctttggctcaaagcctgaacacttttt

SEQ ID NO: 15785 - protein, 588 aa, Triticum aestivum
  peptide (1)..(588): Ceres Seq. ID no. 12626079
  misc_feature (70)..(573): Pfam Name: Pfam Description:  TCP-1/cpn60 chaperonin family
  misc_feature (1)..(587): NCBI GI NO: 1710807 NR Description: RuBisCO subunit binding-protein alpha subunit
  misc_feature (46)..(588): NCBI GI NO: 1351030 NR Description: RuBisCO subunit binding-protein alpha subunit
  misc_feature (48)..(588): NCBI GI NO: 134102 NR Description: RuBisCO subunit binding-protein alpha subunit
  misc_feature (1)..(588): NCBI GI NO: 15226314 NR Description: putative rubisco subunit binding-protein alphasubunit
  misc_feature (1)..(588): NCBI GI NO: 21554572 NR Description: putative rubisco subunit binding-protein alphasubunit
  misc_feature (1)..(587): NCBI GI NO: 3790441 NR Description: chaperonin 60 alpha subunit [Canavalia lineata]
  misc_feature (46)..(588): NCBI GI NO: 99801 NR Description: chaperonine 60K alpha chain - rape (fragment)
  misc_feature (1)..(588): NCBI GI NO: 464727 NR Description: RuBisCO subunit binding-protein alpha subunit
  misc_feature (60)..(555): NCBI GI NO: 5650721 NR Description: rubisco subunit binding-protein alpha subunit
  misc_feature (60)..(554): NCBI GI NO: 134101 NR Description: RUBISCO SUBUNIT BINDING-PROTEIN ALPHA SUBUNIT
MATIPTTGSASLLRGSAALQRDGRSTRPSSAARPLPGRRARSLSVVRASAKDIAFDQASRSALQAGVEKLAAAVGVTLGPRGRNVVLDEFGSPKVVNDGVTIARAIELADPMENAGAALIREVASKTNDSAGDGTTTASVLAREIIKLGLLSVTSGANPVSIKKGIDKTVQSLVEELEKKSRPVKGSGDIKAIAAISAGNDDFIGTMIAEAINKVGPDGVLSIESSSSFETTVEVEEGMEIDRGYISPQFVTNSEKSVVEFENARVLVTDQKISSIKEILPLLEQTTQLRAPLLIIAEDVSGEALATLVVNKLRGILNVAAIKAPGFGERRKALLQDIAIVTGAEFQAKDLGQLIEQTTVEQLGIARKVTISGSSTTIIADVATKDEIQARIAQLKRELSQTDSTYDSEKLAERIAKLSGGVAVIKVGAATETELEDRKLRIEDAKNATFAAIEEGIVPGGGAAYVHLSTFVPAIKEKLDDPEERLGADIIQKALVAPASLIAHNAGVEGEVIVEKIKDSEWEFGYNAMTDKHENLVEAGVIDPAKVTRCALQNAASVAGMVLTTQAIVVEKPSKKAPAPAGMPQGMM

SEQ ID NO: 15786 - protein, 477 aa, Triticum aestivum
  peptide (1)..(477): Ceres Seq. ID no. 12626080
  misc_feature (1)..(462): Pfam Name: Pfam Description:  TCP-1/cpn60 chaperonin family
  misc_feature (1)..(476): NCBI GI NO: 1710807 NR Description: RuBisCO subunit binding-protein alpha subunit
  misc_feature (1)..(477): NCBI GI NO: 1351030 NR Description: RuBisCO subunit binding-protein alpha subunit
  misc_feature (1)..(477): NCBI GI NO: 134102 NR Description: RuBisCO subunit binding-protein alpha subunit
  misc_feature (1)..(477): NCBI GI NO: 15226314 NR Description: putative rubisco subunit binding-protein alphasubunit
  misc_feature (1)..(477): NCBI GI NO: 21554572 NR Description: putative rubisco subunit binding-protein alphasubunit
  misc_feature (1)..(476): NCBI GI NO: 3790441 NR Description: chaperonin 60 alpha subunit [Canavalia lineata]
  misc_feature (1)..(477): NCBI GI NO: 99801 NR Description: chaperonine 60K alpha chain - rape (fragment)
  misc_feature (1)..(477): NCBI GI NO: 464727 NR Description: RuBisCO subunit binding-protein alpha subunit
  misc_feature (1)..(444): NCBI GI NO: 5650721 NR Description: rubisco subunit binding-protein alpha subunit
  misc_feature (1)..(443): NCBI GI NO: 134101 NR Description: RUBISCO SUBUNIT BINDING-PROTEIN ALPHA SUBUNIT
MENAGAALIREVASKTNDSAGDGTTTASVLAREIIKLGLLSVTSGANPVSIKKGIDKTVQSLVEELEKKSRPVKGSGDIKAIAAISAGNDDFIGTMIAEAINKVGPDGVLSIESSSSFETTVEVEEGMEIDRGYISPQFVTNSEKSVVEFENARVLVTDQKISSIKEILPLLEQTTQLRAPLLIIAEDVSGEALATLVVNKLRGILNVAAIKAPGFGERRKALLQDIAIVTGAEFQAKDLGQLIEQTTVEQLGIARKVTISGSSTTIIADVATKDEIQARIAQLKRELSQTDSTYDSEKLAERIAKLSGGVAVIKVGAATETELEDRKLRIEDAKNATFAAIEEGIVPGGGAAYVHLSTFVPAIKEKLDDPEERLGADIIQKALVAPASLIAHNAGVEGEVIVEKIKDSEWEFGYNAMTDKHENLVEAGVIDPAKVTRCALQNAASVAGMVLTTQAIVVEKPSKKAPAPAGMPQGMM

SEQ ID NO: 15787 - protein, 382 aa, Triticum aestivum
  peptide (1)..(382): Ceres Seq. ID no. 12626081
  misc_feature (1)..(367): Pfam Name: Pfam Description:  TCP-1/cpn60 chaperonin family
  misc_feature (1)..(381): NCBI GI NO: 1710807 NR Description: RuBisCO subunit binding-protein alpha subunit
  misc_feature (1)..(382): NCBI GI NO: 1351030 NR Description: RuBisCO subunit binding-protein alpha subunit
  misc_feature (1)..(382): NCBI GI NO: 134102 NR Description: RuBisCO subunit binding-protein alpha subunit
  misc_feature (1)..(382): NCBI GI NO: 15226314 NR Description: putative rubisco subunit binding-protein alphasubunit
  misc_feature (1)..(382): NCBI GI NO: 21554572 NR Description: putative rubisco subunit binding-protein alphasubunit
  misc_feature (1)..(381): NCBI GI NO: 3790441 NR Description: chaperonin 60 alpha subunit [Canavalia lineata]
  misc_feature (1)..(382): NCBI GI NO: 99801 NR Description: chaperonine 60K alpha chain - rape (fragment)
  misc_feature (1)..(382): NCBI GI NO: 464727 NR Description: RuBisCO subunit binding-protein alpha subunit
  misc_feature (1)..(349): NCBI GI NO: 5650721 NR Description: rubisco subunit binding-protein alpha subunit
  misc_feature (1)..(348): NCBI GI NO: 134101 NR Description: RUBISCO SUBUNIT BINDING-PROTEIN ALPHA SUBUNIT
MIAEAINKVGPDGVLSIESSSSFETTVEVEEGMEIDRGYISPQFVTNSEKSVVEFENARVLVTDQKISSIKEILPLLEQTTQLRAPLLIIAEDVSGEALATLVVNKLRGILNVAAIKAPGFGERRKALLQDIAIVTGAEFQAKDLGQLIEQTTVEQLGIARKVTISGSSTTIIADVATKDEIQARIAQLKRELSQTDSTYDSEKLAERIAKLSGGVAVIKVGAATETELEDRKLRIEDAKNATFAAIEEGIVPGGGAAYVHLSTFVPAIKEKLDDPEERLGADIIQKALVAPASLIAHNAGVEGEVIVEKIKDSEWEFGYNAMTDKHENLVEAGVIDPAKVTRCALQNAASVAGMVLTTQAIVVEKPSKKAPAPAGMPQGMM

SEQ ID NO: 15788 - DNA, 761 bp, Triticum aestivum
  misc_feature (1)..(761): Ceres Seq. ID no. 12586642
aacacaagcagtcgatcgattcatccaaaccagagttgagcaatacgtactagcagtgagatttggcccttccaatcgagtgatttcagttcgtgtttgttggtgagagagaagagaagagaagagaggagaagatggcctccaaccagaaccaggcgagctacgcggccggcgagaccaaagcccgcaccgaggagaagaccgggcagatgatgggcgccaccaaggacaaggcggggcaggccacggaggaaaccaagcagaaggccggcgagacggccgaggccaccaagcagaaggcatcggagacggcgcagtacgcgcaggagaggtcctccgacgccgcacagtacagcaaggagtccgccgtcgccggcaaggacaagactggcaacgtgctccagcaggccggcgagacggtggcgaacgccgtggcgaacacgctaggcatgggcggtgacaacaccaacaccaccactggcgccacaaaggacagcacccccgagaagatcaccagggatccctggacgcatgcatacgtccaatctttgctgatttgcttcctttattactcgtttggtccttttacatatctgtatgtttccctcttgtgatttcagctcgtttagtgtaaatttgccttcgatttgaggtactcgatcgtgtccggttctgtaatgagttataatccatgtactttggtgtaaatggatatgtaacgaggacagtcgaaggtggcaataatattagttttcggagag

SEQ ID NO: 15789 - protein, 159 aa, Triticum aestivum
  peptide (1)..(159): Ceres Seq. ID no. 12586643
  misc_feature (35)..(100): Pfam Name: Pfam Description:  Late embryogenesis abundant protein
  misc_feature (1)..(129): NCBI GI NO: 33342178 NR Description: ABA inducible protein [Triticum aestivum]
  misc_feature (1)..(125): NCBI GI NO: 7387828 NR Description: Late embryogenesis abundant protein, group 3
  misc_feature (1)..(125): NCBI GI NO: 25989705 NR Description: LEA1 protein [Triticum aestivum]
  misc_feature (1)..(120): NCBI GI NO: 4929080 NR Description: ABA-inducible protein WRAB1 [Triticum aestivum]
  misc_feature (1)..(125): NCBI GI NO: 25989709 NR Description: LEA2 protein [Triticum aestivum]
  misc_feature (1)..(122): NCBI GI NO: 126081 NR Description: ABA-inducible protein PHV A1
  misc_feature (1)..(122): NCBI GI NO: 25989705 NR Description: LEA1 protein [Triticum aestivum]
  misc_feature (1)..(133): NCBI GI NO: 126081 NR Description: ABA-inducible protein PHV A1
  misc_feature (1)..(129): NCBI GI NO: 7387829 NR Description: Late embryogenesis abundant protein, group 3 (LEA)
  misc_feature (1)..(103): NCBI GI NO: 4929080 NR Description: ABA-inducible protein WRAB1 [Triticum aestivum]
MASNQNQASYAAGETKARTEEKTGQMMGATKDKAGQATEETKQKAGETAEATKQKASETAQYAQERSSDAAQYSKESAVAGKDKTGNVLQQAGETVANAVANTLGMGGDNTNTTTGATKDSTPEKITRDPWTHAYVQSLLICFLYYSFGPFTYLYVSLL

SEQ ID NO: 15790 - protein, 134 aa, Triticum aestivum
  peptide (1)..(134): Ceres Seq. ID no. 12586644
  misc_feature (10)..(75): Pfam Name: Pfam Description:  Late embryogenesis abundant protein
  misc_feature (1)..(104): NCBI GI NO: 33342178 NR Description: ABA inducible protein [Triticum aestivum]
  misc_feature (1)..(100): NCBI GI NO: 7387828 NR Description: Late embryogenesis abundant protein, group 3
  misc_feature (1)..(100): NCBI GI NO: 25989705 NR Description: LEA1 protein [Triticum aestivum]
  misc_feature (1)..(95): NCBI GI NO: 4929080 NR Description: ABA-inducible protein WRAB1 [Triticum aestivum]
  misc_feature (1)..(100): NCBI GI NO: 25989709 NR Description: LEA2 protein [Triticum aestivum]
  misc_feature (1)..(97): NCBI GI NO: 126081 NR Description: ABA-inducible protein PHV A1
  misc_feature (1)..(97): NCBI GI NO: 25989705 NR Description: LEA1 protein [Triticum aestivum]
  misc_feature (1)..(108): NCBI GI NO: 126081 NR Description: ABA-inducible protein PHV A1
  misc_feature (1)..(104): NCBI GI NO: 7387829 NR Description: Late embryogenesis abundant protein, group 3 (LEA)
  misc_feature (1)..(78): NCBI GI NO: 4929080 NR Description: ABA-inducible protein WRAB1 [Triticum aestivum]
MMGATKDKAGQATEETKQKAGETAEATKQKASETAQYAQERSSDAAQYSKESAVAGKDKTGNVLQQAGETVANAVANTLGMGGDNTNTTTGATKDSTPEKITRDPWTHAYVQSLLICFLYYSFGPFTYLYVSLL

SEQ ID NO: 15791 - protein, 133 aa, Triticum aestivum
  peptide (1)..(133): Ceres Seq. ID no. 12586645
  misc_feature (9)..(74): Pfam Name: Pfam Description:  Late embryogenesis abundant protein
  misc_feature (1)..(103): NCBI GI NO: 33342178 NR Description: ABA inducible protein [Triticum aestivum]
  misc_feature (1)..(99): NCBI GI NO: 7387828 NR Description: Late embryogenesis abundant protein, group 3
  misc_feature (1)..(99): NCBI GI NO: 25989705 NR Description: LEA1 protein [Triticum aestivum]
  misc_feature (1)..(94): NCBI GI NO: 4929080 NR Description: ABA-inducible protein WRAB1 [Triticum aestivum]
  misc_feature (1)..(99): NCBI GI NO: 25989709 NR Description: LEA2 protein [Triticum aestivum]
  misc_feature (1)..(96): NCBI GI NO: 126081 NR Description: ABA-inducible protein PHV A1
  misc_feature (1)..(96): NCBI GI NO: 25989705 NR Description: LEA1 protein [Triticum aestivum]
  misc_feature (1)..(107): NCBI GI NO: 126081 NR Description: ABA-inducible protein PHV A1
  misc_feature (1)..(103): NCBI GI NO: 7387829 NR Description: Late embryogenesis abundant protein, group 3 (LEA)
  misc_feature (1)..(77): NCBI GI NO: 4929080 NR Description: ABA-inducible protein WRAB1 [Triticum aestivum]
MGATKDKAGQATEETKQKAGETAEATKQKASETAQYAQERSSDAAQYSKESAVAGKDKTGNVLQQAGETVANAVANTLGMGGDNTNTTTGATKDSTPEKITRDPWTHAYVQSLLICFLYYSFGPFTYLYVSLL

SEQ ID NO: 15792 - DNA, 1470 bp, Triticum aestivum
  misc_feature (1)..(1470): Ceres Seq. ID no. 12618306
tccgtccccagatccgaccacccccctcgcctcgccgccggccccccctccacgcaaccgtactctccggggcccgcgcgccggaatggaggcggcgcgcgccaaggacaccaaggagcgcctggccggggtggagcgcctgcacgaggcgctcgacgcggcggcgcgccgcggcctctccccggccgaggtcacctcgctggtggacacctgcgtggatctgacgcgggacgccaacttccgcgtcgcgcagggggggctgcaggcgctctccgccgccgccgtgctcgccggggaccacttcaagatccacctcaacgcgctcgtccccgccgccgtcgagcgcctcggcgacggcaagcagcccgtccgcgaggccgcgcgccagctcctcgtcacgctcatggaggtttcttcaccaacaatcattctcgaaagggccggaaattatgcatggactcataagagttggagggttcgggaagagtttgtacttacagtggcaactgcagttgggcttttcgcttctacggagcttctcatgcaacgagttttactctcacccgtcctacagttgatgaatgattcgaaccaaagtgtcagagaagctgctatatcttgtattgaggaaatgtacaagaacatgggatctcagttccacgaagagttgcagcgccataatctgcctacatacatgctaaaagaaataaattcaagattgaatagaattgaaccaaaggttcccgcatctgatggtactgcaacacagcataaagttgcagcatctagatccgttagtgttaacccaaaaagaggcagcccacggacaaaaaacacaccgagggaaagcacattatttggaggtaatctgattggtgaagtgcaggattcactggcaaaggaagctgagaaagataaacaaattgcttcggaggaggaggaggaagaagagtatgtcttgctagagttagatgatgttcattattcctgcatacaaccaaatgccccttatatactctctggtttggatacattgactcctaccttggtagtaggtgatagcctgaagatgattggagaatatgaagaaacggttggcccatgctatttattttcagaaagtgatgctccaccaaagcccgttcatgaagagccggcacctcccaaagaaaacaaggacaagcaaggcagaaacatcaaggaggtgaaacatgtgacgagcgttcacaagatgctcaaattccggtcgaccggtgagggtcgtcaggagcacagagcataccgttacagggacaaggagttttgaaacacaatgctttgtctgatgcttgtgatgcacacacacagcatgcaatcctttgacccttcaaatggaatgcaaggatggtagtacttgttaaatcttaattacccactagctagcattctctatctcgaggtgaattttgtgtcctctctttctgaattatc

SEQ ID NO: 15793 - protein, 434 aa, Triticum aestivum
  peptide (1)..(434): Ceres Seq. ID no. 12618307
  misc_feature (27)..(289): NCBI GI NO: 38567848 NR Description: OSJNBb0002J11.18
  misc_feature (27)..(289): NCBI GI NO: 38346560 NR Description: OSJNBa0043L24.9
  misc_feature (29)..(318): NCBI GI NO: 20259452 NR Description: unknown protein [Arabidopsis thaliana]
  misc_feature (29)..(189): NCBI GI NO: 25411971 NR Description: hypothetical protein At2g20200
  misc_feature (135)..(318): NCBI GI NO: 30680913 NR Description: expressed protein [Arabidopsis thaliana]
  misc_feature (298)..(433): NCBI GI NO: 38346622 NR Description: OSJNBa0074L08.16
  misc_feature (35)..(316): NCBI GI NO: 13508541 NR Description: CLASP1 [Mus musculus]
  misc_feature (35)..(283): NCBI GI NO: 13508645 NR Description: CLIP-associating protein CLASP1 [Homo sapiens]
  misc_feature (67)..(244): NCBI GI NO: 7527326 NR Description: microtubule associated-protein orbit
  misc_feature (67)..(244): NCBI GI NO: 24667856 NR Description: chromosome bows CG32435-PA
PSPDPTTPLASPPAPPPRNRTLRGPRAGMEAARAKDTKERLAGVERLHEALDAAARRGLSPAEVTSLVDTCVDLTRDANFRVAQGGLQALSAAAVLAGDHFKIHLNALVPAAVERLGDGKQPVREAARQLLVTLMEVSSPTIILERAGNYAWTHKSWRVREEFVLTVATAVGLFASTELLMQRVLLSPVLQLMNDSNQSVREAAISCIEEMYKNMGSQFHEELQRHNLPTYMLKEINSRLNRIEPKVPASDGTATQHKVAASRSVSVNPKRGSPRTKNTPRESTLFGGNLIGEVQDSLAKEAEKDKQIASEEEEEEEYVLLELDDVHYSCIQPNAPYILSGLDTLTPTLVVGDSLKMIGEYEETVGPCYLFSESDAPPKPVHEEPAPPKENKDKQGRNIKEVKHVTSVHKMLKFRSTGEGRQEHRAYRYRDKEF

SEQ ID NO: 15794 - protein, 406 aa, Triticum aestivum
  peptide (1)..(406): Ceres Seq. ID no. 12618308
  misc_feature (1)..(261): NCBI GI NO: 38567848 NR Description: OSJNBb0002J11.18
  misc_feature (1)..(261): NCBI GI NO: 38346560 NR Description: OSJNBa0043L24.9
  misc_feature (1)..(290): NCBI GI NO: 20259452 NR Description: unknown protein [Arabidopsis thaliana]
  misc_feature (1)..(161): NCBI GI NO: 25411971 NR Description: hypothetical protein At2g20200
  misc_feature (107)..(290): NCBI GI NO: 30680913 NR Description: expressed protein [Arabidopsis thaliana]
  misc_feature (270)..(405): NCBI GI NO: 38346622 NR Description: OSJNBa0074L08.16
  misc_feature (7)..(288): NCBI GI NO: 13508541 NR Description: CLASP1 [Mus musculus]
  misc_feature (7)..(255): NCBI GI NO: 13508645 NR Description: CLIP-associating protein CLASP1 [Homo sapiens]
  misc_feature (39)..(216): NCBI GI NO: 7527326 NR Description: microtubule associated-protein orbit
  misc_feature (39)..(216): NCBI GI NO: 24667856 NR Description: chromosome bows CG32435-PA
MEAARAKDTKERLAGVERLHEALDAAARRGLSPAEVTSLVDTCVDLTRDANFRVAQGGLQALSAAAVLAGDHFKIHLNALVPAAVERLGDGKQPVREAARQLLVTLMEVSSPTIILERAGNYAWTHKSWRVREEFVLTVATAVGLFASTELLMQRVLLSPVLQLMNDSNQSVREAAISCIEEMYKNMGSQFHEELQRHNLPTYMLKEINSRLNRIEPKVPASDGTATQHKVAASRSVSVNPKRGSPRTKNTPRESTLFGGNLIGEVQDSLAKEAEKDKQIASEEEEEEEYVLLELDDVHYSCIQPNAPYILSGLDTLTPTLVVGDSLKMIGEYEETVGPCYLFSESDAPPKPVHEEPAPPKENKDKQGRNIKEVKHVTSVHKMLKFRSTGEGRQEHRAYRYRDKEF

SEQ ID NO: 15795 - protein, 300 aa, Triticum aestivum
  peptide (1)..(300): Ceres Seq. ID no. 12618309
  misc_feature (1)..(155): NCBI GI NO: 38567848 NR Description: OSJNBb0002J11.18
  misc_feature (1)..(155): NCBI GI NO: 38346560 NR Description: OSJNBa0043L24.9
  misc_feature (1)..(184): NCBI GI NO: 20259452 NR Description: unknown protein [Arabidopsis thaliana]
  misc_feature (1)..(55): NCBI GI NO: 25411971 NR Description: hypothetical protein At2g20200
  misc_feature (1)..(184): NCBI GI NO: 30680913 NR Description: expressed protein [Arabidopsis thaliana]
  misc_feature (164)..(299): NCBI GI NO: 38346622 NR Description: OSJNBa0074L08.16
  misc_feature (1)..(182): NCBI GI NO: 13508541 NR Description: CLASP1 [Mus musculus]
  misc_feature (1)..(149): NCBI GI NO: 13508645 NR Description: CLIP-associating protein CLASP1 [Homo sapiens]
  misc_feature (1)..(110): NCBI GI NO: 7527326 NR Description: microtubule associated-protein orbit
  misc_feature (1)..(110): NCBI GI NO: 24667856 NR Description: chromosome bows CG32435-PA
MEVSSPTIILERAGNYAWTHKSWRVREEFVLTVATAVGLFASTELLMQRVLLSPVLQLMNDSNQSVREAAISCIEEMYKNMGSQFHEELQRHNLPTYMLKEINSRLNRIEPKVPASDGTATQHKVAASRSVSVNPKRGSPRTKNTPRESTLFGGNLIGEVQDSLAKEAEKDKQIASEEEEEEEYVLLELDDVHYSCIQPNAPYILSGLDTLTPTLVVGDSLKMIGEYEETVGPCYLFSESDAPPKPVHEEPAPPKENKDKQGRNIKEVKHVTSVHKMLKFRSTGEGRQEHRAYRYRDKEF

SEQ ID NO: 15796 - DNA, 1851 bp, Triticum aestivum
  misc_feature (1)..(1851): Ceres Seq. ID no. 13597826
atctatccaggtccagccgagcccatggcggccaagcacctgctctcccgcgcccgcctcctcctcacccgccaccgcagccgccccaccatcctcccgcccgcgctcacccgcctcctcttcggcgggacaaccacccccgccgagccggaggacgacgacaaggccagggcccgggcggcggcggcggcggcggccgtcgccctggacgccaagagggccaagcgggaaggctccgacgacgacgacgagggcgccgggctgccctggacgtcctggcggcccgacgtggcctggctgaccaaggcactcgagcccgcgctgcagctctacaagcactacaactggaagccattcgcctctgacaacatccccgcaagcacccgcacttttagcgagatcataagtgacctccagcacagcaaggtgagcatacaggactggagcctcagtgatcttaccgtcggtctctacctcatttaccttacccaagcttccgcaaagaatgctcaagccttcaagggcgttcagatttcctccaataagaaggttcaagaactaatttatcaccttgaacttgcaaaaggttgctataagggcagtgccactgggcttgcaaagcatagcatgctccggccaaggaatgttttaaagtttgtgaaagattctagtatctttagacctggatattacatcggcatcgatccacgtgctaaactggtcatccttgggattcgtgggacccatacggtttatgaccttgtcaccgatttggttgcattgagcgataagaaggtatcacctaaaggtttctcaacacactttggaacctacgaggccgctcgatggtacctacgccatgagttgagcatcatcagaaaatgtttggaaaaacacaaggactacaagttgcggttggtaggtcactcccttggaggagcttcagctgcattgcttgctataatgttaaggaagaagtcgaaggaggagcttggatttagtcccgacatagtttcagctgttggatttggagtcccaccctgtgtatcgagagagatagccgagagttgcgcaagctatgtcaccactgttgtattgcaggatgatatagttcctaggttaagtgcagcttcactggcaagattgcgaaatgagataattgaaacagattgggccaaagttttggagaaggaagattggaagcatatagtggatatcgtgaccaatgctaagctagttgtttcgtccatccaagacgtggcaaacaaacttgccgattacgccaaagttgtaacatcagctagctccggtgatgccgcgaaagaccagccccgtcttcagggcccgacgaaagttttgaagcctgacggtgaagaagacgtctatgtgcctgaggatctcttcctcccagggacgctgtattacctccagagggacgtcgagaatataaatggcgttgaggacgagtcgtacacgctctggagaggcaacgccggggagaatttccagcggatactgttgtctggcaatttgatgtctgatcacaaatgcgatagcatacagtacgcgctcagagatgtgctcaagactctgcccctccctctgcccctgcaggaggattgatactaccaagttccaaagcttatgcagaaagcgggcttcgcaaaaatcgagtgttttgttgtacagttttaggttatgcaagggattgccaagaatgacaaagtgctaggaaactctcaagttgcagttcagagtttctggtgctgatctaggtgtagtacacctcttctttttttacaagaggtatatatagtgtaactctttgaaacttgagataaaagggtgacg

SEQ ID NO: 15797 - protein, 540 aa, Triticum aestivum
  peptide (1)..(540): Ceres Seq. ID no. 13597827
  misc_feature (123)..(532): NCBI GI NO: 15227944 NR Description: lipase (class 3) family [Arabidopsis thaliana]
  misc_feature (130)..(437): NCBI GI NO: 22328699 NR Description: lipase (class 3) family [Arabidopsis thaliana]
  misc_feature (58)..(437): NCBI GI NO: 18400268 NR Description: lipase (class 3) family [Arabidopsis thaliana]
  misc_feature (130)..(437): NCBI GI NO: 17064828 NR Description: Unknown protein [Arabidopsis thaliana]
  misc_feature (148)..(398): NCBI GI NO: 34894492 NR Description: OJ1116_C07.9
  misc_feature (58)..(437): NCBI GI NO: 9294632 NR Description: emb|CAB10386
  misc_feature (225)..(437): NCBI GI NO: 7485204 NR Description: hypothetical protein - Arabidopsis thaliana
  misc_feature (143)..(455): NCBI GI NO: 34897262 NR Description: putative heat-shock protein
  misc_feature (205)..(528): NCBI GI NO: 26352195 NR Description: unnamed protein product [Mus musculus]
  misc_feature (230)..(377): NCBI GI NO: 7486555 NR Description: hypothetical protein F6N23
IYPGPAEPMAAKHLLSRARLLLTRHRSRPTILPPALTRLLFGGTTTPAEPEDDDKARARAAAAAAAVALDAKRAKREGSDDDDEGAGLPWTSWRPDVAWLTKALEPALQLYKHYNWKPFASDNIPASTRTFSEIISDLQHSKVSIQDWSLSDLTVGLYLIYLTQASAKNAQAFKGVQISSNKKVQELIYHLELAKGCYKGSATGLAKHSMLRPRNVLKFVKDSSIFRPGYYIGIDPRAKLVILGIRGTHTVYDLVTDLVALSDKKVSPKGFSTHFGTYEAARWYLRHELSIIRKCLEKHKDYKLRLVGHSLGGASAALLAIMLRKKSKEELGFSPDIVSAVGFGVPPCVSREIAESCASYVTTVVLQDDIVPRLSAASLARLRNEIIETDWAKVLEKEDWKHIVDIVTNAKLVVSSIQDVANKLADYAKVVTSASSGDAAKDQPRLQGPTKVLKPDGEEDVYVPEDLFLPGTLYYLQRDVENINGVEDESYTLWRGNAGENFQRILLSGNLMSDHKCDSIQYALRDVLKTLPLPLPLQED

SEQ ID NO: 15798 - protein, 532 aa, Triticum aestivum
  peptide (1)..(532): Ceres Seq. ID no. 13597828
  misc_feature (115)..(524): NCBI GI NO: 15227944 NR Description: lipase (class 3) family [Arabidopsis thaliana]
  misc_feature (122)..(429): NCBI GI NO: 22328699 NR Description: lipase (class 3) family [Arabidopsis thaliana]
  misc_feature (50)..(429): NCBI GI NO: 18400268 NR Description: lipase (class 3) family [Arabidopsis thaliana]
  misc_feature (122)..(429): NCBI GI NO: 17064828 NR Description: Unknown protein [Arabidopsis thaliana]
  misc_feature (140)..(390): NCBI GI NO: 34894492 NR Description: OJ1116_C07.9
  misc_feature (50)..(429): NCBI GI NO: 9294632 NR Description: emb|CAB10386
  misc_feature (217)..(429): NCBI GI NO: 7485204 NR Description: hypothetical protein - Arabidopsis thaliana
  misc_feature (135)..(447): NCBI GI NO: 34897262 NR Description: putative heat-shock protein
  misc_feature (197)..(520): NCBI GI NO: 26352195 NR Description: unnamed protein product [Mus musculus]
  misc_feature (222)..(369): NCBI GI NO: 7486555 NR Description: hypothetical protein F6N23
MAAKHLLSRARLLLTRHRSRPTILPPALTRLLFGGTTTPAEPEDDDKARARAAAAAAAVALDAKRAKREGSDDDDEGAGLPWTSWRPDVAWLTKALEPALQLYKHYNWKPFASDNIPASTRTFSEIISDLQHSKVSIQDWSLSDLTVGLYLIYLTQASAKNAQAFKGVQISSNKKVQELIYHLELAKGCYKGSATGLAKHSMLRPRNVLKFVKDSSIFRPGYYIGIDPRAKLVILGIRGTHTVYDLVTDLVALSDKKVSPKGFSTHFGTYEAARWYLRHELSIIRKCLEKHKDYKLRLVGHSLGGASAALLAIMLRKKSKEELGFSPDIVSAVGFGVPPCVSREIAESCASYVTTVVLQDDIVPRLSAASLARLRNEIIETDWAKVLEKEDWKHIVDIVTNAKLVVSSIQDVANKLADYAKVVTSASSGDAAKDQPRLQGPTKVLKPDGEEDVYVPEDLFLPGTLYYLQRDVENINGVEDESYTLWRGNAGENFQRILLSGNLMSDHKCDSIQYALRDVLKTLPLPLPLQED

SEQ ID NO: 15799 - protein, 331 aa, Triticum aestivum
  peptide (1)..(331): Ceres Seq. ID no. 13597829
  misc_feature (1)..(323): NCBI GI NO: 15227944 NR Description: lipase (class 3) family [Arabidopsis thaliana]
  misc_feature (1)..(228): NCBI GI NO: 22328699 NR Description: lipase (class 3) family [Arabidopsis thaliana]
  misc_feature (1)..(228): NCBI GI NO: 18400268 NR Description: lipase (class 3) family [Arabidopsis thaliana]
  misc_feature (1)..(228): NCBI GI NO: 17064828 NR Description: Unknown protein [Arabidopsis thaliana]
  misc_feature (1)..(189): NCBI GI NO: 34894492 NR Description: OJ1116_C07.9
  misc_feature (1)..(228): NCBI GI NO: 9294632 NR Description: emb|CAB10386
  misc_feature (16)..(228): NCBI GI NO: 7485204 NR Description: hypothetical protein - Arabidopsis thaliana
  misc_feature (1)..(246): NCBI GI NO: 34897262 NR Description: putative heat-shock protein
  misc_feature (1)..(319): NCBI GI NO: 26352195 NR Description: unnamed protein product [Mus musculus]
  misc_feature (21)..(168): NCBI GI NO: 7486555 NR Description: hypothetical protein F6N23
MLRPRNVLKFVKDSSIFRPGYYIGIDPRAKLVILGIRGTHTVYDLVTDLVALSDKKVSPKGFSTHFGTYEAARWYLRHELSIIRKCLEKHKDYKLRLVGHSLGGASAALLAIMLRKKSKEELGFSPDIVSAVGFGVPPCVSREIAESCASYVTTVVLQDDIVPRLSAASLARLRNEIIETDWAKVLEKEDWKHIVDIVTNAKLVVSSIQDVANKLADYAKVVTSASSGDAAKDQPRLQGPTKVLKPDGEEDVYVPEDLFLPGTLYYLQRDVENINGVEDESYTLWRGNAGENFQRILLSGNLMSDHKCDSIQYALRDVLKTLPLPLPLQED

SEQ ID NO: 15800 - DNA, 1165 bp, Triticum aestivum
  misc_feature (1)..(1165): Ceres Seq. ID no. 14302761
attttctagaaccctagcacgattcccaaaacccaaagctcctcctcatcctcttccatggcgatggcgttcgcgctcccgctcctcctcgtgccccgccccatcgtctctccgagacccgctgcagcgggccgcttcctttccctctccgctcccctgtccaccgccgctcccgcccctgcccccgtcgagcccctgaagggcggcggccgcctcgcgcggctccagactctccacgcagcctcctgctgcaactccgcccccgcagcagcatctggaggagtggaggcggcccgggcgaagggcttgcagctcgtggcctggtaccttctgtctcttgacaagcatccggtggcgaccaaggctgtcacttctgctgtgctgactctggccggggacctcatctgccagcttgtaattgataaagtgccagagctagacctgaagagaacatttgtgttcacgttattgggacttgtcctggtggggccaacgttgcatttctggtacttgtatttgagtaaattagtgacgatcagcgggacatctggtgtcatttctcgcctgttacttgaccagttcatcttctctcctgttttcattggtgtcttcatgagcttactcgtaaccttggagggaaagccatctcttgtagtgccaaagcttaagcaggagtggttctcttcattgatcgcgaattggcaattgtggataccgttccagttttttaatttctattttgtcccacagaagctccaggttcttgctgctaattttgtagcccttgcatggaacgtgattttgtcatataaagctcataagaaggttatcgcggagtagtcaaataggtgagagagtagactctagggcggggtatctaagccggttgcaacatgtggcgatgtaaggctggaagaataaacctattatcagttatcctggcgtctcgtctgtgttacccaaccgatgaaacgcctgcctagtattgtaaattaacgtccatcttgtctgtcgagtgcagcccgcgatgccagttaatcatgcgttgtacaatctgtataaccgtttgtgatgggaggttgttcttggtttccgaagaattacataatgtaaaattctggggttcctagcaaatcaaaactcaggccccgggggtgttattggc

SEQ ID NO: 15801 - protein, 260 aa, Triticum aestivum
  peptide (1)..(260): Ceres Seq. ID no. 14302762
  misc_feature (192)..(258): Pfam Name: Pfam Description:  Mpv17 / PMP22 family
  misc_feature (71)..(260): NCBI GI NO: 15241166 NR Description: expressed protein [Arabidopsis thaliana]
  misc_feature (71)..(260): NCBI GI NO: 16648746 NR Description: AT5g19750/T29J13_170 [Arabidopsis thaliana]
  misc_feature (71)..(260): NCBI GI NO: 21594286 NR Description: unknown [Arabidopsis thaliana]
  misc_feature (68)..(250): NCBI GI NO: 13928796 NR Description: peroxisomal membrane protein 2
  misc_feature (68)..(250): NCBI GI NO: 10954089 NR Description: 22 kDa peroxisomal membrane protein PMP22
  misc_feature (86)..(251): NCBI GI NO: 32417658 NR Description: hypothetical protein [Neurospora crassa]
  misc_feature (68)..(250): NCBI GI NO: 6679577 NR Description: peroxisomal membrane protein 2
  misc_feature (96)..(255): NCBI GI NO: 32766323 NR Description: Unknown (protein for MGC:63573) [Danio rerio]
  misc_feature (68)..(250): NCBI GI NO: 8923892 NR Description: peroxisomal membrane protein 2, 22kDa
  misc_feature (57)..(256): NCBI GI NO: 15226016 NR Description: peroxisomal membrane protein, putative (22 kDa)
MAMAFALPLLLVPRPIVSPRPAAAGRFLSLSAPLSTAAPAPAPVEPLKGGGRLARLQTLHAASCCNSAPAAASGGVEAARAKGLQLVAWYLLSLDKHPVATKAVTSAVLTLAGDLICQLVIDKVPELDLKRTFVFTLLGLVLVGPTLHFWYLYLSKLVTISGTSGVISRLLLDQFIFSPVFIGVFMSLLVTLEGKPSLVVPKLKQEWFSSLIANWQLWIPFQFFNFYFVPQKLQVLAANFVALAWNVILSYKAHKKVIAE

SEQ ID NO: 15802 - protein, 258 aa, Triticum aestivum
  peptide (1)..(258): Ceres Seq. ID no. 14302763
  misc_feature (190)..(256): Pfam Name: Pfam Description:  Mpv17 / PMP22 family
  misc_feature (69)..(258): NCBI GI NO: 15241166 NR Description: expressed protein [Arabidopsis thaliana]
  misc_feature (69)..(258): NCBI GI NO: 21594286 NR Description: unknown [Arabidopsis thaliana]
  misc_feature (69)..(258): NCBI GI NO: 16648746 NR Description: AT5g19750/T29J13_170 [Arabidopsis thaliana]
  misc_feature (66)..(248): NCBI GI NO: 13928796 NR Description: peroxisomal membrane protein 2
  misc_feature (66)..(248): NCBI GI NO: 10954089 NR Description: 22 kDa peroxisomal membrane protein PMP22
  misc_feature (84)..(249): NCBI GI NO: 32417658 NR Description: hypothetical protein [Neurospora crassa]
  misc_feature (66)..(248): NCBI GI NO: 6679577 NR Description: peroxisomal membrane protein 2
  misc_feature (94)..(253): NCBI GI NO: 32766323 NR Description: Unknown (protein for MGC:63573) [Danio rerio]
  misc_feature (66)..(248): NCBI GI NO: 8923892 NR Description: peroxisomal membrane protein 2, 22kDa
  misc_feature (55)..(254): NCBI GI NO: 15226016 NR Description: peroxisomal membrane protein, putative (22 kDa)
MAFALPLLLVPRPIVSPRPAAAGRFLSLSAPLSTAAPAPAPVEPLKGGGRLARLQTLHAASCCNSAPAAASGGVEAARAKGLQLVAWYLLSLDKHPVATKAVTSAVLTLAGDLICQLVIDKVPELDLKRTFVFTLLGLVLVGPTLHFWYLYLSKLVTISGTSGVISRLLLDQFIFSPVFIGVFMSLLVTLEGKPSLVVPKLKQEWFSSLIANWQLWIPFQFFNFYFVPQKLQVLAANFVALAWNVILSYKAHKKVIAE

SEQ ID NO: 15803 - DNA, 1417 bp, Triticum aestivum
  misc_feature (1)..(1417): Ceres Seq. ID no. 13584665
aacggtggaccagacaccgcagcaccaacgcaaatcctcaccactctctcctccgcctcgcaccatcccctcgccgccgccgccgccgccgccatgttctggctccgtcgcggcgtcctcgctcaggtcctcccttcttcctccgcctctcccgtatcccctctccaccgcctcatctccgccgccgcgcccgccatctctccaaacatcagattcgccgtggaggagtacctcgtctccacctgcggcctcacgcgaccacaggccctaaaggcctccgccaagctttcccacctcaagtcccccgccaatcccgacgccgtgctcgccttcctcgccggcctcggcctctccgacgccgatgtcgccgccctcgtcgccaaggacccgcagttcctctgcgccagcgtggagagaaccctggcacccgtcgtcgccgggctctctggcctcggcttatcacgttccgacatcgcgcgcctcgcctcgctctcccgttacagattccgctgtagatccatcgtctccaagctgcagtactacatgcctttctttgggtcctttgagaatctcctccgagccctcaagaggaacttctaccttcactcggctgacctcgatgatgtggtcaagcccaacgtcgcgatgctgcgggagtgcgggctaggtgcttgtgatattgtcaagctatgcatcagtcaaccatggcttctcaccgccaacctggagcgtgtccaggcgatggtggaatgcgctgaaaacataggtgtgccccgtgcctctgggatgttcaggcatgcactgcacgctgttgcatttctcagcgaggacaagatcgcagccagggtgaagtacttgaagaacaccttcaggtggacggatgctgaggtaggcatggctgtttctaaggctccaatggtgctggcgaggtccaaggagtcgctgcagcgcaggtctgagttcctcatctccgaggtgggcttggaaccggtgtacattgctcaacggtcggaaataatcgggcacagcctagagggccggctcaggccccggtactatgctgtgaagtttctcaaggaaaatggattgctcaagcgtgacccaaactacagtaccgttttcaagattagtgagaaggcattcaggaagaagttcatattccctcacaaggaggctgcactccacctcacagaagactacgatgccgcttgcaagggggacgtgccgactaatttcagattcacataaagacgggctatgatgtaattgggtgctggttgtctgctgttgtatgactgttagatgctgggttggtcattgctaacgtgtgatggaattgataatttgatccccaaatactggtatgtaatgctatcactcagcagagaagaaaccattgattggttatgaacttctc

SEQ ID NO: 15804 - protein, 415 aa, Triticum aestivum
  peptide (1)..(415): Ceres Seq. ID no. 13584666
  misc_feature (109)..(383): Pfam Name: Pfam Description:  mTERF
  misc_feature (45)..(386): NCBI GI NO: 39545750 NR Description: OSJNBb0034I13.16
  misc_feature (36)..(400): NCBI GI NO: 18415647 NR Description: expressed protein [Arabidopsis thaliana]
  misc_feature (77)..(409): NCBI GI NO: 34394750 NR Description: unknown protein
  misc_feature (72)..(400): NCBI GI NO: 15218140 NR Description: hypothetical protein [Arabidopsis thaliana]
  misc_feature (55)..(407): NCBI GI NO: 15238313 NR Description: expressed protein [Arabidopsis thaliana]
  misc_feature (55)..(407): NCBI GI NO: 21553423 NR Description: unknown [Arabidopsis thaliana]
  misc_feature (72)..(400): NCBI GI NO: 25511650 NR Description: T22I11.2 protein - Arabidopsis thaliana
  misc_feature (109)..(401): NCBI GI NO: 18412304 NR Description: expressed protein [Arabidopsis thaliana]
  misc_feature (46)..(322): NCBI GI NO: 15220662 NR Description: expressed protein [Arabidopsis thaliana]
  misc_feature (296)..(398): NCBI GI NO: 15220662 NR Description: expressed protein [Arabidopsis thaliana]
NGGPDTAAPTQILTTLSSASHHPLAAAAAAAMFWLRRGVLAQVLPSSSASPVSPLHRLISAAAPAISPNIRFAVEEYLVSTCGLTRPQALKASAKLSHLKSPANPDAVLAFLAGLGLSDADVAALVAKDPQFLCASVERTLAPVVAGLSGLGLSRSDIARLASLSRYRFRCRSIVSKLQYYMPFFGSFENLLRALKRNFYLHSADLDDVVKPNVAMLRECGLGACDIVKLCISQPWLLTANLERVQAMVECAENIGVPRASGMFRHALHAVAFLSEDKIAARVKYLKNTFRWTDAEVGMAVSKAPMVLARSKESLQRRSEFLISEVGLEPVYIAQRSEIIGHSLEGRLRPRYYAVKFLKENGLLKRDPNYSTVFKISEKAFRKKFIFPHKEAALHLTEDYDAACKGDVPTNFRFT

SEQ ID NO: 15805 - protein, 384 aa, Triticum aestivum
  peptide (1)..(384): Ceres Seq. ID no. 13584667
  misc_feature (78)..(352): Pfam Name: Pfam Description:  mTERF
  misc_feature (14)..(355): NCBI GI NO: 39545750 NR Description: OSJNBb0034I13.16
  misc_feature (5)..(369): NCBI GI NO: 18415647 NR Description: expressed protein [Arabidopsis thaliana]
  misc_feature (46)..(378): NCBI GI NO: 34394750 NR Description: unknown protein
  misc_feature (41)..(369): NCBI GI NO: 15218140 NR Description: hypothetical protein [Arabidopsis thaliana]
  misc_feature (24)..(376): NCBI GI NO: 15238313 NR Description: expressed protein [Arabidopsis thaliana]
  misc_feature (24)..(376): NCBI GI NO: 21553423 NR Description: unknown [Arabidopsis thaliana]
  misc_feature (41)..(369): NCBI GI NO: 25511650 NR Description: T22I11.2 protein - Arabidopsis thaliana
  misc_feature (78)..(370): NCBI GI NO: 18412304 NR Description: expressed protein [Arabidopsis thaliana]
  misc_feature (15)..(291): NCBI GI NO: 15220662 NR Description: expressed protein [Arabidopsis thaliana]
  misc_feature (265)..(367): NCBI GI NO: 15220662 NR Description: expressed protein [Arabidopsis thaliana]
MFWLRRGVLAQVLPSSSASPVSPLHRLISAAAPAISPNIRFAVEEYLVSTCGLTRPQALKASAKLSHLKSPANPDAVLAFLAGLGLSDADVAALVAKDPQFLCASVERTLAPVVAGLSGLGLSRSDIARLASLSRYRFRCRSIVSKLQYYMPFFGSFENLLRALKRNFYLHSADLDDVVKPNVAMLRECGLGACDIVKLCISQPWLLTANLERVQAMVECAENIGVPRASGMFRHALHAVAFLSEDKIAARVKYLKNTFRWTDAEVGMAVSKAPMVLARSKESLQRRSEFLISEVGLEPVYIAQRSEIIGHSLEGRLRPRYYAVKFLKENGLLKRDPNYSTVFKISEKAFRKKFIFPHKEAALHLTEDYDAACKGDVPTNFRFT

SEQ ID NO: 15806 - protein, 234 aa, Triticum aestivum
  peptide (1)..(234): Ceres Seq. ID no. 13584668
  misc_feature (1)..(202): Pfam Name: Pfam Description:  mTERF
  misc_feature (1)..(205): NCBI GI NO: 39545750 NR Description: OSJNBb0034I13.16
  misc_feature (1)..(219): NCBI GI NO: 18415647 NR Description: expressed protein [Arabidopsis thaliana]
  misc_feature (1)..(228): NCBI GI NO: 34394750 NR Description: unknown protein
  misc_feature (1)..(219): NCBI GI NO: 15218140 NR Description: hypothetical protein [Arabidopsis thaliana]
  misc_feature (1)..(226): NCBI GI NO: 15238313 NR Description: expressed protein [Arabidopsis thaliana]
  misc_feature (1)..(226): NCBI GI NO: 21553423 NR Description: unknown [Arabidopsis thaliana]
  misc_feature (1)..(219): NCBI GI NO: 25511650 NR Description: T22I11.2 protein - Arabidopsis thaliana
  misc_feature (1)..(220): NCBI GI NO: 18412304 NR Description: expressed protein [Arabidopsis thaliana]
  misc_feature (1)..(141): NCBI GI NO: 15220662 NR Description: expressed protein [Arabidopsis thaliana]
  misc_feature (115)..(217): NCBI GI NO: 15220662 NR Description: expressed protein [Arabidopsis thaliana]
MPFFGSFENLLRALKRNFYLHSADLDDVVKPNVAMLRECGLGACDIVKLCISQPWLLTANLERVQAMVECAENIGVPRASGMFRHALHAVAFLSEDKIAARVKYLKNTFRWTDAEVGMAVSKAPMVLARSKESLQRRSEFLISEVGLEPVYIAQRSEIIGHSLEGRLRPRYYAVKFLKENGLLKRDPNYSTVFKISEKAFRKKFIFPHKEAALHLTEDYDAACKGDVPTNFRFT

SEQ ID NO: 15807 - DNA, 3007 bp, Triticum aestivum
  misc_feature (1)..(3007): Ceres Seq. ID no. 14302220
ctccaaaacaaaagccccgaagaaaccccaccaaactcctccatcctccgctcccatttccttcgtgccgtccgcctccgccgtctcgtctgccacccctcgccaccccctctcctccccaaggagcgcagccgcggagcccctcgcccccgtctcccatggcggcctctctcctccacgcagccgcctcctccccgctcgcgggcccctacccggccgcccgcgcggccttccgccccctcgcttcctccccattcctgcgcctcgcgcgctcctctcccgaccgccgtgcccgactggacttcccgctccgggcgctctcgggtggcgctcgcctctccaccggagtggccgccctccgtcctcgccgcttcgtcgccgccctcgcgggggaggaaccgatgagttcagaattgggtgatgacaaggaaaaggaaacggaaaagatcgaaatagagcctgaggaggcccaggaagtgtggagggaaatgctcaagcagttcaaggccgaggccatccgaatgcaggccctgacaacgcaggcatacgatgtctactccaagagggcgagggaggtgctgttagaggcctcagagaagctaaggatccaggcagataaagcacaaaaggacctgaccattatcgctgcagaggttggtgaggaggggcaggaatatctacagctggcagctaagaactccccagattcaatcaaggatatcaccgagacaatcaatgcagttggcaacctcaatgggccatcagagtataaggattatcatgtcggcatttcatttggtacctttcttactgtaggaggtttcctgaacttcatgctaactggaagtacatctgcaattcgctttggctttgttcttggctttgcactattggctctgggtatctcaagtttgagatcacaaagagcaggcggtcgtcagcctcgtcttctgctgaaagggcaagctgctattgcaagcgttatcttcttcaaggacttgtcagttttcttcaggtatgggtggtttccaaatgttttcgcggtccttctcagtggaatggtggcgaccttttacattcatcgcattgtgactggtggccacaaaggtcgcgcggagagcagttcagataactaatggttatacaacacacttggatgaatcatatgtccgcggaaacttgggttctgaagattgatggtgacccttcgccttaaggtttccttctttcatcagccttcaactcaggcacactctgtggtgtctctgaactcttaagtggttctatacagtgatacctggactcacaagacttgcctcgcatactcgcccctcacctttgttgctttcctcgtgtaatatagatgctgccccataagcagaataaggaatggcccttgaaggtctctagtatgtatcaatctgttcatcatttatgttgtttatttatgcaacgtagttgtaacacattgaatatccagtgaaatcccgaaaatcggtctgtcccaaaaaaaaaaaaaaaaagcttttttttttttttttttgatatctattccccccagatgtatgtatcagttcatgctacagatggagatggacagccgaatatgccgataaatatggcttacagtttcgacgagtcctacaattcagtagtgtagaaattatttctgaaccgaagaaaaccaggaaccattgcctggcctgcaatctcgagtagccgtcccaatcctcgatctgttctcagaccctcctccgtccgtcgcagctccagatttccttccccatggctccgatcaagatcggtatcaacggtttcggccggatcggcaggcttgtggccagggttgcgctccagagccccgatgtcgagctcgtcgccgtcaacgaccccttcatcaccaccgactacatgacctacatgttcaagtatgacactgtccacggacagtggaagcaccatgaagttaaggtgaaggactccaagacccttctcttcggtgagaaggaggttgctgtgtttggctgcaggaaccctgaggagatcccatgggctgctgctggtgctgagtacgttgttgagtccaccggtgttttcaccgacaaggacaaggctgcagctcacattaagggtggtgccaagaaggtcatcatttctgctcccagcaaggatgctcccatgtttgtctgtggtgtcaatgagaaggaatacaagtctgacatcgacattgtctccaacgctagctgcaccactaactgccttgctcctcttgctaaggttatcaatgacaggtttggcattgttgagggtttgatgaccacagttcatgccatgactgcaacccagaagactgttgatggtccttccagcaaggactggagaggtggaagggctgccagcttcaacatcattccaagcagcactggtgccgcaaaggctgttggcaaggtgctcccagagcttaacggaaagttgactggaatggccttccgtgttcccactgttgatgtttctgttgttgatctgactgttagacttgcgaagccagcaacctatgatcagattaaggctgctatcaaggaggagtctgagggaaacctcaagggcattttgggttacgttgatgaggaccttgtttccactgactttcagggtgacaacaggtccagcatcttcgatgccaaggccgggattgctctgaacgacaactttgtcaagcttgtctcctggtacgacaacgagtggggatacagcacccgcgtggtcgacctcatccgtcacatgcacagcaccaagtaaatgagaggcatgaagatacaggggagagtggtttgccccagaggagtgttcaaagcctcttcttctgagaataaatttttgtatggaattatgtcagctaaaaaccttttattggatgtatcctgatggttggtcacattttggtggtattatgtacttgcttgaactaaatcatgagtcattttcactcatcttctttggttatcat

SEQ ID NO: 15808 - protein, 377 aa, Triticum aestivum
  peptide (1)..(377): Ceres Seq. ID no. 14302221
  misc_feature (1)..(52): NCBI GI NO: 13027414 NR Description: glyceraldehyde-3-phosphate dehydrogenase type 2
  misc_feature (1)..(52): NCBI GI NO: 13027414 NR Description: glyceraldehyde-3-phosphate dehydrogenase type 2
PKQKPRRNPTKLLHPPLPFPSCRPPPPSRLPPLATPSPPQGAQPRSPSPPSPMAASLLHAAASSPLAGPYPAARAAFRPLASSPFLRLARSSPDRRARLDFPLRALSGGARLSTGVAALRPRRFVAALAGEEPMSSELGDDKEKETEKIEIEPEEAQEVWREMLKQFKAEAIRMQALTTQAYDVYSKRAREVLLEASEKLRIQADKAQKDLTIIAAEVGEEGQEYLQLAAKNSPDSIKDITETINAVGNLNGPSEYKDYHVGISFGTFLTVGGFLNFMLTGSTSAIRFGFVLGFALLALGISSLRSQRAGGRQPRLLLKGQAAIASVIFFKDLSVFFRYGWFPNVFAVLLSGMVATFYIHRIVTGGHKGRAESSSDN

SEQ ID NO: 15809 - protein, 337 aa, Triticum aestivum; identical to SEQ ID NO: 7255
  peptide (1)..(337): Ceres Seq. ID no. 14302222
  misc_feature (155)..(316): Pfam Name: Pfam Description:  Glyceraldehyde 3-phosphate dehydrogenase
  misc_feature (43)..(337): NCBI GI NO: 29150193 NR Description: putative glyceraldehydes 3-phosphate dehydrogenase
  misc_feature (1)..(47): NCBI GI NO: 29150193 NR Description: putative glyceraldehydes 3-phosphate dehydrogenase
  misc_feature (1)..(337): NCBI GI NO: 6166167 NR Description: Glyceraldehyde 3-phosphate dehydrogenase
  misc_feature (1)..(336): NCBI GI NO: 7431535 NR Description: glyceraldehyde-3-phosphate dehydrogenase
  misc_feature (33)..(337): NCBI GI NO: 120668 NR Description: Glyceraldehyde 3-phosphate dehydrogenase
  misc_feature (1)..(336): NCBI GI NO: 462137 NR Description: GLYCERALDEHYDE 3-PHOSPHATE DEHYDROGENASE
  misc_feature (1)..(337): NCBI GI NO: 120666 NR Description: Glyceraldehyde 3-phosphate dehydrogenase
  misc_feature (2)..(337): NCBI GI NO: 1345501 NR Description: glycolytic glyceraldehyde 3-phosphate dehydrogenase
  misc_feature (1)..(337): NCBI GI NO: 4539543 NR Description: glyceraldehyde-3-phosphate dehydrogenase
  misc_feature (1)..(336): NCBI GI NO: 462141 NR Description: Glyceraldehyde 3-phosphate dehydrogenase (GAPDH)

SEQ ID NO: 15810 - protein, 325 aa, Triticum aestivum
  peptide (1)..(325): Ceres Seq. ID no. 14302223
MAASLLHAAASSPLAGPYPAARAAFRPLASSPFLRLARSSPDRRARLDFPLRALSGGARLSTGVAALRPRRFVAALAGEEPMSSELGDDKEKETEKIEIEPEEAQEVWREMLKQFKAEAIRMQALTTQAYDVYSKRAREVLLEASEKLRIQADKAQKDLTIIAAEVGEEGQEYLQLAAKNSPDSIKDITETINAVGNLNGPSEYKDYHVGISFGTFLTVGGFLNFMLTGSTSAIRFGFVLGFALLALGISSLRSQRAGGRQPRLLLKGQAAIASVIFFKDLSVFFRYGWFPNVFAVLLSGMVATFYIHRIVTGGHKGRAESSSDN

SEQ ID NO: 15811 - DNA, 1506 bp, Triticum aestivum
  misc_feature (1)..(1506): Ceres Seq. ID no. 14302828
aaactcgagtctcggtcaacagacgtcgaagcatcacgaactaccgccgataactccggcggtcgccgccgatggactcctcttcgtcctccgtccctgcggctgcggagggggcgcttccggcgggggagaatctggctgtgttctggcacgagggcatgctggcccacgacgccggccgcggcgtgttcgactcgggccgcgacccgggcttcctcgacgtgctcgaccaccacccggagaacgccgaccgcgtccgcaacatggtatccatcctccgccgcgggcccatcgcgcccttcctctcttggcactccggcacccccgcccacgccagcgacctcctctccttccactccccagaatacattgaggagctcgtgcaggcgaatgccagtggacccaagaagttatgtgagggtactttcttgaactctggttcatggggcgctgcgcttctggctgccggaacaaccttatcagctgtgaggcacatactagacgggcatgggaagatagcctacgcattggtccgcccccctggccatcacgcgcagccggaccatgccgacggttactgctttctgaacaacgccgggcttgctgtgcagctggctctggattctggccgcgcaaaggttgccgttgttgacatagatgtgcactatggaaatggtaccgcagagggcttctatcgcacggacaacgtgttggcaatctctcttcacatgaagcatggtacttggggtccttcgcatctgcagagtggctcggctgatgagattggggaaggcaaggggcttgggtacaatctcaatatacctttgcctaatggcagtggggataaaggctatgagtatgcaatgaatgaattggttgtcccggcgattgacaagtttcaacctcagcttttggtttttgtcattggccaagattctagcatgtttgatccaaatggaagacagtgcttgaccatggatggttacaggaaaattggacaaataatgaggggcgtggctaatcgacatagcgatgggcaaatgttgattgtccaggaagggggttaccacatcagttattcagcatattgtctgcatgcgacactagaaggcgttctgaatcttgaggccccattgctggacgacccaatcgcatactatcccgaggatgagaagtacaccatggaagctgtcgacgtcacgaagaaacgctggaaagaatccattcccttcttgaaggacatttaaggacgcgttacgtctcttcttcgacgcagcggcaaacgacgaacctcggtctcgaatcatgtcatggtttgtattctcggaattaaatcgcactgtcaagaaaagagtgacgcagctcatgtagatgagcattaagagttttttttttcctttgtcgtttaagagaatgaatgaaaccagacattttcttgagcagtttgttgaactgagaatatgtttgttgcatcccgtccgttggattaataaagagatcatatat

SEQ ID NO: 15812 - protein, 391 aa, Triticum aestivum
  peptide (1)..(391): Ceres Seq. ID no. 14302829
  misc_feature (24)..(349): Pfam Name: Pfam Description:  Histone deacetylase family
  misc_feature (24)..(389): NCBI GI NO: 18390898 NR Description: HDA8 protein [Arabidopsis thaliana]
  misc_feature (24)..(290): NCBI GI NO: 25407044 NR Description: protein T27G7.14 [imported] - Arabidopsis thaliana
  misc_feature (292)..(389): NCBI GI NO: 25407044 NR Description: protein T27G7.14 [imported] - Arabidopsis thaliana
  misc_feature (65)..(389): NCBI GI NO: 16226923 NR Description: At1g08460/T27G7_7 [Arabidopsis thaliana]
  misc_feature (55)..(383): NCBI GI NO: 32038919 NR Description: hypothetical protein
  misc_feature (55)..(383): NCBI GI NO: 15598969 NR Description: probable acetylpolyamine aminohydrolase
  misc_feature (56)..(381): NCBI GI NO: 37526255 NR Description: hypothetical protein
  misc_feature (1)..(360): NCBI GI NO: 22959308 NR Description: hypothetical protein [Rhodobacter sphaeroides]
  misc_feature (55)..(365): NCBI GI NO: 11497747 NR Description: acetylpolyamine aminohydrolase (aphA)
  misc_feature (45)..(347): NCBI GI NO: 15789452 NR Description: acetoin utilization protein; Aup
MDSSSSSVPAAAEGALPAGENLAVFWHEGMLAHDAGRGVFDSGRDPGFLDVLDHHPENADRVRNMVSILRRGPIAPFLSWHSGTPAHASDLLSFHSPEYIEELVQANASGPKKLCEGTFLNSGSWGAALLAAGTTLSAVRHILDGHGKIAYALVRPPGHHAQPDHADGYCFLNNAGLAVQLALDSGRAKVAVVDIDVHYGNGTAEGFYRTDNVLAISLHMKHGTWGPSHLQSGSADEIGEGKGLGYNLNIPLPNGSGDKGYEYAMNELVVPAIDKFQPQLLVFVIGQDSSMFDPNGRQCLTMDGYRKIGQIMRGVANRHSDGQMLIVQEGGYHISYSAYCLHATLEGVLNLEAPLLDDPIAYYPEDEKYTMEAVDVTKKRWKESIPFLKDI

SEQ ID NO: 15813 - protein, 362 aa, Triticum aestivum
  peptide (1)..(362): Ceres Seq. ID no. 14302830
  misc_feature (1)..(320): Pfam Name: Pfam Description:  Histone deacetylase family
  misc_feature (1)..(360): NCBI GI NO: 18390898 NR Description: HDA8 protein [Arabidopsis thaliana]
  misc_feature (1)..(261): NCBI GI NO: 25407044 NR Description: protein T27G7.14 [imported] - Arabidopsis thaliana
  misc_feature (263)..(360): NCBI GI NO: 25407044 NR Description: protein T27G7.14 [imported] - Arabidopsis thaliana
  misc_feature (36)..(360): NCBI GI NO: 16226923 NR Description: At1g08460/T27G7_7 [Arabidopsis thaliana]
  misc_feature (26)..(354): NCBI GI NO: 32038919 NR Description: hypothetical protein
  misc_feature (26)..(354): NCBI GI NO: 15598969 NR Description: probable acetylpolyamine aminohydrolase
  misc_feature (27)..(352): NCBI GI NO: 37526255 NR Description: hypothetical protein
  misc_feature (1)..(331): NCBI GI NO: 22959308 NR Description: hypothetical protein [Rhodobacter sphaeroides]
  misc_feature (26)..(336): NCBI GI NO: 11497747 NR Description: acetylpolyamine aminohydrolase (aphA)
  misc_feature (16)..(318): NCBI GI NO: 15789452 NR Description: acetoin utilization protein; Aup
MLAHDAGRGVFDSGRDPGFLDVLDHHPENADRVRNMVSILRRGPIAPFLSWHSGTPAHASDLLSFHSPEYIEELVQANASGPKKLCEGTFLNSGSWGAALLAAGTTLSAVRHILDGHGKIAYALVRPPGHHAQPDHADGYCFLNNAGLAVQLALDSGRAKVAVVDIDVHYGNGTAEGFYRTDNVLAISLHMKHGTWGPSHLQSGSADEIGEGKGLGYNLNIPLPNGSGDKGYEYAMNELVVPAIDKFQPQLLVFVIGQDSSMFDPNGRQCLTMDGYRKIGQIMRGVANRHSDGQMLIVQEGGYHISYSAYCLHATLEGVLNLEAPLLDDPIAYYPEDEKYTMEAVDVTKKRWKESIPFLKDI

SEQ ID NO: 15814 - protein, 327 aa, Triticum aestivum
  peptide (1)..(327): Ceres Seq. ID no. 14302831
  misc_feature (1)..(285): Pfam Name: Pfam Description:  Histone deacetylase family
  misc_feature (1)..(325): NCBI GI NO: 18390898 NR Description: HDA8 protein [Arabidopsis thaliana]
  misc_feature (1)..(226): NCBI GI NO: 25407044 NR Description: protein T27G7.14 [imported] - Arabidopsis thaliana
  misc_feature (228)..(325): NCBI GI NO: 25407044 NR Description: protein T27G7.14 [imported] - Arabidopsis thaliana
  misc_feature (1)..(325): NCBI GI NO: 16226923 NR Description: At1g08460/T27G7_7 [Arabidopsis thaliana]
  misc_feature (1)..(319): NCBI GI NO: 32038919 NR Description: hypothetical protein
  misc_feature (1)..(319): NCBI GI NO: 15598969 NR Description: probable acetylpolyamine aminohydrolase
  misc_feature (1)..(317): NCBI GI NO: 37526255 NR Description: hypothetical protein
  misc_feature (1)..(296): NCBI GI NO: 22959308 NR Description: hypothetical protein [Rhodobacter sphaeroides]
  misc_feature (1)..(301): NCBI GI NO: 11497747 NR Description: acetylpolyamine aminohydrolase (aphA)
  misc_feature (1)..(283): NCBI GI NO: 15789452 NR Description: acetoin utilization protein; Aup
MVSILRRGPIAPFLSWHSGTPAHASDLLSFHSPEYIEELVQANASGPKKLCEGTFLNSGSWGAALLAAGTTLSAVRHILDGHGKIAYALVRPPGHHAQPDHADGYCFLNNAGLAVQLALDSGRAKVAVVDIDVHYGNGTAEGFYRTDNVLAISLHMKHGTWGPSHLQSGSADEIGEGKGLGYNLNIPLPNGSGDKGYEYAMNELVVPAIDKFQPQLLVFVIGQDSSMFDPNGRQCLTMDGYRKIGQIMRGVANRHSDGQMLIVQEGGYHISYSAYCLHATLEGVLNLEAPLLDDPIAYYPEDEKYTMEAVDVTKKRWKESIPFLKDI

SEQ ID NO: 15815 - DNA, 1190 bp, Triticum aestivum
  misc_feature (1)..(1190): Ceres Seq. ID no. 13590967
attacctagaacatcctaatcgaaaaaacaccaaaccgcagcacacagcgccaccgcgactgcgccactccttgcgttccgagtgacagaggccatggcgctcgccacctcccaccaccgccacctcgtccgccccgccgccgcggcccctcgcgtgccgctgcgtcccctccgcttcgccgccccccgatctctcccgaggatttgttgccaatctatcaactcagctaacgtcttgggagcttcctcaatgacagctgacgacgcagttccacaaccagttgtactgatagaccaagactcagaccgtgatgcaaccattgtgcagctgagttttggagatcgtttgggggcactacttgatacgatgaaggcactcaaggacctgggccttgatgtgacgaaaggaagtgtggcaactgattcatctgtcacacaaacaaagttccacatcatgcgattagggcgtaaggttgaggaccctgacatgttggaaacaatacgactgaccatcattaacaaccttctgcagtatcatcccgaatcaagcgagaagctagctatgggtgaattttttggaattaaagcccctgagaagaaggttgatgttgacgttgcaacacatgtaattgtgcaagatgatggaccgaaaagaagcatgctttacatagagacagctgatcgaccaggcttactcttggaagtaatcaagatcattactgacgtaaacgttgatgtgggatcagctgagattgatactgagggcttggttgccaaggacaagtttcatgtgagttacagaggcgcaaaacttaacagctcgttatctcaggtgctggttaattgtttgcgctattacctccggaggcccgagacagatgaagacagctattgatgattgttctgtggcggctcgtttcgagttcctgcctatgaagccttttgcactgcaatttctgttgtaagcaaaacaaaatatggcacatgtgttccgaaaatgcattaaaactggggcgtctgatgcagttatgttctatggtcggacatgtggcccttgggagctttagcagccccatcccactggtttcctagaggaatcacattggaaagcattcacgcgtgtcgagtgtggtctgtaagttcatagtactataattcatgtgcatgtaaaaaaccaggttacgtatgtg

SEQ ID NO: 15816 - protein, 266 aa, Triticum aestivum
  peptide (1)..(266): Ceres Seq. ID no. 13590968
  misc_feature (188)..(257): Pfam Name: Pfam Description:  ACT domain
  misc_feature (41)..(266): NCBI GI NO: 15238305 NR Description: ACT domain-containing protein
  misc_feature (41)..(266): NCBI GI NO: 21592963 NR Description: unknown [Arabidopsis thaliana]
  misc_feature (55)..(266): NCBI GI NO: 18394414 NR Description: expressed protein [Arabidopsis thaliana]
  misc_feature (62)..(140): NCBI GI NO: 25370627 NR Description: protein F4N2.2 [imported] - Arabidopsis thaliana
  misc_feature (188)..(258): NCBI GI NO: 25370627 NR Description: protein F4N2.2 [imported] - Arabidopsis thaliana
  misc_feature (62)..(140): NCBI GI NO: 15221589 NR Description: uridylyltransferase-related [Arabidopsis thaliana]
  misc_feature (188)..(258): NCBI GI NO: 15221589 NR Description: uridylyltransferase-related [Arabidopsis thaliana]
MALATSHHRHLVRPAAAAPRVPLRPLRFAAPRSLPRICCQSINSANVLGASSMTADDAVPQPVVLIDQDSDRDATIVQLSFGDRLGALLDTMKALKDLGLDVTKGSVATDSSVTQTKFHIMRLGRKVEDPDMLETIRLTIINNLLQYHPESSEKLAMGEFFGIKAPEKKVDVDVATHVIVQDDGPKRSMLYIETADRPGLLLEVIKIITDVNVDVGSAEIDTEGLVAKDKFHVSYRGAKLNSSLSQVLVNCLRYYLRRPETDEDSY

SEQ ID NO: 15817 - protein, 214 aa, Triticum aestivum
  peptide (1)..(214): Ceres Seq. ID no. 13590969
  misc_feature (136)..(205): Pfam Name: Pfam Description:  ACT domain
  misc_feature (1)..(214): NCBI GI NO: 15238305 NR Description: ACT domain-containing protein
  misc_feature (1)..(214): NCBI GI NO: 21592963 NR Description: unknown [Arabidopsis thaliana]
  misc_feature (3)..(214): NCBI GI NO: 18394414 NR Description: expressed protein [Arabidopsis thaliana]
  misc_feature (10)..(88): NCBI GI NO: 25370627 NR Description: protein F4N2.2 [imported] - Arabidopsis thaliana
  misc_feature (136)..(206): NCBI GI NO: 25370627 NR Description: protein F4N2.2 [imported] - Arabidopsis thaliana
  misc_feature (10)..(88): NCBI GI NO: 15221589 NR Description: uridylyltransferase-related [Arabidopsis thaliana]
  misc_feature (136)..(206): NCBI GI NO: 15221589 NR Description: uridylyltransferase-related [Arabidopsis thaliana]
MTADDAVPQPVVLIDQDSDRDATIVQLSFGDRLGALLDTMKALKDLGLDVTKGSVATDSSVTQTKFHIMRLGRKVEDPDMLETIRLTIINNLLQYHPESSEKLAMGEFFGIKAPEKKVDVDVATHVIVQDDGPKRSMLYIETADRPGLLLEVIKIITDVNVDVGSAEIDTEGLVAKDKFHVSYRGAKLNSSLSQVLVNCLRYYLRRPETDEDSY

SEQ ID NO: 15818 - protein, 175 aa, Triticum aestivum
  peptide (1)..(175): Ceres Seq. ID no. 13590970
  misc_feature (97)..(166): Pfam Name: Pfam Description:  ACT domain
  misc_feature (1)..(175): NCBI GI NO: 15238305 NR Description: ACT domain-containing protein
  misc_feature (1)..(175): NCBI GI NO: 21592963 NR Description: unknown [Arabidopsis thaliana]
  misc_feature (1)..(175): NCBI GI NO: 18394414 NR Description: expressed protein [Arabidopsis thaliana]
  misc_feature (1)..(49): NCBI GI NO: 25370627 NR Description: protein F4N2.2 [imported] - Arabidopsis thaliana
  misc_feature (97)..(167): NCBI GI NO: 25370627 NR Description: protein F4N2.2 [imported] - Arabidopsis thaliana
  misc_feature (1)..(49): NCBI GI NO: 15221589 NR Description: uridylyltransferase-related [Arabidopsis thaliana]
  misc_feature (97)..(167): NCBI GI NO: 15221589 NR Description: uridylyltransferase-related [Arabidopsis thaliana]
MKALKDLGLDVTKGSVATDSSVTQTKFHIMRLGRKVEDPDMLETIRLTIINNLLQYHPESSEKLAMGEFFGIKAPEKKVDVDVATHVIVQDDGPKRSMLYIETADRPGLLLEVIKIITDVNVDVGSAEIDTEGLVAKDKFHVSYRGAKLNSSLSQVLVNCLRYYLRRPETDEDSY

SEQ ID NO: 15819 - DNA, 1629 bp, Triticum aestivum
  misc_feature (1)..(1629): Ceres Seq. ID no. 13597648
agcgcgagacctctcccgcaagcaaacccaaatcggccgccgtcccctctcctcctccgcccacccccgccgccggtgccgcctcctcgcgagatcccgaccatggagggcagcagcggcctcgacgcggcgatcgagtcgctcctgaacacggagaagcagtgccgcctcgccggggatgtggccggcacccggaaggccgccgtcgacatcgtcgagctctgcttcaaggacgccgcctggaagacgctcaacgaccagatcgtcgtcctctccaagcggaggggccagctcaaacaggctattactgctgttgttcagaaagcgatggagtacattgacgtgacaccagacgtggagacacgtattgagcttatcaaaacattgagcagtgtcgctgctggaaaaatatatgtggagatagagagagctagattgatcaaaagacttgcaaaaattaaagaggagcagggaaagattgatgaagctgctgaaatcatgcaggaagttgctgttgaaacatttggctcgatggcaaagacagagaaacttgcattcattctggagcaggttcggctatgcctggatcgtcaagattatgtgcgcgcacaaattttatccaggaagattagccctagggtctttgatgcggatacatcaaaggacaaaaagaagccaaaggaaggcgataatatggttcaggaagcccctgcagatgtaccttcactcttagaactgaagcgcatctactatgaactgatgattcgctattactcacataacaatgattacctggaaatctgccgttgctacaagtcgatctatgaaattccatcaataaaagaggatccagcaaagtggacaccgattcttaggaagatctgttggttcttggtgctggcacctcatgatccaatgcagtcaagccttctcaatgctacactagaggataaaaacctttctgagatcccaaatttcagattactactgaagcaagttgttactatggaggtgatccagtggacaaagttgtgggaattcttcaaggatgaatacgagaacgagaagaatctccttggaggagctttaggcacaaaagctgcggaggatttgaagctgaggatcattgaacataatatcttggttgtttcaaagtactattcgaggattaccctgaagaggctggcggatcttctttgcttgagcctgcaggaggcggagaagcatatctcggacatggtgaactcaaaggctctgattgccaagatcgacagaccgatggggatcgtgtccttccggacggcccaggacagcaacggggtgctcaactcgtgggcgtcgaacctggagaagctcctggacctggtggagaagagctgcccccaaatacacaaggagacgatgatccccaaggcggtgttgaaagcctgaagtgaaccattttgaactgaatggccttgtttaggttgtgtgcgtagtagactttctgtggatctgaattcactttcactgtatgggtaaaactattctctctgctcaagtgggcgtcgcctgtttgctttgggaacttgtgtgcgaaccggtctggaaatactgtaaccccagggaatgacgaatactatttgctgt

SEQ ID NO: 15820 - protein, 476 aa, Triticum aestivum
  peptide (1)..(476): Ceres Seq. ID no. 13597649
  misc_feature (324)..(434): Pfam Name: Pfam Description:  PCI domain
  misc_feature (35)..(476): NCBI GI NO: 27573351 NR Description: putative proteasome regulatory non-ATPase subunit
  misc_feature (37)..(475): NCBI GI NO: 15242545 NR Description: 26S proteasome regulatory subunit (RPN5), putative
  misc_feature (35)..(476): NCBI GI NO: 10177207 NR Description: proteasome regulatory subunit-like
  misc_feature (35)..(476): NCBI GI NO: 30698065 NR Description: 26S proteasome regulatory subunit (RPN5), putative
  misc_feature (209)..(476): NCBI GI NO: 17298157 NR Description: 26S proteasome regulatory particle non-ATPase subunit5
  misc_feature (31)..(469): NCBI GI NO: 27503944 NR Description: Similar to proteasome
  misc_feature (31)..(469): NCBI GI NO: 27924244 NR Description: Similar to proteasome
  misc_feature (41)..(469): NCBI GI NO: 4506221 NR Description: proteasome 26S non-ATPase subunit 12 isoform 1
  misc_feature (41)..(469): NCBI GI NO: 13385384 NR Description: proteasome 26S non-ATPase subunit 12
  misc_feature (41)..(469): NCBI GI NO: 34874104 NR Description: similar to proteasome 26S non-ATPase subunit 12
SARPLPQANPNRPPSPLLLRPPPPPVPPPREIPTMEGSSGLDAAIESLLNTEKQCRLAGDVAGTRKAAVDIVELCFKDAAWKTLNDQIVVLSKRRGQLKQAITAVVQKAMEYIDVTPDVETRIELIKTLSSVAAGKIYVEIERARLIKRLAKIKEEQGKIDEAAEIMQEVAVETFGSMAKTEKLAFILEQVRLCLDRQDYVRAQILSRKISPRVFDADTSKDKKKPKEGDNMVQEAPADVPSLLELKRIYYELMIRYYSHNNDYLEICRCYKSIYEIPSIKEDPAKWTPILRKICWFLVLAPHDPMQSSLLNATLEDKNLSEIPNFRLLLKQVVTMEVIQWTKLWEFFKDEYENEKNLLGGALGTKAAEDLKLRIIEHNILVVSKYYSRITLKRLADLLCLSLQEAEKHISDMVNSKALIAKIDRPMGIVSFRTAQDSNGVLNSWASNLEKLLDLVEKSCPQIHKETMIPKAVLKA

SEQ ID NO: 15821 - protein, 442 aa, Triticum aestivum
  peptide (1)..(442): Ceres Seq. ID no. 13597650
  misc_feature (290)..(400): Pfam Name: Pfam Description:  PCI domain
  misc_feature (1)..(442): NCBI GI NO: 27573351 NR Description: putative proteasome regulatory non-ATPase subunit
  misc_feature (3)..(441): NCBI GI NO: 15242545 NR Description: 26S proteasome regulatory subunit (RPN5), putative
  misc_feature (1)..(442): NCBI GI NO: 10177207 NR Description: proteasome regulatory subunit-like
  misc_feature (1)..(442): NCBI GI NO: 30698065 NR Description: 26S proteasome regulatory subunit (RPN5), putative
  misc_feature (175)..(442): NCBI GI NO: 17298157 NR Description: 26S proteasome regulatory particle non-ATPase subunit5
  misc_feature (1)..(435): NCBI GI NO: 27503944 NR Description: Similar to proteasome
  misc_feature (1)..(435): NCBI GI NO: 27924244 NR Description: Similar to proteasome
  misc_feature (7)..(435): NCBI GI NO: 4506221 NR Description: proteasome 26S non-ATPase subunit 12 isoform 1
  misc_feature (7)..(435): NCBI GI NO: 13385384 NR Description: proteasome 26S non-ATPase subunit 12
  misc_feature (7)..(435): NCBI GI NO: 34874104 NR Description: similar to proteasome 26S non-ATPase subunit 12
MEGSSGLDAAIESLLNTEKQCRLAGDVAGTRKAAVDIVELCFKDAAWKTLNDQIVVLSKRRGQLKQAITAVVQKAMEYIDVTPDVETRIELIKTLSSVAAGKIYVEIERARLIKRLAKIKEEQGKIDEAAEIMQEVAVETFGSMAKTEKLAFILEQVRLCLDRQDYVRAQILSRKISPRVFDADTSKDKKKPKEGDNMVQEAPADVPSLLELKRIYYELMIRYYSHNNDYLEICRCYKSIYEIPSIKEDPAKWTPILRKICWFLVLAPHDPMQSSLLNATLEDKNLSEIPNFRLLLKQVVTMEVIQWTKLWEFFKDEYENEKNLLGGALGTKAAEDLKLRIIEHNILVVSKYYSRITLKRLADLLCLSLQEAEKHISDMVNSKALIAKIDRPMGIVSFRTAQDSNGVLNSWASNLEKLLDLVEKSCPQIHKETMIPKAVLKA

SEQ ID NO: 15822 - protein, 367 aa, Triticum aestivum
  peptide (1)..(367): Ceres Seq. ID no. 13597651
  misc_feature (215)..(325): Pfam Name: Pfam Description:  PCI domain
  misc_feature (1)..(367): NCBI GI NO: 27573351 NR Description: putative proteasome regulatory non-ATPase subunit
  misc_feature (1)..(366): NCBI GI NO: 15242545 NR Description: 26S proteasome regulatory subunit (RPN5), putative
  misc_feature (1)..(367): NCBI GI NO: 10177207 NR Description: proteasome regulatory subunit-like
  misc_feature (1)..(367): NCBI GI NO: 30698065 NR Description: 26S proteasome regulatory subunit (RPN5), putative
  misc_feature (100)..(367): NCBI GI NO: 17298157 NR Description: 26S proteasome regulatory particle non-ATPase subunit5
  misc_feature (1)..(360): NCBI GI NO: 27503944 NR Description: Similar to proteasome
  misc_feature (1)..(360): NCBI GI NO: 27924244 NR Description: Similar to proteasome
  misc_feature (1)..(360): NCBI GI NO: 4506221 NR Description: proteasome 26S non-ATPase subunit 12 isoform 1
  misc_feature (1)..(360): NCBI GI NO: 13385384 NR Description: proteasome 26S non-ATPase subunit 12
  misc_feature (1)..(360): NCBI GI NO: 34874104 NR Description: similar to proteasome 26S non-ATPase subunit 12
MEYIDVTPDVETRIELIKTLSSVAAGKIYVEIERARLIKRLAKIKEEQGKIDEAAEIMQEVAVETFGSMAKTEKLAFILEQVRLCLDRQDYVRAQILSRKISPRVFDADTSKDKKKPKEGDNMVQEAPADVPSLLELKRIYYELMIRYYSHNNDYLEICRCYKSIYEIPSIKEDPAKWTPILRKICWFLVLAPHDPMQSSLLNATLEDKNLSEIPNFRLLLKQVVTMEVIQWTKLWEFFKDEYENEKNLLGGALGTKAAEDLKLRIIEHNILVVSKYYSRITLKRLADLLCLSLQEAEKHISDMVNSKALIAKIDRPMGIVSFRTAQDSNGVLNSWASNLEKLLDLVEKSCPQIHKETMIPKAVLKA

SEQ ID NO: 15823 - DNA, 1880 bp, Triticum aestivum
  misc_feature (1)..(1880): Ceres Seq. ID no. 13655988
acccgacccatccatcctcctaccagtccgcctcctcaaccccgccgacgcccgcgcgtgaagatcgcccgctccccggccggccgccggcgtccagagcagatacatacagatggacagccataattctacgtcgccccatgttcctgaagtaaccatggacatctcatccgcttctggagcagctgggaacaaagcttgcagaggtgctgcttgcgacttctctgacgccagtaacacctcgaaagattcaaaggagaggtctgcatccatgaagaagctcctaattgctgtgatcctttgtgttatattcatggcggttgaagtggttggaggcatcaaagcaaacagtcttgcaatcttgactgatgctgcccatctcctttcggatgttgcagcctttgccatatctttgttctccctatgggcagctggttgggaagcgacacctcagcagtcatatggatttttccgcatagagattcttggggcactggtttccattcagcttatatggctcctcgctggcatacttgtctacgaagctattatgaggctcattaatgaaagtggcgaggtacagggctccctcatgtttgctgtatcagcttttggtttgtttgttaacatcataatggcagtgttgcttggtcatgaccatgggcacggtggacatggacacagccatggtcatggccatggacattcacatgaccacgatcatggtaactcagaggatgaccattcccatcatggagatcatgagcaggggcatgtacatcaccatgagcacagccatggtacttctattaccgttacaactaatcaccactctcattcgagcactggacaacatcaggatgttgagcaaccattgcttaaacatgatggtgattgtgagagtgcccagcctggagccaagcctgctaagaagcctcgccgcaacatcaatgttcacagtgcctatctgcatgtaattggggactccatccagagcatcggcgtaatgattggaggggctctcatctggtacaagcccgaatggaaggttattgatctcatatgcaccctcatcttctctgtgattgtactgttcaccacaatcaagatgattcggaacatacttgaggtccttatggagagcacgccccgcgagatcgacgccaccaggcttgaaagtggtctccgtgagatggaaggtgtgattgctgtccatgagctgcacatctgggctatcacagtggggaaggtgctcttggcatgccatgtgacgatcacgcaggatgctgatgctgataaaatgcttgacaaggtcattgggtacatcaaggcagagtacaacatcagtcatgtgaccattcagattgagcgagagtaaggcacatgtcaggtagttggggataaaggtgtgtgcctgttaacggtctatcatcttaatgcagttaatgttagacttgcacttgcaaaggcgttgcaggttcatctagctgttgcctttggtgctggagaaatattatatgtacgcgttttcgttagcccattagttgaatgaactattcgggtggtcctagtcgtttgtattcacatggatgcaatttccagacaaattttgagccccttgtgagtttatcaacctgcatgtgtagtttcagtgacaccctttcttagcactcttatgtaaagatctgctacggtatggacagtactgggtatggatgtttattcagtttctgttagctttactaagcttgcttccagcagtttttatgtgcgaatttgcaccttgtgccattgtgtgctttctgtcagggatgtaggtcatctggtgcctaaaatgaagtgcactgctgccagttttaatgcatccattccactattgc

SEQ ID NO: 15824 - protein, 421 aa, Triticum aestivum
  peptide (1)..(421): Ceres Seq. ID no. 13655989
  misc_feature (57)..(421): Pfam Name: Pfam Description:  Cation efflux family
  misc_feature (1)..(421): NCBI GI NO: 30420736 NR Description: zinc transporter
  misc_feature (1)..(421): NCBI GI NO: 16550925 NR Description: zinc transporter [Eucalyptus grandis]
  misc_feature (1)..(222): NCBI GI NO: 15231581 NR Description: zinc transporter
  misc_feature (216)..(421): NCBI GI NO: 15231581 NR Description: zinc transporter
  misc_feature (1)..(197): NCBI GI NO: 40287448 NR Description: heavy metal transporter MTP2 [Arabis shortii]
  misc_feature (223)..(420): NCBI GI NO: 40287448 NR Description: heavy metal transporter MTP2 [Arabis shortii]
  misc_feature (197)..(216): NCBI GI NO: 40287448 NR Description: heavy metal transporter MTP2 [Arabis shortii]
  misc_feature (7)..(206): NCBI GI NO: 28315880 NR Description: putative vacuolar metal-ion transport proteinMTP1t2
  misc_feature (223)..(420): NCBI GI NO: 28315880 NR Description: putative vacuolar metal-ion transport proteinMTP1t2
  misc_feature (27)..(200): NCBI GI NO: 15228646 NR Description: zinc transporter
MDSHNSTSPHVPEVTMDISSASGAAGNKACRGAACDFSDASNTSKDSKERSASMKKLLIAVILCVIFMAVEVVGGIKANSLAILTDAAHLLSDVAAFAISLFSLWAAGWEATPQQSYGFFRIEILGALVSIQLIWLLAGILVYEAIMRLINESGEVQGSLMFAVSAFGLFVNIIMAVLLGHDHGHGGHGHSHGHGHGHSHDHDHGNSEDDHSHHGDHEQGHVHHHEHSHGTSITVTTNHHSHSSTGQHQDVEQPLLKHDGDCESAQPGAKPAKKPRRNINVHSAYLHVIGDSIQSIGVMIGGALIWYKPEWKVIDLICTLIFSVIVLFTTIKMIRNILEVLMESTPREIDATRLESGLREMEGVIAVHELHIWAITVGKVLLACHVTITQDADADKMLDKVIGYIKAEYNISHVTIQIERE

SEQ ID NO: 15825 - protein, 406 aa, Triticum aestivum
  peptide (1)..(406): Ceres Seq. ID no. 13655990
  misc_feature (42)..(406): Pfam Name: Pfam Description:  Cation efflux family
  misc_feature (1)..(406): NCBI GI NO: 30420736 NR Description: zinc transporter
  misc_feature (1)..(406): NCBI GI NO: 16550925 NR Description: zinc transporter [Eucalyptus grandis]
  misc_feature (1)..(207): NCBI GI NO: 15231581 NR Description: zinc transporter
  misc_feature (201)..(406): NCBI GI NO: 15231581 NR Description: zinc transporter
  misc_feature (1)..(182): NCBI GI NO: 40287448 NR Description: heavy metal transporter MTP2 [Arabis shortii]
  misc_feature (208)..(405): NCBI GI NO: 40287448 NR Description: heavy metal transporter MTP2 [Arabis shortii]
  misc_feature (182)..(201): NCBI GI NO: 40287448 NR Description: heavy metal transporter MTP2 [Arabis shortii]
  misc_feature (1)..(191): NCBI GI NO: 28315880 NR Description: putative vacuolar metal-ion transport proteinMTP1t2
  misc_feature (208)..(405): NCBI GI NO: 28315880 NR Description: putative vacuolar metal-ion transport proteinMTP1t2
  misc_feature (12)..(185): NCBI GI NO: 15228646 NR Description: zinc transporter
MDISSASGAAGNKACRGAACDFSDASNTSKDSKERSASMKKLLIAVILCVIFMAVEVVGGIKANSLAILTDAAHLLSDVAAFAISLFSLWAAGWEATPQQSYGFFRIEILGALVSIQLIWLLAGILVYEAIMRLINESGEVQGSLMFAVSAFGLFVNIIMAVLLGHDHGHGGHGHSHGHGHGHSHDHDHGNSEDDHSHHGDHEQGHVHHHEHSHGTSITVTTNHHSHSSTGQHQDVEQPLLKHDGDCESAQPGAKPAKKPRRNINVHSAYLHVIGDSIQSIGVMIGGALIWYKPEWKVIDLICTLIFSVIVLFTTIKMIRNILEVLMESTPREIDATRLESGLREMEGVIAVHELHIWAITVGKVLLACHVTITQDADADKMLDKVIGYIKAEYNISHVTIQIERE

SEQ ID NO: 15826 - protein, 368 aa, Triticum aestivum
  peptide (1)..(368): Ceres Seq. ID no. 13655991
  misc_feature (4)..(368): Pfam Name: Pfam Description:  Cation efflux family
  misc_feature (1)..(368): NCBI GI NO: 30420736 NR Description: zinc transporter
  misc_feature (1)..(368): NCBI GI NO: 16550925 NR Description: zinc transporter [Eucalyptus grandis]
  misc_feature (1)..(169): NCBI GI NO: 15231581 NR Description: zinc transporter
  misc_feature (163)..(368): NCBI GI NO: 15231581 NR Description: zinc transporter
  misc_feature (1)..(144): NCBI GI NO: 40287448 NR Description: heavy metal transporter MTP2 [Arabis shortii]
  misc_feature (170)..(367): NCBI GI NO: 40287448 NR Description: heavy metal transporter MTP2 [Arabis shortii]
  misc_feature (144)..(163): NCBI GI NO: 40287448 NR Description: heavy metal transporter MTP2 [Arabis shortii]
  misc_feature (1)..(153): NCBI GI NO: 28315880 NR Description: putative vacuolar metal-ion transport proteinMTP1t2
  misc_feature (170)..(367): NCBI GI NO: 28315880 NR Description: putative vacuolar metal-ion transport proteinMTP1t2
  misc_feature (1)..(147): NCBI GI NO: 15228646 NR Description: zinc transporter
MKKLLIAVILCVIFMAVEVVGGIKANSLAILTDAAHLLSDVAAFAISLFSLWAAGWEATPQQSYGFFRIEILGALVSIQLIWLLAGILVYEAIMRLINESGEVQGSLMFAVSAFGLFVNIIMAVLLGHDHGHGGHGHSHGHGHGHSHDHDHGNSEDDHSHHGDHEQGHVHHHEHSHGTSITVTTNHHSHSSTGQHQDVEQPLLKHDGDCESAQPGAKPAKKPRRNINVHSAYLHVIGDSIQSIGVMIGGALIWYKPEWKVIDLICTLIFSVIVLFTTIKMIRNILEVLMESTPREIDATRLESGLREMEGVIAVHELHIWAITVGKVLLACHVTITQDADADKMLDKVIGYIKAEYNISHVTIQIERE

SEQ ID NO: 15827 - DNA, 1621 bp, Triticum aestivum
  misc_feature (1)..(1621): Ceres Seq. ID no. 13597656
atacctctcccgtgccagccagtctcccccctccctccctccacccgccgccgccgccacccacaaaccctagaaaccctagctctcatcccctcgcccgagacagccatggcggagcacgacctgacggcgagcgtggcggcgtggatggacccccacctggtgctcccggtgctggagttcctccaggagcgcggggtctacgccgacgaggagatcctgcggggcaagatccgcctcctcggcggcaccaacatggtcgactacgccatggacatccacaagtcgctccacggcaccgacgacgtccccgccgacatggtcgcccgccgctccgaggtcgtcgagaggctccgggccctccaggaggccgtcgcgcccatagtcgccttcctctccagcccgcagctcgtgcaggagctccacgccgacaagcagtacaacctccacatgctccaggagcgccaccagatcggcccggaccagatcgaggccctctaccagtacgccaagttccagtacgagtgcgggatgtactccgacgccgccgatttcctgtcccagtaccgcgctctgtgcaccaacagcgagaggagcctgagtgccctgtgggggaagctggcggcggagatactgatgcagaactgggatgtcgcgcaggaggagctcaacaggctcaaggagatgattgattccagcagcttcacctcgtcgcctgtgaaccagctccacagcaggatatggctgatgcactggagcctcttcatcttcttcaaccatgagaatggaaggaacgggatcatcgacctcttcttccaggacaggtacctcaatgctatccagaccaacgctccccatcttctgaggtaccttgctgctgcagttgttgtcaacaagaggagaaggaacatgcttaaggaactcatcaaggtcatccagcaggagcagaacagctacaaggatcccatcattgagttcctggagtgcctgtatgtcaagtatgattttgatggcgctcagcagaagctcgtcgagtgcgagcaggttatactgaatgatcctttcctgggcaagcgcgttgaagagaggaatggcatcgctgttcctctgagagacgagttccttgaaaatgctcgcctgttcatttttgagacttactgccgtatacatcgctgcatcgatattggtgtgcttgcggagaagctgaacatgacctatgatgaagccgagttgtggataatgaacatggtcaagagttccaagctagatgccaagattgattcagtgacgggaactctcatcatgacgaccaatcgtgttgatgtccatgagcagattattgagagcatgaagaacctcaatgccaggacctacatgctagcaaagagcgtcgtggatccagggcatgcagcagcacagcaggctgctcggtgagaccaacagatgatctgcagctttgaggcggtaaaaattactttgggaactttgttgttaggcagtgacttcgttgctagtatttgaatcatattgctacagcttatgctgatgttttaaatgctttgtactccttttactcaagtttatcgtcctatgaattaatactgcaaaagacgtttaacgc

SEQ ID NO: 15828 - protein, 477 aa, Triticum aestivum
  peptide (1)..(477): Ceres Seq. ID no. 13597657
  misc_feature (321)..(437): Pfam Name: Pfam Description:  PCI domain
  misc_feature (37)..(477): NCBI GI NO: 34900328 NR Description: putative translation initiation factor 3
  misc_feature (148)..(477): NCBI GI NO: 34900030 NR Description: putative eIF3e
  misc_feature (37)..(125): NCBI GI NO: 34900030 NR Description: putative eIF3e
  misc_feature (34)..(473): NCBI GI NO: 18410687 NR Description: translation initiation factor 3 -related protein
  misc_feature (37)..(467): NCBI GI NO: 34394686 NR Description: putative eukaryotic initiation factor 3E
  misc_feature (34)..(473): NCBI GI NO: 7689381 NR Description: eIF3e [Arabidopsis thaliana]
  misc_feature (34)..(235): NCBI GI NO: 11281940 NR Description: translation initiation factor 3-like protein -Arabidopsis thaliana
  misc_feature (276)..(473): NCBI GI NO: 11281940 NR Description: translation initiation factor 3-like protein -Arabidopsis thaliana
  misc_feature (37)..(464): NCBI GI NO: 4503521 NR Description: murine mammary tumor integration site 6
  misc_feature (37)..(464): NCBI GI NO: 12847562 NR Description: unnamed protein product [Mus musculus]
IPLPCQPVSPLPPSTRRRRHPQTLETLALIPSPETAMAEHDLTASVAAWMDPHLVLPVLEFLQERGVYADEEILRGKIRLLGGTNMVDYAMDIHKSLHGTDDVPADMVARRSEVVERLRALQEAVAPIVAFLSSPQLVQELHADKQYNLHMLQERHQIGPDQIEALYQYAKFQYECGMYSDAADFLSQYRALCTNSERSLSALWGKLAAEILMQNWDVAQEELNRLKEMIDSSSFTSSPVNQLHSRIWLMHWSLFIFFNHENGRNGIIDLFFQDRYLNAIQTNAPHLLRYLAAAVVVNKRRRNMLKELIKVIQQEQNSYKDPIIEFLECLYVKYDFDGAQQKLVECEQVILNDPFLGKRVEERNGIAVPLRDEFLENARLFIFETYCRIHRCIDIGVLAEKLNMTYDEAELWIMNMVKSSKLDAKIDSVTGTLIMTTNRVDVHEQIIESMKNLNARTYMLAKSVVDPGHAAAQQAAR

SEQ ID NO: 15829 - protein, 441 aa, Triticum aestivum
  peptide (1)..(441): Ceres Seq. ID no. 13597658
  misc_feature (285)..(401): Pfam Name: Pfam Description:  PCI domain
  misc_feature (1)..(441): NCBI GI NO: 34900328 NR Description: putative translation initiation factor 3
  misc_feature (112)..(441): NCBI GI NO: 34900030 NR Description: putative eIF3e
  misc_feature (1)..(89): NCBI GI NO: 34900030 NR Description: putative eIF3e
  misc_feature (1)..(437): NCBI GI NO: 18410687 NR Description: translation initiation factor 3 -related protein
  misc_feature (1)..(431): NCBI GI NO: 34394686 NR Description: putative eukaryotic initiation factor 3E
  misc_feature (1)..(437): NCBI GI NO: 7689381 NR Description: eIF3e [Arabidopsis thaliana]
  misc_feature (1)..(199): NCBI GI NO: 11281940 NR Description: translation initiation factor 3-like protein -Arabidopsis thaliana
  misc_feature (240)..(437): NCBI GI NO: 11281940 NR Description: translation initiation factor 3-like protein -Arabidopsis thaliana
  misc_feature (1)..(428): NCBI GI NO: 4503521 NR Description: murine mammary tumor integration site 6
  misc_feature (1)..(428): NCBI GI NO: 12847562 NR Description: unnamed protein product [Mus musculus]
MAEHDLTASVAAWMDPHLVLPVLEFLQERGVYADEEILRGKIRLLGGTNMVDYAMDIHKSLHGTDDVPADMVARRSEVVERLRALQEAVAPIVAFLSSPQLVQELHADKQYNLHMLQERHQIGPDQIEALYQYAKFQYECGMYSDAADFLSQYRALCTNSERSLSALWGKLAAEILMQNWDVAQEELNRLKEMIDSSSFTSSPVNQLHSRIWLMHWSLFIFFNHENGRNGIIDLFFQDRYLNAIQTNAPHLLRYLAAAVVVNKRRRNMLKELIKVIQQEQNSYKDPIIEFLECLYVKYDFDGAQQKLVECEQVILNDPFLGKRVEERNGIAVPLRDEFLENARLFIFETYCRIHRCIDIGVLAEKLNMTYDEAELWIMNMVKSSKLDAKIDSVTGTLIMTTNRVDVHEQIIESMKNLNARTYMLAKSVVDPGHAAAQQAAR

SEQ ID NO: 15830 - protein, 428 aa, Triticum aestivum
  peptide (1)..(428): Ceres Seq. ID no. 13597659
  misc_feature (272)..(388): Pfam Name: Pfam Description:  PCI domain
  misc_feature (1)..(428): NCBI GI NO: 34900328 NR Description: putative translation initiation factor 3
  misc_feature (99)..(428): NCBI GI NO: 34900030 NR Description: putative eIF3e
  misc_feature (1)..(76): NCBI GI NO: 34900030 NR Description: putative eIF3e
  misc_feature (1)..(424): NCBI GI NO: 18410687 NR Description: translation initiation factor 3 -related protein
  misc_feature (1)..(418): NCBI GI NO: 34394686 NR Description: putative eukaryotic initiation factor 3E
  misc_feature (1)..(424): NCBI GI NO: 7689381 NR Description: eIF3e [Arabidopsis thaliana]
  misc_feature (1)..(186): NCBI GI NO: 11281940 NR Description: translation initiation factor 3-like protein -Arabidopsis thaliana
  misc_feature (227)..(424): NCBI GI NO: 11281940 NR Description: translation initiation factor 3-like protein -Arabidopsis thaliana
  misc_feature (1)..(415): NCBI GI NO: 4503521 NR Description: murine mammary tumor integration site 6
  misc_feature (1)..(415): NCBI GI NO: 12847562 NR Description: unnamed protein product [Mus musculus]
MDPHLVLPVLEFLQERGVYADEEILRGKIRLLGGTNMVDYAMDIHKSLHGTDDVPADMVARRSEVVERLRALQEAVAPIVAFLSSPQLVQELHADKQYNLHMLQERHQIGPDQIEALYQYAKFQYECGMYSDAADFLSQYRALCTNSERSLSALWGKLAAEILMQNWDVAQEELNRLKEMIDSSSFTSSPVNQLHSRIWLMHWSLFIFFNHENGRNGIIDLFFQDRYLNAIQTNAPHLLRYLAAAVVVNKRRRNMLKELIKVIQQEQNSYKDPIIEFLECLYVKYDFDGAQQKLVECEQVILNDPFLGKRVEERNGIAVPLRDEFLENARLFIFETYCRIHRCIDIGVLAEKLNMTYDEAELWIMNMVKSSKLDAKIDSVTGTLIMTTNRVDVHEQIIESMKNLNARTYMLAKSVVDPGHAAAQQAAR

SEQ ID NO: 15831 - DNA, 1628 bp, Triticum aestivum
  misc_feature (1)..(1628): Ceres Seq. ID no. 13598601
  misc_feature (1422)..(1422): n is a, c, t, g, unknown, or other
ctcttcctcctctcgccccccgccgccgccatcccttccttatagagacagcgtgtaggcgccgggcgagcaggccaccaccgcaaccctagccagccagcccgactaacgccgccggttggagaggactagctattgctgctcgagagagagagatgtcgtcgggacggtacatggcctactcgccctccccgtccaccacgccgcactccccgcgcatctccggcctccgcgcctcctccgccgccgtcgccgaccaggagaagtaccttgcggagctgctcgcggagcgccacaagctgaacccgttcgtcccagtgctccctcatagcatacggttgctgaatcaagaaattttacgtgtttccacactattggagaacgcctcccttttaaaccaaagtggctttgaacatggtagtccactaacatcgggaggattatattcaaatggagcagcaactgatatgaatggatggacatcagcatttcaatcagaaagttcatcagcttatagttggcttggagggtctcaaggcagctcatctggactaattgtcaagaaaacaatgagggttgatattccagtagacaaatatccaacatacaacttcgttggtcgcatccttggtcccagaggaaattccttgaagcgagtggaggcaactactgactgccgtgtgcttataagaggccggggtagcattaaagatccagctcgggaggaaatgatgcgtggaaagccaggatatgaacatctgaatgaacccctacatatattggtcgaggcagagctgcctgttgaaattattgatgctcgtctgatgcaagcccgcgagatccttgaggatctgttaaggccaatgcaggacgagtctcaggacttcttcaagaagcagcagctccgggagcttgcaatgctcaatggcaccctccgtgaggaagggatgcaaagatctggttccgcatcccctttccacaacagccttggaatgaagagggccaagacaagggggtaaaaggccacgagtaccatgggagaagcaatcatctgtcctgagacggaaactgagtatgcctatgggtttgccttcgtggctaatggcgcaaaaatggtctcgcaccgctagcgtcggagcagcccgtacttgataatacatatgcctggagtcgtgttcgctgctactggagaggtttggttatggcaagactgggtgtcgactgtcgagctatatatcgggttgtgcaagaaagtggtttgtgtattgctatgagctatgactggggttttgatttatggttcttgtgcttgtatttgaacttttgaagaatgttatctggttaagttatttgggattgaaatgatgttgtaatctgttacagttatagtattgcttaataatagatggatattgtaataanaaaaaaaaaaaaaaaaaaaaaaaaaaaaaaaaaaaaaaaaaaaaaaaaaaaaaaaaaaaaaaaaaaaaaaaaaaaaaaaaaaaaaaaaaaaaaaaaaagtttttttcaacccccccaccccaaaggggggccccgaacccaattcccccaaaaaagaaacaaaaaaacccccccccctggcccgccttttaaaaacgcggaaatgg

SEQ ID NO: 15832 - protein, 287 aa, Triticum aestivum
  peptide (1)..(287): Ceres Seq. ID no. 13598602
  misc_feature (140)..(195): Pfam Name: Pfam Description:  KH domain
  misc_feature (4)..(286): NCBI GI NO: 15241136 NR Description: KH domain protein [Arabidopsis thaliana]
  misc_feature (4)..(287): NCBI GI NO: 15236738 NR Description: KH domain protein [Arabidopsis thaliana]
  misc_feature (4)..(286): NCBI GI NO: 20268733 NR Description: unknown protein [Arabidopsis thaliana]
  misc_feature (29)..(286): NCBI GI NO: 19424087 NR Description: putative RNA-binding protein
  misc_feature (9)..(285): NCBI GI NO: 40645104 NR Description: hypothetical protein [Nicotiana tabacum]
  misc_feature (3)..(285): NCBI GI NO: 12322716 NR Description: unknown protein; 28504-31237
  misc_feature (3)..(285): NCBI GI NO: 30680583 NR Description: KH domain protein [Arabidopsis thaliana]
  misc_feature (19)..(285): NCBI GI NO: 15224909 NR Description: KH domain protein [Arabidopsis thaliana]
  misc_feature (1)..(284): NCBI GI NO: 34900448 NR Description: contains EST C27129
  misc_feature (12)..(285): NCBI GI NO: 22329449 NR Description: KH domain quaking protein, putative
MSSGRYMAYSPSPSTTPHSPRISGLRASSAAVADQEKYLAELLAERHKLNPFVPVLPHSIRLLNQEILRVSTLLENASLLNQSGFEHGSPLTSGGLYSNGAATDMNGWTSAFQSESSSAYSWLGGSQGSSSGLIVKKTMRVDIPVDKYPTYNFVGRILGPRGNSLKRVEATTDCRVLIRGRGSIKDPAREEMMRGKPGYEHLNEPLHILVEAELPVEIIDARLMQAREILEDLLRPMQDESQDFFKKQQLRELAMLNGTLREEGMQRSGSASPFHNSLGMKRAKTRG

SEQ ID NO: 15833 - protein, 281 aa, Triticum aestivum
  peptide (1)..(281): Ceres Seq. ID no. 13598603
  misc_feature (134)..(189): Pfam Name: Pfam Description:  KH domain
  misc_feature (1)..(280): NCBI GI NO: 15241136 NR Description: KH domain protein [Arabidopsis thaliana]
  misc_feature (1)..(281): NCBI GI NO: 15236738 NR Description: KH domain protein [Arabidopsis thaliana]
  misc_feature (1)..(280): NCBI GI NO: 20268733 NR Description: unknown protein [Arabidopsis thaliana]
  misc_feature (23)..(280): NCBI GI NO: 19424087 NR Description: putative RNA-binding protein
  misc_feature (3)..(279): NCBI GI NO: 40645104 NR Description: hypothetical protein [Nicotiana tabacum]
  misc_feature (1)..(279): NCBI GI NO: 12322716 NR Description: unknown protein; 28504-31237
  misc_feature (1)..(279): NCBI GI NO: 30680583 NR Description: KH domain protein [Arabidopsis thaliana]
  misc_feature (13)..(279): NCBI GI NO: 15224909 NR Description: KH domain protein [Arabidopsis thaliana]
  misc_feature (1)..(278): NCBI GI NO: 34900448 NR Description: contains EST C27129
  misc_feature (6)..(279): NCBI GI NO: 22329449 NR Description: KH domain quaking protein, putative
MAYSPSPSTTPHSPRISGLRASSAAVADQEKYLAELLAERHKLNPFVPVLPHSIRLLNQEILRVSTLLENASLLNQSGFEHGSPLTSGGLYSNGAATDMNGWTSAFQSESSSAYSWLGGSQGSSSGLIVKKTMRVDIPVDKYPTYNFVGRILGPRGNSLKRVEATTDCRVLIRGRGSIKDPAREEMMRGKPGYEHLNEPLHILVEAELPVEIIDARLMQAREILEDLLRPMQDESQDFFKKQQLRELAMLNGTLREEGMQRSGSASPFHNSLGMKRAKTRG

SEQ ID NO: 15834 - protein, 183 aa, Triticum aestivum
  peptide (1)..(183): Ceres Seq. ID no. 13598604
  misc_feature (36)..(91): Pfam Name: Pfam Description:  KH domain
  misc_feature (1)..(182): NCBI GI NO: 15241136 NR Description: KH domain protein [Arabidopsis thaliana]
  misc_feature (1)..(183): NCBI GI NO: 15236738 NR Description: KH domain protein [Arabidopsis thaliana]
  misc_feature (1)..(182): NCBI GI NO: 20268733 NR Description: unknown protein [Arabidopsis thaliana]
  misc_feature (1)..(182): NCBI GI NO: 19424087 NR Description: putative RNA-binding protein
  misc_feature (1)..(181): NCBI GI NO: 40645104 NR Description: hypothetical protein [Nicotiana tabacum]
  misc_feature (1)..(181): NCBI GI NO: 12322716 NR Description: unknown protein; 28504-31237
  misc_feature (1)..(181): NCBI GI NO: 30680583 NR Description: KH domain protein [Arabidopsis thaliana]
  misc_feature (1)..(181): NCBI GI NO: 15224909 NR Description: KH domain protein [Arabidopsis thaliana]
  misc_feature (1)..(180): NCBI GI NO: 34900448 NR Description: contains EST C27129
  misc_feature (1)..(181): NCBI GI NO: 22329449 NR Description: KH domain quaking protein, putative
MNGWTSAFQSESSSAYSWLGGSQGSSSGLIVKKTMRVDIPVDKYPTYNFVGRILGPRGNSLKRVEATTDCRVLIRGRGSIKDPAREEMMRGKPGYEHLNEPLHILVEAELPVEIIDARLMQAREILEDLLRPMQDESQDFFKKQQLRELAMLNGTLREEGMQRSGSASPFHNSLGMKRAKTRG

SEQ ID NO: 15835 - DNA, 1358 bp, Triticum aestivum
  misc_feature (1)..(1358): Ceres Seq. ID no. 13584730
ggtctcctcctccgccctcccacacccaaaaagctctagggaaacccccacgcgcgcgcctggtgccggatcggatcggggatgtgggagtcggtggcgctcacgctggccggcgccgccggcaacagcatcggcaaggtcctccagaagaagggcacccacatcctcccgcccctctccttcaagctcaaggtcatacggggctacgcgctcaacaggctctggatcagcggcttcctcctggacatgtgcggcgccgccctcatgctcactgcgctctcgcaggcgtcggtctctgtcgtgcagccgattgccggctgcggcctcgccatactctgcgtcttctcccatttttacctcaaggaggtcatgaatggccttgattggcttgccatcacaatggccggtctcggcaccataggagtcggtgtaggaggggaggagcagaaagtggaagagattccccttttcagtataccttggctggtgctcaccgttctcatcttgtttgttctgctcaacacttggcttcatatctacaaaaagcaaaggcgcgaacaagagttgactggacctgaagtgatcgaggaggtcatatacggcttagaatcaggcattttgtttgggatttcatcagtgatctctaagatgggatttgtgatgtctgaaatgggctttccgaagattgttgtgccagctgccatttcttgtagtgtggcctgcagtgctgtgggatttgtttaccagactcgaggtctcaagcatgggagggcaattgttgtgtccacgtgtacatcggtggcatctattgtgtctggtgttgtggctggtatggttgcacttgacgaacatctgccgacagctcctgcaggacgtttttttctcctgcttggatggttcttcattattacgggggtgatacttcttgttacttcaacccgattgattgcgcgcctacctaagcctgtgcagaagtttttgaagagtaatatggagcgttcacacagcatcaggaggcctggaccagcccgagggaaggatcccaaccaaagcacaacaatccatgcatcgacattacatatactaacctctacaggaaaagagaaggcctagaacagctgctggtagagcaagattgtcttaacacctttgatgggtcatgttgtcgtttaaatcattatgtggatgtacaagtctagagtagcatcttaaaagtttgggccggttgctcatatactgactgcccttgttataggtctaacagaagtttggaaaatctcctgtgaattttggtcaagttacatatcatcctgtggtgagttgtaagtggtatattcatttgttctcttccctttcgg

SEQ ID NO: 15836 - protein, 343 aa, Triticum aestivum
  peptide (1)..(343): Ceres Seq. ID no. 13584731
  misc_feature (4)..(107): Pfam Name: Pfam Description:  Small Multidrug Resistance protein
  misc_feature (1)..(343): NCBI GI NO: 34910446 NR Description: P0510F09.19
  misc_feature (1)..(342): NCBI GI NO: 22326741 NR Description: expressed protein [Arabidopsis thaliana]
  misc_feature (1)..(145): NCBI GI NO: 11357418 NR Description: hypothetical protein F14F18
  misc_feature (102)..(272): NCBI GI NO: 11357418 NR Description: hypothetical protein F14F18
  misc_feature (5)..(282): NCBI GI NO: 29833162 NR Description: putative integral membrane protein
  misc_feature (9)..(282): NCBI GI NO: 23018792 NR Description: hypothetical protein [Thermobifida fusca]
MWESVALTLAGAAGNSIGKVLQKKGTHILPPLSFKLKVIRGYALNRLWISGFLLDMCGAALMLTALSQASVSVVQPIAGCGLAILCVFSHFYLKEVMNGLDWLAITMAGLGTIGVGVGGEEQKVEEIPLFSIPWLVLTVLILFVLLNTWLHIYKKQRREQELTGPEVIEEVIYGLESGILFGISSVISKMGFVMSEMGFPKIVVPAAISCSVACSAVGFVYQTRGLKHGRAIVVSTCTSVASIVSGVVAGMVALDEHLPTAPAGRFFLLLGWFFIITGVILLVTSTRLIARLPKPVQKFLKSNMERSHSIRRPGPARGKDPNQSTTIHASTLHILTSTGKEKA

SEQ ID NO: 15837 - protein, 288 aa, Triticum aestivum
  peptide (1)..(288): Ceres Seq. ID no. 13584732
  misc_feature (1)..(52): Pfam Name: Pfam Description:  Small Multidrug Resistance protein
  misc_feature (1)..(288): NCBI GI NO: 34910446 NR Description: P0510F09.19
  misc_feature (1)..(287): NCBI GI NO: 22326741 NR Description: expressed protein [Arabidopsis thaliana]
  misc_feature (1)..(90): NCBI GI NO: 11357418 NR Description: hypothetical protein F14F18
  misc_feature (47)..(217): NCBI GI NO: 11357418 NR Description: hypothetical protein F14F18
  misc_feature (1)..(227): NCBI GI NO: 29833162 NR Description: putative integral membrane protein
  misc_feature (1)..(227): NCBI GI NO: 23018792 NR Description: hypothetical protein [Thermobifida fusca]
MCGAALMLTALSQASVSVVQPIAGCGLAILCVFSHFYLKEVMNGLDWLAITMAGLGTIGVGVGGEEQKVEEIPLFSIPWLVLTVLILFVLLNTWLHIYKKQRREQELTGPEVIEEVIYGLESGILFGISSVISKMGFVMSEMGFPKIVVPAAISCSVACSAVGFVYQTRGLKHGRAIVVSTCTSVASIVSGVVAGMVALDEHLPTAPAGRFFLLLGWFFIITGVILLVTSTRLIARLPKPVQKFLKSNMERSHSIRRPGPARGKDPNQSTTIHASTLHILTSTGKEKA

SEQ ID NO: 15838 - protein, 282 aa, Triticum aestivum
  peptide (1)..(282): Ceres Seq. ID no. 13584733
  misc_feature (1)..(282): NCBI GI NO: 34910446 NR Description: P0510F09.19
  misc_feature (1)..(281): NCBI GI NO: 22326741 NR Description: expressed protein [Arabidopsis thaliana]
  misc_feature (1)..(84): NCBI GI NO: 11357418 NR Description: hypothetical protein F14F18
  misc_feature (41)..(211): NCBI GI NO: 11357418 NR Description: hypothetical protein F14F18
  misc_feature (1)..(221): NCBI GI NO: 29833162 NR Description: putative integral membrane protein
  misc_feature (1)..(221): NCBI GI NO: 23018792 NR Description: hypothetical protein [Thermobifida fusca]
MLTALSQASVSVVQPIAGCGLAILCVFSHFYLKEVMNGLDWLAITMAGLGTIGVGVGGEEQKVEEIPLFSIPWLVLTVLILFVLLNTWLHIYKKQRREQELTGPEVIEEVIYGLESGILFGISSVISKMGFVMSEMGFPKIVVPAAISCSVACSAVGFVYQTRGLKHGRAIVVSTCTSVASIVSGVVAGMVALDEHLPTAPAGRFFLLLGWFFIITGVILLVTSTRLIARLPKPVQKFLKSNMERSHSIRRPGPARGKDPNQSTTIHASTLHILTSTGKEKA

SEQ ID NO: 15839 - DNA, 1722 bp, Triticum aestivum
  misc_feature (1)..(1722): Ceres Seq. ID no. 13598609
cccactttattgtgtttaaaaaaaacccaatccatactccagaagtccagatcgatcccaatggcgtcgtcggcgcttcgctgccttccaggcgacatcccgccgacgacgctgctcaccctaccaaacgagatgctcgaggaaatcctcctctgcctctccgacgccggcgacctcgtccgcgcctccatggcccgagtctccatccgccgcctcgtcacgaatcaccgcttcctccgccggttccgcactcgctacccgccgtctctactgggcatcgtctctccccttccccggccccgctgggaccggccgctgctgcaactggcccagccgccgcacccctccgcggccgccgcggccgctttctccgggcttgacgacgccgccgccgccgacttctcatgcgccttcctccccaaccccgcgcgctggcgtaggcgcgacttgcgggacggccgcgccctcttttccggcgtcccagagggcaccaatttcgactgccacgtctttgtcagggacctggctgtctgtgaccccctgtcccggcgctacatcctgctaccttccatccccgacgacctagccgccttggtgcagccacccgacgtgctgcgtttcgagcccttccttgctcctccggcggccgaggatgaggacggcttgtctttcagagttatttgcttggtgcagtgcaaaaccaagctggtcctcctcatcttctcttcaggttcaggtgctgaacaatggcgtgctgttacatttgacaattggatcagtttgctcacaggatcaggtaaccagccagagtcataccggcggtcagtaatacgccactatgcacacggctacttctgttgggtgctttctccggcaagcaagttgctcatgctcgacacacgcagcatgggtttctcagttgtggacctcccagatggcaccggtgaaaatgaagcacaggttgccattttggaggcagcgaatggaaggattaagatgtttattaatgagcatttcacaactgaactcaggtattatgtgttgcaaaatgatggagttggtgcaaaccagtggctgtcagaggcaacgttcaatttacccgtaaataatggcggctatatattcatgggcgtagcggggggatacttactcctacaagggcttggagaagacgaccaatatccattccatttggtttcgttgaatctgaagactttacagcttgagttgttccttgcatcaaagcgcaataacaagggtgctcatctgtttgccggtttcccaccatccttgtctttaccaactcttcgacatgatatgactgatgcctgcatttctaattcagatatctgatattgatgccgctgggagatgaaaccttgacgtctggaggtatggagcagcaacttggagcattatgtactggatggaatcatcaggctttccttttgagacggacgcaggcttgtttgcggtgctgactgttgtgcggctcggtgcttattttcagatatgtcatgggtgaatagttgtgataatctaccaaattagattcacaaatcaaatattactagataatttctatttttggaacctttgtttttatcagatatgcaatgtgactagaagcagggtgatatataccatcttctttgtttttgtttttgtgtaagtggtacaaatcggagatatacaaattggttctaccatcttctttgtttt

SEQ ID NO: 15840 - protein, 450 aa, Triticum aestivum
  peptide (1)..(450): Ceres Seq. ID no. 13598610
  misc_feature (21)..(436): NCBI GI NO: 34393354 NR Description: hypothetical protein
  misc_feature (34)..(409): NCBI GI NO: 34393351 NR Description: hypothetical protein
  misc_feature (34)..(436): NCBI GI NO: 34393352 NR Description: hypothetical protein
  misc_feature (30)..(436): NCBI GI NO: 37530888 NR Description: hypothetical protein
  misc_feature (34)..(436): NCBI GI NO: 37530886 NR Description: hypothetical protein
  misc_feature (38)..(386): NCBI GI NO: 32480316 NR Description: OSJNBa0042D13.1
PTLLCLKKTQSILQKSRSIPMASSALRCLPGDIPPTTLLTLPNEMLEEILLCLSDAGDLVRASMARVSIRRLVTNHRFLRRFRTRYPPSLLGIVSPLPRPRWDRPLLQLAQPPHPSAAAAAAFSGLDDAAAADFSCAFLPNPARWRRRDLRDGRALFSGVPEGTNFDCHVFVRDLAVCDPLSRRYILLPSIPDDLAALVQPPDVLRFEPFLAPPAAEDEDGLSFRVICLVQCKTKLVLLIFSSGSGAEQWRAVTFDNWISLLTGSGNQPESYRRSVIRHYAHGYFCWVLSPASKLLMLDTRSMGFSVVDLPDGTGENEAQVAILEAANGRIKMFINEHFTTELRYYVLQNDGVGANQWLSEATFNLPVNNGGYIFMGVAGGYLLLQGLGEDDQYPFHLVSLNLKTLQLELFLASKRNNKGAHLFAGFPPSLSLPTLRHDMTDACISNSDI

SEQ ID NO: 15841 - protein, 430 aa, Triticum aestivum
  peptide (1)..(430): Ceres Seq. ID no. 13598611
  misc_feature (1)..(416): NCBI GI NO: 34393354 NR Description: hypothetical protein
  misc_feature (14)..(389): NCBI GI NO: 34393351 NR Description: hypothetical protein
  misc_feature (14)..(416): NCBI GI NO: 34393352 NR Description: hypothetical protein
  misc_feature (10)..(416): NCBI GI NO: 37530888 NR Description: hypothetical protein
  misc_feature (14)..(416): NCBI GI NO: 37530886 NR Description: hypothetical protein
  misc_feature (18)..(366): NCBI GI NO: 32480316 NR Description: OSJNBa0042D13.1
MASSALRCLPGDIPPTTLLTLPNEMLEEILLCLSDAGDLVRASMARVSIRRLVTNHRFLRRFRTRYPPSLLGIVSPLPRPRWDRPLLQLAQPPHPSAAAAAAFSGLDDAAAADFSCAFLPNPARWRRRDLRDGRALFSGVPEGTNFDCHVFVRDLAVCDPLSRRYILLPSIPDDLAALVQPPDVLRFEPFLAPPAAEDEDGLSFRVICLVQCKTKLVLLIFSSGSGAEQWRAVTFDNWISLLTGSGNQPESYRRSVIRHYAHGYFCWVLSPASKLLMLDTRSMGFSVVDLPDGTGENEAQVAILEAANGRIKMFINEHFTTELRYYVLQNDGVGANQWLSEATFNLPVNNGGYIFMGVAGGYLLLQGLGEDDQYPFHLVSLNLKTLQLELFLASKRNNKGAHLFAGFPPSLSLPTLRHDMTDACISNSDI

SEQ ID NO: 15842 - protein, 406 aa, Triticum aestivum
  peptide (1)..(406): Ceres Seq. ID no. 13598612
  misc_feature (1)..(392): NCBI GI NO: 34393354 NR Description: hypothetical protein
  misc_feature (1)..(365): NCBI GI NO: 34393351 NR Description: hypothetical protein
  misc_feature (1)..(392): NCBI GI NO: 34393352 NR Description: hypothetical protein
  misc_feature (1)..(392): NCBI GI NO: 37530888 NR Description: hypothetical protein
  misc_feature (1)..(392): NCBI GI NO: 37530886 NR Description: hypothetical protein
  misc_feature (1)..(342): NCBI GI NO: 32480316 NR Description: OSJNBa0042D13.1
MLEEILLCLSDAGDLVRASMARVSIRRLVTNHRFLRRFRTRYPPSLLGIVSPLPRPRWDRPLLQLAQPPHPSAAAAAAFSGLDDAAAADFSCAFLPNPARWRRRDLRDGRALFSGVPEGTNFDCHVFVRDLAVCDPLSRRYILLPSIPDDLAALVQPPDVLRFEPFLAPPAAEDEDGLSFRVICLVQCKTKLVLLIFSSGSGAEQWRAVTFDNWISLLTGSGNQPESYRRSVIRHYAHGYFCWVLSPASKLLMLDTRSMGFSVVDLPDGTGENEAQVAILEAANGRIKMFINEHFTTELRYYVLQNDGVGANQWLSEATFNLPVNNGGYIFMGVAGGYLLLQGLGEDDQYPFHLVSLNLKTLQLELFLASKRNNKGAHLFAGFPPSLSLPTLRHDMTDACISNSDI

SEQ ID NO: 15843 - DNA, 1106 bp, Triticum aestivum
  misc_feature (1)..(1106): Ceres Seq. ID no. 15225495
aacatttcgtctccgcacgcgcgccagaggaagaagaccgcggaggaggagagaaagcgcgcgcgagaggaggaagaacatgttcatccagaaggcatggaggacggcagcgttcgggctctatggcttcacccagttcaccaaatccggcttcgtggaacacgccaagaaatttagagaggaggatatgcagatccggttggatgggaaaaattgcctggtaactggagcaaattctggcctaggttatgcgacagctcagggcttggcttctcatggcgccactgtctatatgctttgccgtaacaaagaaaggggagagactgctctgaatgaaataagatccaaaactggcaatatgaatgttcatctggagatatgtgacctttcatcaattaacgaagtcaagacatttgccacaaaattctcttcattggagaagccacttcatgtccttgttaacaacgccggcttactagagcacaagcgtacgactacatcggaaggtttggagctcaattttgctgtgaatgtggcagcaacatacactttaacagagctagtgatgccactgttggaaaaagcagcacctgatgctcgtgtcattacagttgcttcaggagggatgtacactgagccactgaacacgaatttacaatacagcgaaagcgaatttgacgggacaaaacaatatgctcgtaacaagagagttcaggttgctctcaccgaatggtgggctgagaaatacagcaacaagggagtgggtttctactccatgcatccaggatgggctgatacacctggagtctcgaagagcttgccgggactatcagagaagctatcaggaaacctgagatcgaacgaagaaggggctgacacagtggtctggttggctttgcaacccaaggagaagttagtcccaggggctttctacttcgaccgggccgaagcgcaaaaacatttgaagtatgctgggactgcagcatcccatgagcagataggttcgattgttgacagcattcgctccatctgtaacctacctgctaacccacaagtttatcagtgaagggatggaagtcctggacaaaaataaaattgaaattctg

SEQ ID NO: 15844 - protein, 354 aa, Triticum aestivum
  peptide (1)..(354): Ceres Seq. ID no. 15225496
  misc_feature (27)..(350): NCBI GI NO: 15234031 NR Description: short-chain dehydrogenase/reductase family protein
  misc_feature (33)..(329): NCBI GI NO: 34106252 NR Description: short chain dehydrogenase/reductase [Danio rerio]
  misc_feature (107)..(312): NCBI GI NO: 13375997 NR Description: hypothetical protein FLJ13639 [Homo sapiens]
  misc_feature (57)..(317): NCBI GI NO: 24586330 NR Description: CG30495-PA [Drosophila melanogaster]
  misc_feature (65)..(313): NCBI GI NO: 6630624 NR Description: M42C60 [Mus musculus]
  misc_feature (107)..(267): NCBI GI NO: 14602619 NR Description: FLJ13639 protein [Homo sapiens]
  misc_feature (57)..(313): NCBI GI NO: 31198521 NR Description: ENSANGP00000021522 [Anopheles gambiae]
  misc_feature (69)..(313): NCBI GI NO: 24586328 NR Description: CG30491-PA [Drosophila melanogaster]
  misc_feature (65)..(313): NCBI GI NO: 5668733 NR Description: UBE-1a [Mus musculus]
  misc_feature (65)..(313): NCBI GI NO: 5668735 NR Description: UBE-1b [Mus musculus]
TFRLRTRARGRRPRRRRESARERRKNMFIQKAWRTAAFGLYGFTQFTKSGFVEHAKKFREEDMQIRLDGKNCLVTGANSGLGYATAQGLASHGATVYMLCRNKERGETALNEIRSKTGNMNVHLEICDLSSINEVKTFATKFSSLEKPLHVLVNNAGLLEHKRTTTSEGLELNFAVNVAATYTLTELVMPLLEKAAPDARVITVASGGMYTEPLNTNLQYSESEFDGTKQYARNKRVQVALTEWWAEKYSNKGVGFYSMHPGWADTPGVSKSLPGLSEKLSGNLRSNEEGADTVVWLALQPKEKLVPGAFYFDRAEAQKHLKYAGTAASHEQIGSIVDSIRSICNLPANPQVYQ

SEQ ID NO: 15845 - protein, 328 aa, Triticum aestivum
  peptide (1)..(328): Ceres Seq. ID no. 15225497
  misc_feature (1)..(324): NCBI GI NO: 15234031 NR Description: short-chain dehydrogenase/reductase family protein
  misc_feature (7)..(303): NCBI GI NO: 34106252 NR Description: short chain dehydrogenase/reductase [Danio rerio]
  misc_feature (81)..(286): NCBI GI NO: 13375997 NR Description: hypothetical protein FLJ13639 [Homo sapiens]
  misc_feature (31)..(291): NCBI GI NO: 24586330 NR Description: CG30495-PA [Drosophila melanogaster]
  misc_feature (39)..(287): NCBI GI NO: 6630624 NR Description: M42C60 [Mus musculus]
  misc_feature (81)..(241): NCBI GI NO: 14602619 NR Description: FLJ13639 protein [Homo sapiens]
  misc_feature (31)..(287): NCBI GI NO: 31198521 NR Description: ENSANGP00000021522 [Anopheles gambiae]
  misc_feature (43)..(287): NCBI GI NO: 24586328 NR Description: CG30491-PA [Drosophila melanogaster]
  misc_feature (39)..(287): NCBI GI NO: 5668733 NR Description: UBE-1a [Mus musculus]
  misc_feature (39)..(287): NCBI GI NO: 5668735 NR Description: UBE-1b [Mus musculus]
MFIQKAWRTAAFGLYGFTQFTKSGFVEHAKKFREEDMQIRLDGKNCLVTGANSGLGYATAQGLASHGATVYMLCRNKERGETALNEIRSKTGNMNVHLEICDLSSINEVKTFATKFSSLEKPLHVLVNNAGLLEHKRTTTSEGLELNFAVNVAATYTLTELVMPLLEKAAPDARVITVASGGMYTEPLNTNLQYSESEFDGTKQYARNKRVQVALTEWWAEKYSNKGVGFYSMHPGWADTPGVSKSLPGLSEKLSGNLRSNEEGADTVVWLALQPKEKLVPGAFYFDRAEAQKHLKYAGTAASHEQIGSIVDSIRSICNLPANPQVYQ

SEQ ID NO: 15846 - protein, 292 aa, Triticum aestivum
  peptide (1)..(292): Ceres Seq. ID no. 15225498
  misc_feature (1)..(288): NCBI GI NO: 15234031 NR Description: short-chain dehydrogenase/reductase family protein
  misc_feature (1)..(267): NCBI GI NO: 34106252 NR Description: short chain dehydrogenase/reductase [Danio rerio]
  misc_feature (45)..(250): NCBI GI NO: 13375997 NR Description: hypothetical protein FLJ13639 [Homo sapiens]
  misc_feature (1)..(255): NCBI GI NO: 24586330 NR Description: CG30495-PA [Drosophila melanogaster]
  misc_feature (3)..(251): NCBI GI NO: 6630624 NR Description: M42C60 [Mus musculus]
  misc_feature (45)..(205): NCBI GI NO: 14602619 NR Description: FLJ13639 protein [Homo sapiens]
  misc_feature (1)..(251): NCBI GI NO: 31198521 NR Description: ENSANGP00000021522 [Anopheles gambiae]
  misc_feature (7)..(251): NCBI GI NO: 24586328 NR Description: CG30491-PA [Drosophila melanogaster]
  misc_feature (3)..(251): NCBI GI NO: 5668733 NR Description: UBE-1a [Mus musculus]
  misc_feature (3)..(251): NCBI GI NO: 5668735 NR Description: UBE-1b [Mus musculus]
MQIRLDGKNCLVTGANSGLGYATAQGLASHGATVYMLCRNKERGETALNEIRSKTGNMNVHLEICDLSSINEVKTFATKFSSLEKPLHVLVNNAGLLEHKRTTTSEGLELNFAVNVAATYTLTELVMPLLEKAAPDARVITVASGGMYTEPLNTNLQYSESEFDGTKQYARNKRVQVALTEWWAEKYSNKGVGFYSMHPGWADTPGVSKSLPGLSEKLSGNLRSNEEGADTVVWLALQPKEKLVPGAFYFDRAEAQKHLKYAGTAASHEQIGSIVDSIRSICNLPANPQVYQ

SEQ ID NO: 15847 - DNA, 1045 bp, Triticum aestivum
  misc_feature (1)..(1045): Ceres Seq. ID no. 13584734
atgtgccattgctgcagttgcgtgacacgctcgcctaactcccgcacgcaccccctccaccctccgctgcccgtggccggctgtaccgcaccattcccacacaccctcacttagctagctgctcccattattctcacctgtccccatttgatccatcttctgatcgtctacccgctcgccttctctttccctgcgagcagcccaggccggaggcatgtcggccaagaagatcgtggtgaagctggagctccatgacaacaaggacaagcagaaggccatgaaggccgtctccgtcctcgtcggcatcgatgccatatccatggacctggcgtcgcgcaagatgacggtgatcggcacggtggacccggtgcacgtggtgagcaagctgcgcaagggctgggcggcctacatcgagtccgtcggcccggccaaggagcccgagaagaaagaggagaagaaggaggaggccaagaaggagggagacggggccaagaaggaaggcggcgacggcggcgacgccaagaaggagggcgacgggaagaaggagggcgacgggaagaaggacggcgacaagaaggaggagggtgacggcaagaaggacggcgacgggaagaaggacggcgacaagaaggaggagggcgatggcaagaaggacgaccagaagaagcccgccgccgtggccccgctgccgttcccgcaccacatgccgctgccgcaccacatgccgccgccctacatgtacaacgcggactacatgatgaaccagtaccggccggcgccgccggcctacccgccgccgtacgtgccgccgcagcactactacgtgcggaacatgagcatggaggagaacccaaactcgtgcgtcatctgctaagtcaaagtcgatccctcgatcgcgcgcgtacgtcccgagaggcgaccatgcatgcatctgtgtatagtagtattttctcgaccgtttttacgagaccagcaaagtttgcaagatgaaactgtacaactagtagtctactatagcactacgtacgtacatacgtacatttgt

SEQ ID NO: 15848 - protein, 219 aa, Triticum aestivum
  peptide (1)..(219): Ceres Seq. ID no. 13584735
  misc_feature (6)..(75): Pfam Name: Pfam Description:  Heavy-metal-associated domain
  misc_feature (3)..(128): NCBI GI NO: 34902246 NR Description: Unknown protein
  misc_feature (3)..(177): NCBI GI NO: 37536388 NR Description: hypothetical protein
  misc_feature (27)..(219): NCBI GI NO: 34902246 NR Description: Unknown protein
  misc_feature (4)..(159): NCBI GI NO: 15223416 NR Description: heavy-metal-associated domain-containing protein
  misc_feature (5)..(159): NCBI GI NO: 25517980 NR Description: F22L4.5 protein - Arabidopsis thaliana
  misc_feature (4)..(141): NCBI GI NO: 13543783 NR Description: Unknown (protein for MGC:7642) [Mus musculus]
  misc_feature (4)..(95): NCBI GI NO: 29124977 NR Description: unknown [Populus tremuloides]
  misc_feature (1)..(123): NCBI GI NO: 37534752 NR Description: putative metal-binding protein
  misc_feature (108)..(196): NCBI GI NO: 37534752 NR Description: putative metal-binding protein
  misc_feature (3)..(110): NCBI GI NO: 21554550 NR Description: unknown [Arabidopsis thaliana]
MSAKKIVVKLELHDNKDKQKAMKAVSVLVGIDAISMDLASRKMTVIGTVDPVHVVSKLRKGWAAYIESVGPAKEPEKKEEKKEEAKKEGDGAKKEGGDGGDAKKEGDGKKEGDGKKDGDKKEEGDGKKDGDGKKDGDKKEEGDGKKDDQKKPAAVAPLPFPHHMPLPHHMPPPYMYNADYMMNQYRPAPPAYPPPYVPPQHYYVRNMSMEENPNSCVIC

SEQ ID NO: 15849 - protein, 198 aa, Triticum aestivum
  peptide (1)..(198): Ceres Seq. ID no. 13584736
  misc_feature (1)..(54): Pfam Name: Pfam Description:  Heavy-metal-associated domain
  misc_feature (1)..(107): NCBI GI NO: 34902246 NR Description: Unknown protein
  misc_feature (1)..(156): NCBI GI NO: 37536388 NR Description: hypothetical protein
  misc_feature (6)..(198): NCBI GI NO: 34902246 NR Description: Unknown protein
  misc_feature (1)..(138): NCBI GI NO: 15223416 NR Description: heavy-metal-associated domain-containing protein
  misc_feature (1)..(138): NCBI GI NO: 25517980 NR Description: F22L4.5 protein - Arabidopsis thaliana
  misc_feature (1)..(120): NCBI GI NO: 13543783 NR Description: Unknown (protein for MGC:7642) [Mus musculus]
  misc_feature (1)..(74): NCBI GI NO: 29124977 NR Description: unknown [Populus tremuloides]
  misc_feature (1)..(102): NCBI GI NO: 37534752 NR Description: putative metal-binding protein
  misc_feature (87)..(175): NCBI GI NO: 37534752 NR Description: putative metal-binding protein
  misc_feature (1)..(89): NCBI GI NO: 21554550 NR Description: unknown [Arabidopsis thaliana]
MKAVSVLVGIDAISMDLASRKMTVIGTVDPVHVVSKLRKGWAAYIESVGPAKEPEKKEEKKEEAKKEGDGAKKEGGDGGDAKKEGDGKKEGDGKKDGDKKEEGDGKKDGDGKKDGDKKEEGDGKKDDQKKPAAVAPLPFPHHMPLPHHMPPPYMYNADYMMNQYRPAPPAYPPPYVPPQHYYVRNMSMEENPNSCVIC

SEQ ID NO: 15850 - protein, 184 aa, Triticum aestivum
  peptide (1)..(184): Ceres Seq. ID no. 13584737
  misc_feature (41)..(116): Pfam Name: Pfam Description:  Histone deacetylase family
  misc_feature (1)..(93): NCBI GI NO: 34902246 NR Description: Unknown protein
  misc_feature (1)..(142): NCBI GI NO: 37536388 NR Description: hypothetical protein
  misc_feature (1)..(184): NCBI GI NO: 34902246 NR Description: Unknown protein
  misc_feature (1)..(124): NCBI GI NO: 15223416 NR Description: heavy-metal-associated domain-containing protein
  misc_feature (1)..(124): NCBI GI NO: 25517980 NR Description: F22L4.5 protein - Arabidopsis thaliana
  misc_feature (1)..(106): NCBI GI NO: 13543783 NR Description: Unknown (protein for MGC:7642) [Mus musculus]
  misc_feature (1)..(60): NCBI GI NO: 29124977 NR Description: unknown [Populus tremuloides]
  misc_feature (1)..(88): NCBI GI NO: 37534752 NR Description: putative metal-binding protein
  misc_feature (73)..(161): NCBI GI NO: 37534752 NR Description: putative metal-binding protein
  misc_feature (1)..(75): NCBI GI NO: 21554550 NR Description: unknown [Arabidopsis thaliana]
MDLASRKMTVIGTVDPVHVVSKLRKGWAAYIESVGPAKEPEKKEEKKEEAKKEGDGAKKEGGDGGDAKKEGDGKKEGDGKKDGDKKEEGDGKKDGDGKKDGDKKEEGDGKKDDQKKPAAVAPLPFPHHMPLPHHMPPPYMYNADYMMNQYRPAPPAYPPPYVPPQHYYVRNMSMEENPNSCVIC

SEQ ID NO: 15851 - DNA, 1249 bp, Triticum aestivum
  misc_feature (1)..(1249): Ceres Seq. ID no. 13597715
agggtttttctcactgccagcacgccactccccctccccaccccccttcagcagcgcaacacaccaacgccgccgccgcgccgccagcccaccgggagcaccgccggagaaaccagccatggatcggtaccagcgggtcgagaagccgcggcccgaggccgccgccatcagcgagaacgagatccgtatcaccacacagggcctcatccgcaactacgtcacctacgccacctccctcctccaggaaaaacgggtgaaagaaattgtgttgaaggccatgggacaagctatcagcaagacagtggctattactgagatcataaagaaaaggatccctgggttgcatcaagatacaacaatcagttcagtcagtattactgatgtatgggaacccattgaggaaggccttgtaccattggagatgactcgtcatgtttcaatgatctcaatctccttgtcacctaaggagctcgacacaagttcacccggatatcaagctccattgcatgcagagccacttaaaccaaggtaccagcaagttcagcgatatcaacaacagcaccagccaagacaaaatcaaggtcaaacagattcatatgtacgtggaagaggcagagggagaggaaggggctggggtggtaggggaggatatggtggaggttatggtgggtatgataataaccaaggaggttatggtggatatagcaaccagggaggatatggccacaaccaaggtgggtatggcaatcatggaggttacggccacaaccaaggtgggtatggcaaccagggaggttacggcaaccagggagggtacggccaaaaccaaggtggatatggagggggttatggttatgaccaaggtggatatgggggatatgataatggtggctggaattacaaccagaacagaggccgtggtggcggtggacgaggaagaggcaactggggatacagtggtccaggatacgagcgcggtggacgaggtgcaggcggcccaggtggcccaggcggcaggggatacgtgcggggccgtggtcggatgggtcctggccgcgggcggggcaaccagaactattaggtcacatagtgctgtattgttgcaaaaaaagagagaaaaaggtacgcgttctgtgaatcggaaccgaaccttgcgctgtttcattgtgaaccatcgactaggcttcccagtttttagctataattgccaatggtatctgtaccattgcttccattctgtgggattttg

SEQ ID NO: 15852 - protein, 359 aa, Triticum aestivum
  peptide (1)..(359): Ceres Seq. ID no. 13597716
  misc_feature (183)..(338): Pfam Name: LMP1 Pfam Description: Herpesvirus latent membrane protein 1
  misc_feature (40)..(355): NCBI GI NO: 18410994 NR Description: expressed protein [Arabidopsis thaliana]
  misc_feature (40)..(358): NCBI GI NO: 18394837 NR Description: glycine-rich protein [Arabidopsis thaliana]
  misc_feature (40)..(358): NCBI GI NO: 25518088 NR Description: T20H2.2 protein - Arabidopsis thaliana
  misc_feature (40)..(309): NCBI GI NO: 34897552 NR Description: OSJNBa0042L16.13
  misc_feature (40)..(315): NCBI GI NO: 24417384 NR Description: unknown [Arabidopsis thaliana]
  misc_feature (40)..(195): NCBI GI NO: 15231369 NR Description: hypothetical protein [Arabidopsis thaliana]
  misc_feature (81)..(355): NCBI GI NO: 25404999 NR Description: protein T4O12.22 [imported] - Arabidopsis thaliana
  misc_feature (185)..(359): NCBI GI NO: 30794412 NR Description: TAF15 RNA polymerase II, TATA box binding protein
  misc_feature (201)..(359): NCBI GI NO: 28279785 NR Description: Similar to TAF15 RNA polymerase II
  misc_feature (201)..(359): NCBI GI NO: 4507353 NR Description: TBP-associated factor 15 isoform 2
GFFSLPARHSPSPPPFSSATHQRRRRAASPPGAPPEKPAMDRYQRVEKPRPEAAAISENEIRITTQGLIRNYVTYATSLLQEKRVKEIVLKAMGQAISKTVAITEIIKKRIPGLHQDTTISSVSITDVWEPIEEGLVPLEMTRHVSMISISLSPKELDTSSPGYQAPLHAEPLKPRYQQVQRYQQQHQPRQNQGQTDSYVRGRGRGRGRGWGGRGGYGGGYGGYDNNQGGYGGYSNQGGYGHNQGGYGNHGGYGHNQGGYGNQGGYGNQGGYGQNQGGYGGGYGYDQGGYGGYDNGGWNYNQNRGRGGGGRGRGNWGYSGPGYERGGRGAGGPGGPGGRGYVRGRGRMGPGRGRGNQNY

SEQ ID NO: 15853 - protein, 320 aa, Triticum aestivum
  peptide (1)..(320): Ceres Seq. ID no. 13597717
  misc_feature (144)..(299): Pfam Name: LMP1 Pfam Description: Herpesvirus latent membrane protein 1
  misc_feature (1)..(316): NCBI GI NO: 18410994 NR Description: expressed protein [Arabidopsis thaliana]
  misc_feature (1)..(319): NCBI GI NO: 18394837 NR Description: glycine-rich protein [Arabidopsis thaliana]
  misc_feature (1)..(319): NCBI GI NO: 25518088 NR Description: T20H2.2 protein - Arabidopsis thaliana
  misc_feature (1)..(270): NCBI GI NO: 34897552 NR Description: OSJNBa0042L16.13
  misc_feature (1)..(276): NCBI GI NO: 24417384 NR Description: unknown [Arabidopsis thaliana]
  misc_feature (1)..(156): NCBI GI NO: 15231369 NR Description: hypothetical protein [Arabidopsis thaliana]
  misc_feature (42)..(316): NCBI GI NO: 25404999 NR Description: protein T4O12.22 [imported] - Arabidopsis thaliana
  misc_feature (146)..(320): NCBI GI NO: 30794412 NR Description: TAF15 RNA polymerase II, TATA box binding protein
  misc_feature (162)..(320): NCBI GI NO: 28279785 NR Description: Similar to TAF15 RNA polymerase II
  misc_feature (162)..(320): NCBI GI NO: 4507353 NR Description: TBP-associated factor 15 isoform 2
MDRYQRVEKPRPEAAAISENEIRITTQGLIRNYVTYATSLLQEKRVKEIVLKAMGQAISKTVAITEIIKKRIPGLHQDTTISSVSITDVWEPIEEGLVPLEMTRHVSMISISLSPKELDTSSPGYQAPLHAEPLKPRYQQVQRYQQQHQPRQNQGQTDSYVRGRGRGRGRGWGGRGGYGGGYGGYDNNQGGYGGYSNQGGYGHNQGGYGNHGGYGHNQGGYGNQGGYGNQGGYGQNQGGYGGGYGYDQGGYGGYDNGGWNYNQNRGRGGGGRGRGNWGYSGPGYERGGRGAGGPGGPGGRGYVRGRGRMGPGRGRGNQNY

SEQ ID NO: 15854 - protein, 267 aa, Triticum aestivum
  peptide (1)..(267): Ceres Seq. ID no. 13597718
  misc_feature (91)..(246): Pfam Name: LMP1 Pfam Description: Herpesvirus latent membrane protein 1
  misc_feature (1)..(263): NCBI GI NO: 18410994 NR Description: expressed protein [Arabidopsis thaliana]
  misc_feature (1)..(266): NCBI GI NO: 18394837 NR Description: glycine-rich protein [Arabidopsis thaliana]
  misc_feature (1)..(266): NCBI GI NO: 25518088 NR Description: T20H2.2 protein - Arabidopsis thaliana
  misc_feature (1)..(217): NCBI GI NO: 34897552 NR Description: OSJNBa0042L16.13
  misc_feature (1)..(223): NCBI GI NO: 24417384 NR Description: unknown [Arabidopsis thaliana]
  misc_feature (1)..(103): NCBI GI NO: 15231369 NR Description: hypothetical protein [Arabidopsis thaliana]
  misc_feature (1)..(263): NCBI GI NO: 25404999 NR Description: protein T4O12.22 [imported] - Arabidopsis thaliana
  misc_feature (93)..(267): NCBI GI NO: 30794412 NR Description: TAF15 RNA polymerase II, TATA box binding protein
  misc_feature (109)..(267): NCBI GI NO: 28279785 NR Description: Similar to TAF15 RNA polymerase II
  misc_feature (109)..(267): NCBI GI NO: 4507353 NR Description: TBP-associated factor 15 isoform 2
MGQAISKTVAITEIIKKRIPGLHQDTTISSVSITDVWEPIEEGLVPLEMTRHVSMISISLSPKELDTSSPGYQAPLHAEPLKPRYQQVQRYQQQHQPRQNQGQTDSYVRGRGRGRGRGWGGRGGYGGGYGGYDNNQGGYGGYSNQGGYGHNQGGYGNHGGYGHNQGGYGNQGGYGNQGGYGQNQGGYGGGYGYDQGGYGGYDNGGWNYNQNRGRGGGGRGRGNWGYSGPGYERGGRGAGGPGGPGGRGYVRGRGRMGPGRGRGNQNY

SEQ ID NO: 15855 - protein, 247 aa, Triticum aestivum
  peptide (1)..(247): Ceres Seq. ID no. 13597719
MQSHLNQGTSKFSDINNSTSQDKIKVKQIHMYVEEAEGEEGAGVVGEDMVEVMVGMIITKEVMVDIATREDMATTKVGMAIMEVTATTKVGMATREVTATREGTAKTKVDMEGVMVMTKVDMGDMIMVAGITTRTEAVVAVDEEEATGDTVVQDTSAVDEVQAAQVAQAAGDTCGAVVGWVLAAGGATRTIRSHSAVLLQKKREKGTRSVNRNRTLRCFIVNHRLGFPVFSYNCQWYLYHCFHSVGF

SEQ ID NO: 15856 - DNA, 1801 bp, Triticum aestivum
  misc_feature (1)..(1801): Ceres Seq. ID no. 13584744
aaacgattgatcaattccctctgagaaagaaagcaattgcctaattttcccgtctgctgaggaaatccgtgctgtcctgaggaaatccgggttggggatttgccaaatttcttgatttcagccctattgttggggctgccgaggccggattatgagatgggcttcttgtcgtgcctattccggtgccccgaggaggaggagcgggtggtgaaggagcacgatgacgacgaggactccggcggaatcgaccatggagtcgcctcagagtcatcagaaagtgccccactgaagactgaatccgcacatatggaaggaatccagagaaatggcacacataatgaggcgacgatcttcactttgcgtgagcttgttgatgctaccaaaaacttcagcaaggattttcagttggggcgaggaggatttggttgtgtgtataaagcatatctgaatgatggtcaggttgttgcagtcaaacaacttgatctaaatgggcttcaggggaaccgagaattccttgtggaggttctcatgctcaacctcttgcatcaccctaaccttgtcaatttgatagggtactgtgttgacggtgatcaacgcttgcttgtttatgaatatatgccattgggatcactagaagaccatctacacgaccttccacccaataaagaacctctagattggacaacacggatgaagatagctgctggcgcagctgctggtttggaatacctacatgataaggcaaatccaccagttatttaccgagatattaagccatcaaacattcttctttctgaaaggtatcatgcgaagttgtccgactttggacttgctaaacttggtcctgtgggtgataagactcatgtgacaacccgtgtcatggggacttatggctattgtgctcctgagtacgccgcgactggacagctaacggttaagtctgacatctatagttttggtgtggtgttcctcgagctaattacaggacgaagggcactcgatagcaatcggcctcgtgaggaacaggacttggtctcatgggctcgtccattgttcaaagaccaaaggaaatttccaaagatggctgatcctttgttgcgtggccgctttccaaagaggggtttgtaccaggccttggctattgcagcgatgtgtttgcaggagaagtcaaggaatcgccctctgattagggaagttgctgctgctctctcctatttgtcatcacaaacatacgatgggaatgacgctgctgttcgccgttaccttgatggcccttcagcatcaaaagtgtcagacgatcaggttaaccaagatgatgctttggctagtcaacatggagctcaaacgtcgatgcatgaccgtatgaatgacttcgtcccagaaggaaaagaacattgcaggagtggctccaaccgtggaggacggggcagggttgttccaaacggtgtcgacagagaccgcgcacttgcagatgcgaatgtctgggccgaggcttggagacgccatgagaaggcaagcaaagtgcgtgtaaccgatgaaatcctcggatagtgagctgagctctgcttgatgttttggcatgctggcgattttgaagagagcgttgttaggagaggaggaataatgcgcagcgaggtgtgtagtactgcaccaccagagtgagcgctcgcaaggtttcaccggtggagcctgtcactgtcacgtccaccatcgtttcgctgcatacattacacggtctgaatttcacatgtaggtattgtttcaggggctttgtaaataaatgtaataacccccttaattg

SEQ ID NO: 15857 - protein, 464 aa, Triticum aestivum
  peptide (1)..(464): Ceres Seq. ID no. 13584745
  misc_feature (51)..(457): NCBI GI NO: 34902958 NR Description: putative protein kinase
  misc_feature (13)..(362): NCBI GI NO: 34907210 NR Description: putative serine/threonine kinase PBS1 protein
  misc_feature (14)..(425): NCBI GI NO: 15238886 NR Description: protein kinase family [Arabidopsis thaliana]
  misc_feature (36)..(397): NCBI GI NO: 34395193 NR Description: putative protein serine/threonine kinase
  misc_feature (36)..(397): NCBI GI NO: 34899302 NR Description: putative protein serine/threonine kinase
  misc_feature (1)..(381): NCBI GI NO: 15240038 NR Description: protein kinase family [Arabidopsis thaliana]
  misc_feature (63)..(360): NCBI GI NO: 34394036 NR Description: putative protein serine/threonine kinase BNK1
  misc_feature (1)..(373): NCBI GI NO: 10445209 NR Description: protein serine/threonine kinase BNK1
  misc_feature (1)..(360): NCBI GI NO: 11259782 NR Description: protein kinase-like - Arabidopsis thaliana
  misc_feature (1)..(360): NCBI GI NO: 30679773 NR Description: protein kinase family [Arabidopsis thaliana]
MGFLSCLFRCPEEEERVVKEHDDDEDSGGIDHGVASESSESAPLKTESAHMEGIQRNGTHNEATIFTLRELVDATKNFSKDFQLGRGGFGCVYKAYLNDGQVVAVKQLDLNGLQGNREFLVEVLMLNLLHHPNLVNLIGYCVDGDQRLLVYEYMPLGSLEDHLHDLPPNKEPLDWTTRMKIAAGAAAGLEYLHDKANPPVIYRDIKPSNILLSERYHAKLSDFGLAKLGPVGDKTHVTTRVMGTYGYCAPEYAATGQLTVKSDIYSFGVVFLELITGRRALDSNRPREEQDLVSWARPLFKDQRKFPKMADPLLRGRFPKRGLYQALAIAAMCLQEKSRNRPLIREVAAALSYLSSQTYDGNDAAVRRYLDGPSASKVSDDQVNQDDALASQHGAQTSMHDRMNDFVPEGKEHCRSGSNRGGRGRVVPNGVDRDRALADANVWAEAWRRHEKASKVRVTDEILG

SEQ ID NO: 15858 - protein, 414 aa, Triticum aestivum
  peptide (1)..(414): Ceres Seq. ID no. 13584746
  misc_feature (1)..(407): NCBI GI NO: 34902958 NR Description: putative protein kinase
  misc_feature (1)..(312): NCBI GI NO: 34907210 NR Description: putative serine/threonine kinase PBS1 protein
  misc_feature (1)..(375): NCBI GI NO: 15238886 NR Description: protein kinase family [Arabidopsis thaliana]
  misc_feature (1)..(347): NCBI GI NO: 34395193 NR Description: putative protein serine/threonine kinase
  misc_feature (1)..(347): NCBI GI NO: 34899302 NR Description: putative protein serine/threonine kinase
  misc_feature (1)..(331): NCBI GI NO: 15240038 NR Description: protein kinase family [Arabidopsis thaliana]
  misc_feature (13)..(310): NCBI GI NO: 34394036 NR Description: putative protein serine/threonine kinase BNK1
  misc_feature (1)..(323): NCBI GI NO: 10445209 NR Description: protein serine/threonine kinase BNK1
  misc_feature (1)..(310): NCBI GI NO: 11259782 NR Description: protein kinase-like - Arabidopsis thaliana
  misc_feature (1)..(310): NCBI GI NO: 30679773 NR Description: protein kinase family [Arabidopsis thaliana]
MEGIQRNGTHNEATIFTLRELVDATKNFSKDFQLGRGGFGCVYKAYLNDGQVVAVKQLDLNGLQGNREFLVEVLMLNLLHHPNLVNLIGYCVDGDQRLLVYEYMPLGSLEDHLHDLPPNKEPLDWTTRMKIAAGAAAGLEYLHDKANPPVIYRDIKPSNILLSERYHAKLSDFGLAKLGPVGDKTHVTTRVMGTYGYCAPEYAATGQLTVKSDIYSFGVVFLELITGRRALDSNRPREEQDLVSWARPLFKDQRKFPKMADPLLRGRFPKRGLYQALAIAAMCLQEKSRNRPLIREVAAALSYLSSQTYDGNDAAVRRYLDGPSASKVSDDQVNQDDALASQHGAQTSMHDRMNDFVPEGKEHCRSGSNRGGRGRVVPNGVDRDRALADANVWAEAWRRHEKASKVRVTDEILG

SEQ ID NO: 15859 - protein, 340 aa, Triticum aestivum
  peptide (1)..(340): Ceres Seq. ID no. 13584747
  misc_feature (1)..(333): NCBI GI NO: 34902958 NR Description: putative protein kinase
  misc_feature (1)..(238): NCBI GI NO: 34907210 NR Description: putative serine/threonine kinase PBS1 protein
  misc_feature (1)..(301): NCBI GI NO: 15238886 NR Description: protein kinase family [Arabidopsis thaliana]
  misc_feature (1)..(273): NCBI GI NO: 34395193 NR Description: putative protein serine/threonine kinase
  misc_feature (1)..(273): NCBI GI NO: 34899302 NR Description: putative protein serine/threonine kinase
  misc_feature (1)..(257): NCBI GI NO: 15240038 NR Description: protein kinase family [Arabidopsis thaliana]
  misc_feature (1)..(236): NCBI GI NO: 34394036 NR Description: putative protein serine/threonine kinase BNK1
  misc_feature (1)..(249): NCBI GI NO: 10445209 NR Description: protein serine/threonine kinase BNK1
  misc_feature (1)..(236): NCBI GI NO: 11259782 NR Description: protein kinase-like - Arabidopsis thaliana
  misc_feature (1)..(236): NCBI GI NO: 30679773 NR Description: protein kinase family [Arabidopsis thaliana]
MLNLLHHPNLVNLIGYCVDGDQRLLVYEYMPLGSLEDHLHDLPPNKEPLDWTTRMKIAAGAAAGLEYLHDKANPPVIYRDIKPSNILLSERYHAKLSDFGLAKLGPVGDKTHVTTRVMGTYGYCAPEYAATGQLTVKSDIYSFGVVFLELITGRRALDSNRPREEQDLVSWARPLFKDQRKFPKMADPLLRGRFPKRGLYQALAIAAMCLQEKSRNRPLIREVAAALSYLSSQTYDGNDAAVRRYLDGPSASKVSDDQVNQDDALASQHGAQTSMHDRMNDFVPEGKEHCRSGSNRGGRGRVVPNGVDRDRALADANVWAEAWRRHEKASKVRVTDEILG

SEQ ID NO: 15860 - DNA, 1227 bp, Triticum aestivum
  misc_feature (1)..(1227): Ceres Seq. ID no. 13598613
acctagaacatcctaatcgaaaagtttttgcttttatttggagcgtctcctccgtgctcagcgggctactgccctgcagcagatcccgcggccccgatgcctcctcccgccgccccgacgcctcctcccgccgagccgctgccaaattcgccagattctacctcccccacggaggaggctgaggcggatgcgggaggcacgccgtcgagggccgggccggtggggacagtaagctggggaactgggaccctcgtcggcgtattcaccgggcttctctacggcggggccaaggaggccaacgccaacgtcagcaaagatgctgaagtgatgttgaagatgggaagcaccacagacaagcgcgaacaatataggttgatgagagatgccatggagaaaaggttcattcgggttgccaaaggctcactagttggtggtgctcgccttgggatgttcactgcaactttctttggcatacagaaccttcttattgagaaccgtggggtgcatgatgtattcaatattgttggagctggctcggctaccgcagctgcttttgggcttatattgcctggttcaccaatgtggcgtgcaaggaatgtattggttggatctgctctcggtgccggaatttgctttccacttggttgggtacagttgaagctggcagagaaggccaatcttgagattgaaaattcaaaatcgccatcggatttacaaggcaatcaaagtcgtgtgggggctgctatagacagactagagaacagcctgaggaagtaacagtttgtacccatgcaaggagccaaggatctgttgtcaacacccatggctatttcgcttttgttttgttcatgtactttccataggaatgcggttacttttgaagtggtaatggcagcaagggaaactgtctcttgtatgaagataaatttggatacaaatacttacttgctggagctgggatatttctagttaaggtacctgtttgggtgtttgtgccattatgacctctatgatcagcattgtgcatagtattagtattcgtgacttctcgttagcttgacaatacctcggaaggatgctgccatctcttattttcttggaaagtttgtatcggtgatccatcacaaactatgcttgtttggtttgatgctcatgtatgctaaattttgccttggcagaattttgtcaaaaaaaaaaaaaaaaaagcttatcgataccgtcgacctc

SEQ ID NO: 15861 - protein, 226 aa, Triticum aestivum
  peptide (1)..(226): Ceres Seq. ID no. 13598614
  misc_feature (1)..(226): NCBI GI NO: 34903198 NR Description: unnamed protein product
  misc_feature (26)..(226): NCBI GI NO: 15242587 NR Description: expressed protein [Arabidopsis thaliana]
  misc_feature (21)..(194): NCBI GI NO: 9758300 NR Description: contains similarity to unknownprotein~dbj|BAA89593
MPPPAAPTPPPAEPLPNSPDSTSPTEEAEADAGGTPSRAGPVGTVSWGTGTLVGVFTGLLYGGAKEANANVSKDAEVMLKMGSTTDKREQYRLMRDAMEKRFIRVAKGSLVGGARLGMFTATFFGIQNLLIENRGVHDVFNIVGAGSATAAAFGLILPGSPMWRARNVLVGSALGAGICFPLGWVQLKLAEKANLEIENSKSPSDLQGNQSRVGAAIDRLENSLRK

SEQ ID NO: 15862 - protein, 149 aa, Triticum aestivum
  peptide (1)..(149): Ceres Seq. ID no. 13598615
  misc_feature (1)..(149): NCBI GI NO: 34903198 NR Description: unnamed protein product
  misc_feature (1)..(149): NCBI GI NO: 15242587 NR Description: expressed protein [Arabidopsis thaliana]
  misc_feature (1)..(117): NCBI GI NO: 9758300 NR Description: contains similarity to unknownprotein~dbj|BAA89593
MLKMGSTTDKREQYRLMRDAMEKRFIRVAKGSLVGGARLGMFTATFFGIQNLLIENRGVHDVFNIVGAGSATAAAFGLILPGSPMWRARNVLVGSALGAGICFPLGWVQLKLAEKANLEIENSKSPSDLQGNQSRVGAAIDRLENSLRK

SEQ ID NO: 15863 - protein, 146 aa, Triticum aestivum
  peptide (1)..(146): Ceres Seq. ID no. 13598616
  misc_feature (1)..(146): NCBI GI NO: 34903198 NR Description: unnamed protein product
  misc_feature (1)..(146): NCBI GI NO: 15242587 NR Description: expressed protein [Arabidopsis thaliana]
  misc_feature (1)..(114): NCBI GI NO: 9758300 NR Description: contains similarity to unknownprotein~dbj|BAA89593
MGSTTDKREQYRLMRDAMEKRFIRVAKGSLVGGARLGMFTATFFGIQNLLIENRGVHDVFNIVGAGSATAAAFGLILPGSPMWRARNVLVGSALGAGICFPLGWVQLKLAEKANLEIENSKSPSDLQGNQSRVGAAIDRLENSLRK

SEQ ID NO: 15864 - DNA, 873 bp, Triticum aestivum
  misc_feature (1)..(873): Ceres Seq. ID no. 15226827
atcaaattggtcgcgagtttgcgtgccgatctacctctaaccttctcctccgcattgcacctgcgaacggcgggcagatccatggcggcgctggcgtcaaggatggcgctgcagtccagggcggcgttggcctcgaggatggcgcagctgcagtccaaggcggccgaggcgacgaggttcgcggccaagcacgggggtgcgctgcagtccgaggcggcaagcttcgcggccaagcacggggccactctgcagtccaaggcgtccgaggcggcaagcttcgcggccaagcacgggggcgcgctgcagtccaaggcgtccgaggcggcaagcatcgcggccaagcacggggccacgctgcagtccaaggcgtccaaggcggcgagcttcgcggccaagcaagggagcgcgatgcagtccaaggcggccgaggcggcgagctccgcggccaagcaagggcgcgagtaccacaagacgctcatggagaggaacaggcagtacgtcgtcgacccgcccaccgtcgaaaagtgccaggagctctccaagcagctcttctacacccgcctcgccagcattcctggccgttacgaggctttctggaaagaggttgatgctgtaaagctcttgctgaaaaacagaaaggacctgaaggctgagcaagccggggttgccgcattgtttggcattgagttgtatgcatggcttcgtgccggtgagtttattggtagaggatttaccctcacaggttgatcgctgacgtctagcatgagcgcacattattagtctacatacatttgccgtctagctatgagcgtacattgttagtctacatttgccatcggatacagtgttcgttgatcaaaaaaaaaaaaaaaa

SEQ ID NO: 15865 - protein, 248 aa, Triticum aestivum
  peptide (1)..(248): Ceres Seq. ID no. 15226828
  misc_feature (137)..(248): Pfam Name: Pfam Description:  Mitochondrial ATP synthase g subunit
  misc_feature (131)..(248): NCBI GI NO: 34912342 NR Description: P0518F01.5
  misc_feature (137)..(248): NCBI GI NO: 15233603 NR Description: expressed protein [Arabidopsis thaliana]
  misc_feature (137)..(248): NCBI GI NO: 15224821 NR Description: copia-related retroelement pol polyprotein
  misc_feature (137)..(248): NCBI GI NO: 15236143 NR Description: expressed protein [Arabidopsis thaliana]
  misc_feature (8)..(164): NCBI GI NO: 99381 NR Description: cgcr-1 protein - Chlamydomonas reinhardtii
  misc_feature (8)..(164): NCBI GI NO: 18135 NR Description: cgcr-1 product [Chlamydomonas reinhardtii]
IKLVASLRADLPLTFSSALHLRTAGRSMAALASRMALQSRAALASRMAQLQSKAAEATRFAAKHGGALQSEAASFAAKHGATLQSKASEAASFAAKHGGALQSKASEAASIAAKHGATLQSKASKAASFAAKQGSAMQSKAAEAASSAAKQGREYHKTLMERNRQYVVDPPTVEKCQELSKQLFYTRLASIPGRYEAFWKEVDAVKLLLKNRKDLKAEQAGVAALFGIELYAWLRAGEFIGRGFTLTG

SEQ ID NO: 15866 - protein, 221 aa, Triticum aestivum
  peptide (1)..(221): Ceres Seq. ID no. 15226829
  misc_feature (110)..(221): Pfam Name: Pfam Description:  Mitochondrial ATP synthase g subunit
  misc_feature (104)..(221): NCBI GI NO: 34912342 NR Description: P0518F01.5
  misc_feature (110)..(221): NCBI GI NO: 15233603 NR Description: expressed protein [Arabidopsis thaliana]
  misc_feature (110)..(221): NCBI GI NO: 15224821 NR Description: copia-related retroelement pol polyprotein
  misc_feature (110)..(221): NCBI GI NO: 15236143 NR Description: expressed protein [Arabidopsis thaliana]
  misc_feature (1)..(137): NCBI GI NO: 99381 NR Description: cgcr-1 protein - Chlamydomonas reinhardtii
  misc_feature (1)..(137): NCBI GI NO: 18135 NR Description: cgcr-1 product [Chlamydomonas reinhardtii]
MAALASRMALQSRAALASRMAQLQSKAAEATRFAAKHGGALQSEAASFAAKHGATLQSKASEAASFAAKHGGALQSKASEAASIAAKHGATLQSKASKAASFAAKQGSAMQSKAAEAASSAAKQGREYHKTLMERNRQYVVDPPTVEKCQELSKQLFYTRLASIPGRYEAFWKEVDAVKLLLKNRKDLKAEQAGVAALFGIELYAWLRAGEFIGRGFTLTG

SEQ ID NO: 15867 - protein, 214 aa, Triticum aestivum
  peptide (1)..(214): Ceres Seq. ID no. 15226830
  misc_feature (103)..(214): Pfam Name: Pfam Description:  Mitochondrial ATP synthase g subunit
  misc_feature (97)..(214): NCBI GI NO: 34912342 NR Description: P0518F01.5
  misc_feature (103)..(214): NCBI GI NO: 15233603 NR Description: expressed protein [Arabidopsis thaliana]
  misc_feature (103)..(214): NCBI GI NO: 15224821 NR Description: copia-related retroelement pol polyprotein
  misc_feature (103)..(214): NCBI GI NO: 15236143 NR Description: expressed protein [Arabidopsis thaliana]
  misc_feature (1)..(130): NCBI GI NO: 99381 NR Description: cgcr-1 protein - Chlamydomonas reinhardtii
  misc_feature (1)..(130): NCBI GI NO: 18135 NR Description: cgcr-1 product [Chlamydomonas reinhardtii]
MALQSRAALASRMAQLQSKAAEATRFAAKHGGALQSEAASFAAKHGATLQSKASEAASFAAKHGGALQSKASEAASIAAKHGATLQSKASKAASFAAKQGSAMQSKAAEAASSAAKQGREYHKTLMERNRQYVVDPPTVEKCQELSKQLFYTRLASIPGRYEAFWKEVDAVKLLLKNRKDLKAEQAGVAALFGIELYAWLRAGEFIGRGFTLTG

SEQ ID NO: 15868 - DNA, 1325 bp, Triticum aestivum
  misc_feature (1)..(1325): Ceres Seq. ID no. 12625980
ttccattgcttgcttgctcctctgttctcttctccttgcattattatttccctccgtctccttcctcgcatccagccgcaactctccccctcctttgacttgcttccaagaaagccgatcgccatgcgcgtgcagtgcgacgtctgcggcctcgagccggccgccgtgctctgctgcgccgacgaggccgcgctctgctccccctgcaaccgccgcgtccaccgcgccaacaagctcgccggcaagcaccgccgcctcaccctcctccagccctccccggccgccaacgacgccgccgcgccgctctgcgacgtctgcaaggagcggagggggctcgtgttctgcgtggaggaccgggcgatcctgtgcgccgactgcgacgagcccattcacagcgccaacgagctcacggccaagcacagccgcttcctcctcgtcggtgccaagctctccgccgaccccgtggaccaggagatcccctccccggacgggagctccgtcgagcaggacgactgctcggcctcggccgccgaggaagcccctgcagttcatgacgccagccacgccggaggaggaggaggaggaagcagcatctcagactacctcaccaacatctgccccggctggcaagtcgacgaactcctcttcgacgacgccgccttcgtcgccaagcagaaggggcgcgacgagcaggtgccgttcctggacgccgacctgttcgacgtggtcgccgccgagcgtccggggaagcgcggcgcgtgggcgccccacgtgccgcatacgccggttccggcctggggcctgcaggagtttccggccgctttggtggccccggcggcggcggcgaaggccaagcaggggcacgtgcgggagtggtaccacagcgacagcgacagcgacgtgttcgccgtgccggagatcacgtcgccgccggccaagcgggcgcggccgtcgtcgttctggtgcctgtgaaccagctagcgcggcggccaaccacccacgccgccgcagcaaccgggcgagctacgtacccgtgactcgatcgatccatcactagtgtaatctttgctcgttgtagcttggtgtgaccgaagtagtaccgaactctagtagcgcatctatggtagtagagtacgctgttttatgcatataagaatgttgctgtcgtatcataaataagtagcgaacgaatcgtgatctccttcaactcttcaactctatcagacattcagacctgaaaactaaattgcacgcatctccaagcaagtaatgtgtatgggactgcattttcgagagaaaaagtaatgtatgcttctgttctactc

SEQ ID NO: 15869 - protein, 351 aa, Triticum aestivum
  peptide (1)..(351): Ceres Seq. ID no. 12625981
  misc_feature (57)..(241): Pfam Name: Pfam Description:  Equine herpesvirus glycoprotein gp2
  misc_feature (17)..(341): NCBI GI NO: 13592175 NR Description: ppg3 [Leishmania major]
  misc_feature (17)..(340): NCBI GI NO: 13592175 NR Description: ppg3 [Leishmania major]
  misc_feature (17)..(351): NCBI GI NO: 13592175 NR Description: ppg3 [Leishmania major]
  misc_feature (18)..(251): NCBI GI NO: 13592175 NR Description: ppg3 [Leishmania major]
  misc_feature (17)..(244): NCBI GI NO: 11359723 NR Description: proteophosphoglycan, membrane-associated
  misc_feature (23)..(348): NCBI GI NO: 11360318 NR Description: probable mucin DKFZp434C196.1 - human (fragment)
  misc_feature (24)..(257): NCBI GI NO: 11359723 NR Description: proteophosphoglycan, membrane-associated
  misc_feature (17)..(251): NCBI GI NO: 5420387 NR Description: proteophosphoglycan [Leishmania major]
  misc_feature (34)..(252): NCBI GI NO: 5420387 NR Description: proteophosphoglycan [Leishmania major]
  misc_feature (24)..(341): NCBI GI NO: 13592175 NR Description: ppg3 [Leishmania major]
SIACLLLCSLLLALLFPSVSFLASSRNSPPPLTCFQESRSPCACSATSAASSRPPCSAAPTRPRSAPPATAASTAPTSSPASTAASPSSSPPRPPTTPPRRSATSARSGGGSCSAWRTGRSCAPTATSPFTAPTSSRPSTAASSSSVPSSPPTPWTRRSPPRTGAPSSRTTARPRPPRKPLQFMTPATPEEEEEEAASQTTSPTSAPAGKSTNSSSTTPPSSPSRRGATSRCRSWTPTCSTWSPPSVRGSAARGRPTCRIRRFRPGACRSFRPLWWPRRRRRRPSRGTCGSGTTATATATCSPCRRSRRRRPSGRGRRRSGACEPASAAANHPRRRSNRASYVPVTRSIHH

SEQ ID NO: 15870 - protein, 323 aa, Triticum aestivum
  peptide (1)..(323): Ceres Seq. ID no. 12625982
  misc_feature (98)..(145): Pfam Name: Pfam Description:  B-box zinc finger
  misc_feature (42)..(223): NCBI GI NO: 3618312 NR Description: zinc finger protein
  misc_feature (42)..(219): NCBI GI NO: 38344979 NR Description: OSJNBa0011L07.9
  misc_feature (42)..(154): NCBI GI NO: 22329252 NR Description: CONSTANS B-box zinc finger family protein
  misc_feature (42)..(154): NCBI GI NO: 26452767 NR Description: putative zinc finger protein
  misc_feature (148)..(215): NCBI GI NO: 22329252 NR Description: CONSTANS B-box zinc finger family protein
  misc_feature (148)..(215): NCBI GI NO: 26452767 NR Description: putative zinc finger protein
  misc_feature (106)..(322): NCBI GI NO: 3618312 NR Description: zinc finger protein
  misc_feature (42)..(154): NCBI GI NO: 7485796 NR Description: hypothetical protein F19H22
  misc_feature (148)..(215): NCBI GI NO: 7485796 NR Description: hypothetical protein F19H22
  misc_feature (42)..(307): NCBI GI NO: 3618310 NR Description: zinc finger protein
FHCLLAPLFSSPCIIISLRLLPRIQPQLSPSFDLLPRKPIAMRVQCDVCGLEPAAVLCCADEAALCSPCNRRVHRANKLAGKHRRLTLLQPSPAANDAAAPLCDVCKERRGLVFCVEDRAILCADCDEPIHSANELTAKHSRFLLVGAKLSADPVDQEIPSPDGSSVEQDDCSASAAEEAPAVHDASHAGGGGGGSSISDYLTNICPGWQVDELLFDDAAFVAKQKGRDEQVPFLDADLFDVVAAERPGKRGAWAPHVPHTPVPAWGLQEFPAALVAPAAAAKAKQGHVREWYHSDSDSDVFAVPEITSPPAKRARPSSFWCL

SEQ ID NO: 15871 - protein, 282 aa, Triticum aestivum
  peptide (1)..(282): Ceres Seq. ID no. 12625983
  misc_feature (57)..(104): Pfam Name: Pfam Description:  B-box zinc finger
  misc_feature (1)..(182): NCBI GI NO: 3618312 NR Description: zinc finger protein
  misc_feature (1)..(178): NCBI GI NO: 38344979 NR Description: OSJNBa0011L07.9
  misc_feature (1)..(113): NCBI GI NO: 22329252 NR Description: CONSTANS B-box zinc finger family protein
  misc_feature (1)..(113): NCBI GI NO: 26452767 NR Description: putative zinc finger protein
  misc_feature (107)..(174): NCBI GI NO: 22329252 NR Description: CONSTANS B-box zinc finger family protein
  misc_feature (107)..(174): NCBI GI NO: 26452767 NR Description: putative zinc finger protein
  misc_feature (65)..(281): NCBI GI NO: 3618312 NR Description: zinc finger protein
  misc_feature (1)..(113): NCBI GI NO: 7485796 NR Description: hypothetical protein F19H22
  misc_feature (107)..(174): NCBI GI NO: 7485796 NR Description: hypothetical protein F19H22
  misc_feature (1)..(266): NCBI GI NO: 3618310 NR Description: zinc finger protein
MRVQCDVCGLEPAAVLCCADEAALCSPCNRRVHRANKLAGKHRRLTLLQPSPAANDAAAPLCDVCKERRGLVFCVEDRAILCADCDEPIHSANELTAKHSRFLLVGAKLSADPVDQEIPSPDGSSVEQDDCSASAAEEAPAVHDASHAGGGGGGSSISDYLTNICPGWQVDELLFDDAAFVAKQKGRDEQVPFLDADLFDVVAAERPGKRGAWAPHVPHTPVPAWGLQEFPAALVAPAAAAKAKQGHVREWYHSDSDSDVFAVPEITSPPAKRARPSSFWCL

SEQ ID NO: 15872 - DNA, 1642 bp, Triticum aestivum
  misc_feature (1)..(1642): Ceres Seq. ID no. 15176783
aacagccaagcttcttctactgctagtctgaaggcagtagttactgctagtatcactatcgtgagttgccgactatttgtcaatggcggccttcgcaaagatcgccatggagtgcgtgcacgatcccctcatctggctacttattgcgtcggtggccttggtcatcctgcgaagacggcggctgaacccgccgctccctccgggccccaagccgctgccgatcatcggcaacatgatgatggcggaccagctgactcaccgtggcctggcggcgctggcgaagcagtacggcgggttgctgcacctccgcctgggctcgctccgcgtcttcgcggtgtcgaccccggagtacgcgcgcgaggtgctccaggcgcaggacggcgacttctggcaccgcccagcctccatcgccgtccgctacctcacctacggctgctccgacatggcgttcgcgcgcgacgggccctactggcgccagatgcgcaagctgtgcgtcacgaggctcttcagccgccggcgcgccgagacgtggctcgccgtgcgcgacgggtacggggagctcgcccgggccgtcggcaggtccggcggcgaggccgtgaacctcggcgagctcatcttcaagcacaccgtgagcgtcatcttccgggccgccttcggcgtccgcgacgtccaaggactggacgagttcatccccatgttcaaggagttctccaagctcttagaagcgttccacgtcggtgacttcttcccttggcttagctggatgggccgacggggcttcgaccgccgcctccgcaccgtgcgcgccgctctcgggacgtttgtggacaagatcattgacgagcacgtgaggaggggcaagaaccccgacgacgccgacgccgacatggtagacggcctactcgcgttactcgctgatgcgaaccaagccagcggggaggacgacctccgcttcacccgcgacaacgtcagggccatgatgatggacatgttgtttggcggaccagacacagtggggttcaccatcgagtgggcgatggcagagatgatccattgccctcacatcctcctgcggctgcagcaggagctcgccgacgttgtggggctcgaccggattgttaccgaatcggacctcggcaagctccccttcctcaagtgcgtcgtcaaggagacgctccgactgcacccgccgatcccgatccacctccacgggacgaccaaagattgcgtcctcggtggctactcggtgcccaggggctcccgtgtcttcatcaacgcgtgggcgatcaaccgcgacggcgaggcgtggaaggaccctgacacgttccggccgtcgaggttcatgccagacggggaagccgccgggctggatctcaagggcggttgctatgagttgttgtcgttcgggtcgggtcgacgctcgtgcccggcacaggggcttggtcagcacgccgtggagttcgccgtcgcgcagcttgtgcatgggttcgactggaagctacccggcgacatgaaaccgacggagctcgacatgagcgacatgaacggtgtcaccgtgtcccgcgccacacggctctacgcggttcccacgccccggctcacttgtcctttgtgatattaattgaaacatcgctcttgttgt

SEQ ID NO: 15873 - protein, 510 aa, Triticum aestivum
  peptide (1)..(510): Ceres Seq. ID no. 15176784
  misc_feature (39)..(498): Pfam Name: Pfam Description:  Cytochrome P450
  misc_feature (7)..(510): NCBI GI NO: 27476080 NR Description: Hypothetical protein
  misc_feature (20)..(510): NCBI GI NO: 5731998 NR Description: aldehyde 5-hydroxylase [Liquidambar styraciflua]
  misc_feature (19)..(510): NCBI GI NO: 6688937 NR Description: ferulate-5-hydroxylase
  misc_feature (12)..(508): NCBI GI NO: 10197650 NR Description: cytochrome p450-dependent monooxygenase
  misc_feature (12)..(508): NCBI GI NO: 10197652 NR Description: cytochrome p450-dependent monooxygenase
  misc_feature (28)..(510): NCBI GI NO: 12578901 NR Description: ferulate-5-hydroxylase [Arabidopsis thaliana]
  misc_feature (28)..(510): NCBI GI NO: 12578893 NR Description: ferulate-5-hydroxylase [Arabidopsis thaliana]
  misc_feature (28)..(510): NCBI GI NO: 15234332 NR Description: cytochrome P450 84A1 / ferulate-5-hydroxylase
  misc_feature (19)..(508): NCBI GI NO: 10197654 NR Description: cytochrome p450-dependent monooxygenase
  misc_feature (15)..(510): NCBI GI NO: 5002354 NR Description: ferulate-5-hydroxylase
MAAFAKIAMECVHDPLIWLLIASVALVILRRRRLNPPLPPGPKPLPIIGNMMMADQLTHRGLAALAKQYGGLLHLRLGSLRVFAVSTPEYAREVLQAQDGDFWHRPASIAVRYLTYGCSDMAFARDGPYWRQMRKLCVTRLFSRRRAETWLAVRDGYGELARAVGRSGGEAVNLGELIFKHTVSVIFRAAFGVRDVQGLDEFIPMFKEFSKLLEAFHVGDFFPWLSWMGRRGFDRRLRTVRAALGTFVDKIIDEHVRRGKNPDDADADMVDGLLALLADANQASGEDDLRFTRDNVRAMMMDMLFGGPDTVGFTIEWAMAEMIHCPHILLRLQQELADVVGLDRIVTESDLGKLPFLKCVVKETLRLHPPIPIHLHGTTKDCVLGGYSVPRGSRVFINAWAINRDGEAWKDPDTFRPSRFMPDGEAAGLDLKGGCYELLSFGSGRRSCPAQGLGQHAVEFAVAQLVHGFDWKLPGDMKPTELDMSDMNGVTVSRATRLYAVPTPRLTCPL

SEQ ID NO: 15874 - protein, 502 aa, Triticum aestivum
  peptide (1)..(502): Ceres Seq. ID no. 15176785
  misc_feature (31)..(490): Pfam Name: Pfam Description:  Cytochrome P450
  misc_feature (1)..(502): NCBI GI NO: 27476080 NR Description: Hypothetical protein
  misc_feature (12)..(502): NCBI GI NO: 5731998 NR Description: aldehyde 5-hydroxylase [Liquidambar styraciflua]
  misc_feature (11)..(502): NCBI GI NO: 6688937 NR Description: ferulate-5-hydroxylase
  misc_feature (4)..(500): NCBI GI NO: 10197650 NR Description: cytochrome p450-dependent monooxygenase
  misc_feature (4)..(500): NCBI GI NO: 10197652 NR Description: cytochrome p450-dependent monooxygenase
  misc_feature (20)..(502): NCBI GI NO: 12578901 NR Description: ferulate-5-hydroxylase [Arabidopsis thaliana]
  misc_feature (20)..(502): NCBI GI NO: 12578893 NR Description: ferulate-5-hydroxylase [Arabidopsis thaliana]
  misc_feature (20)..(502): NCBI GI NO: 15234332 NR Description: cytochrome P450 84A1 / ferulate-5-hydroxylase
  misc_feature (11)..(500): NCBI GI NO: 10197654 NR Description: cytochrome p450-dependent monooxygenase
  misc_feature (7)..(502): NCBI GI NO: 5002354 NR Description: ferulate-5-hydroxylase
MECVHDPLIWLLIASVALVILRRRRLNPPLPPGPKPLPIIGNMMMADQLTHRGLAALAKQYGGLLHLRLGSLRVFAVSTPEYAREVLQAQDGDFWHRPASIAVRYLTYGCSDMAFARDGPYWRQMRKLCVTRLFSRRRAETWLAVRDGYGELARAVGRSGGEAVNLGELIFKHTVSVIFRAAFGVRDVQGLDEFIPMFKEFSKLLEAFHVGDFFPWLSWMGRRGFDRRLRTVRAALGTFVDKIIDEHVRRGKNPDDADADMVDGLLALLADANQASGEDDLRFTRDNVRAMMMDMLFGGPDTVGFTIEWAMAEMIHCPHILLRLQQELADVVGLDRIVTESDLGKLPFLKCVVKETLRLHPPIPIHLHGTTKDCVLGGYSVPRGSRVFINAWAINRDGEAWKDPDTFRPSRFMPDGEAAGLDLKGGCYELLSFGSGRRSCPAQGLGQHAVEFAVAQLVHGFDWKLPGDMKPTELDMSDMNGVTVSRATRLYAVPTPRLTCPL

SEQ ID NO: 15875 - protein, 460 aa, Triticum aestivum
  peptide (1)..(460): Ceres Seq. ID no. 15176786
  misc_feature (1)..(448): Pfam Name: Pfam Description:  Cytochrome P450
  misc_feature (1)..(460): NCBI GI NO: 27476080 NR Description: Hypothetical protein
  misc_feature (1)..(460): NCBI GI NO: 5731998 NR Description: aldehyde 5-hydroxylase [Liquidambar styraciflua]
  misc_feature (1)..(460): NCBI GI NO: 6688937 NR Description: ferulate-5-hydroxylase
  misc_feature (1)..(458): NCBI GI NO: 10197650 NR Description: cytochrome p450-dependent monooxygenase
  misc_feature (1)..(458): NCBI GI NO: 10197652 NR Description: cytochrome p450-dependent monooxygenase
  misc_feature (1)..(460): NCBI GI NO: 12578901 NR Description: ferulate-5-hydroxylase [Arabidopsis thaliana]
  misc_feature (1)..(460): NCBI GI NO: 12578893 NR Description: ferulate-5-hydroxylase [Arabidopsis thaliana]
  misc_feature (1)..(460): NCBI GI NO: 15234332 NR Description: cytochrome P450 84A1 / ferulate-5-hydroxylase
  misc_feature (1)..(458): NCBI GI NO: 10197654 NR Description: cytochrome p450-dependent monooxygenase
  misc_feature (1)..(460): NCBI GI NO: 5002354 NR Description: ferulate-5-hydroxylase
MMMADQLTHRGLAALAKQYGGLLHLRLGSLRVFAVSTPEYAREVLQAQDGDFWHRPASIAVRYLTYGCSDMAFARDGPYWRQMRKLCVTRLFSRRRAETWLAVRDGYGELARAVGRSGGEAVNLGELIFKHTVSVIFRAAFGVRDVQGLDEFIPMFKEFSKLLEAFHVGDFFPWLSWMGRRGFDRRLRTVRAALGTFVDKIIDEHVRRGKNPDDADADMVDGLLALLADANQASGEDDLRFTRDNVRAMMMDMLFGGPDTVGFTIEWAMAEMIHCPHILLRLQQELADVVGLDRIVTESDLGKLPFLKCVVKETLRLHPPIPIHLHGTTKDCVLGGYSVPRGSRVFINAWAINRDGEAWKDPDTFRPSRFMPDGEAAGLDLKGGCYELLSFGSGRRSCPAQGLGQHAVEFAVAQLVHGFDWKLPGDMKPTELDMSDMNGVTVSRATRLYAVPTPRLTCPL

SEQ ID NO: 15876 - DNA, 1270 bp, Triticum aestivum
  misc_feature (1)..(1270): Ceres Seq. ID no. 13656662
ccaaggccaggcgcggcaccgccactcccgcgcctccctcccctatggcacgtcctccctcccaggcctcggctgtcttctccgtcggcggcgagggcgccgcactcttcctctccgtcgccggcgagggcgccgcgccctaaactccgaggctactgagaacttcacagtatataacttgattgggagaggaagctgcggttcagtgtacagagcaaagctaaaccaaaaacagatggttgtggcagtgaaagtttttgaccttgacatgcaaggcgcggataaaagtttcatctcagaatgtaaagcactgagaaacattcggcaccgtaatcttcttccaattctgactgcatgctcaacaattgataaccaaggccgggatttcaaagctctagtctaccagttcatgcccaacggcaacctggacacttggctgcacccggcaggagatggaaaagccccaaagcaactggacctctctcaaagaatgaaaatagctgttgatatagccgatgcattgcaatatatacaccatgactgtgagaatcctattgttcactgtgatttgaagcccagcaatatcctcctagattatgatatgacagctcgtttgggggactttggcatcgcaaggttgtacatcaaatccaaatcagcggcagctggaggttcgagttcaatgggtacaataactctgaggggcacgattggatatattgctccagagtatgcgggaggtggctacctatcgacgtctggagacgcgtacagttttgggatagtgctgctggagatgctgacaggaagaaggccgaccgaccctatgttctgcgaggggcttgacatcgtgaactttgtcaagaggaactttccggatcagatacttgatatccttgacgcttctctccgagaagaatgtcaagactgttctcaggataatctggaaggagaaaacgaagtccaccggtgcctgctgtccttgctgaaagtggcactttcttgcgcaagccaggatcctaacgaacgaatgaacatgagagaagcagctactgaattgcacgcgatcgacacattgtatgtgtcttgaagcggatgctatgtgctagagctgtatcatacatacataccagctgatgtgaagcgtgtaactagagctgtatcgtacgttcgtactatagtggccgtgtagaacttttgtactcgaaaaatttatttgttgggctgtggctttgttcctagcctttgaaatgctcatctttttgcaaag

SEQ ID NO: 15877 - protein, 362 aa, Triticum aestivum
  peptide (1)..(362): Ceres Seq. ID no. 13656663
  misc_feature (26)..(362): NCBI GI NO: 34915440 NR Description: putative protein kinase Xa21
  misc_feature (27)..(362): NCBI GI NO: 34895882 NR Description: putative protein kinase Xa21
  misc_feature (49)..(361): NCBI GI NO: 34895902 NR Description: putative protein kinase Xa21
  misc_feature (26)..(361): NCBI GI NO: 34895898 NR Description: putative protein kinase Xa21
  misc_feature (27)..(360): NCBI GI NO: 34895894 NR Description: putative protein kinase Xa21
  misc_feature (50)..(356): NCBI GI NO: 34914440 NR Description: putative protein kinase Xa21
  misc_feature (25)..(362): NCBI GI NO: 37575361 NR Description: receptor protein kinase [Triticum turgidum]
  misc_feature (51)..(356): NCBI GI NO: 37533018 NR Description: putative receptor protein kinase
  misc_feature (51)..(356): NCBI GI NO: 15232726 NR Description: leucine-rich repeat transmembrane protein kinase
  misc_feature (50)..(362): NCBI GI NO: 37533650 NR Description: putative Receptor-like protein kinase
QGQARHRHSRASLPYGTSSLPGLGCLLRRRRGRRTLPLRRRRGRRALNSEATENFTVYNLIGRGSCGSVYRAKLNQKQMVVAVKVFDLDMQGADKSFISECKALRNIRHRNLLPILTACSTIDNQGRDFKALVYQFMPNGNLDTWLHPAGDGKAPKQLDLSQRMKIAVDIADALQYIHHDCENPIVHCDLKPSNILLDYDMTARLGDFGIARLYIKSKSAAAGGSSSMGTITLRGTIGYIAPEYAGGGYLSTSGDAYSFGIVLLEMLTGRRPTDPMFCEGLDIVNFVKRNFPDQILDILDASLREECQDCSQDNLEGENEVHRCLLSLLKVALSCASQDPNERMNMREAATELHAIDTLYVS

SEQ ID NO: 15878 - protein, 284 aa, Triticum aestivum
  peptide (1)..(284): Ceres Seq. ID no. 13656664
  misc_feature (1)..(284): NCBI GI NO: 34915440 NR Description: putative protein kinase Xa21
  misc_feature (1)..(284): NCBI GI NO: 34895882 NR Description: putative protein kinase Xa21
  misc_feature (1)..(283): NCBI GI NO: 34895902 NR Description: putative protein kinase Xa21
  misc_feature (1)..(283): NCBI GI NO: 34895898 NR Description: putative protein kinase Xa21
  misc_feature (1)..(282): NCBI GI NO: 34895894 NR Description: putative protein kinase Xa21
  misc_feature (1)..(278): NCBI GI NO: 34914440 NR Description: putative protein kinase Xa21
  misc_feature (1)..(284): NCBI GI NO: 37575361 NR Description: receptor protein kinase [Triticum turgidum]
  misc_feature (1)..(278): NCBI GI NO: 37533018 NR Description: putative receptor protein kinase
  misc_feature (1)..(278): NCBI GI NO: 15232726 NR Description: leucine-rich repeat transmembrane protein kinase
  misc_feature (1)..(284): NCBI GI NO: 37533650 NR Description: putative Receptor-like protein kinase
MVVAVKVFDLDMQGADKSFISECKALRNIRHRNLLPILTACSTIDNQGRDFKALVYQFMPNGNLDTWLHPAGDGKAPKQLDLSQRMKIAVDIADALQYIHHDCENPIVHCDLKPSNILLDYDMTARLGDFGIARLYIKSKSAAAGGSSSMGTITLRGTIGYIAPEYAGGGYLSTSGDAYSFGIVLLEMLTGRRPTDPMFCEGLDIVNFVKRNFPDQILDILDASLREECQDCSQDNLEGENEVHRCLLSLLKVALSCASQDPNERMNMREAATELHAIDTLYVS

SEQ ID NO: 15879 - protein, 273 aa, Triticum aestivum
  peptide (1)..(273): Ceres Seq. ID no. 13656665
  misc_feature (1)..(273): NCBI GI NO: 34915440 NR Description: putative protein kinase Xa21
  misc_feature (1)..(273): NCBI GI NO: 34895882 NR Description: putative protein kinase Xa21
  misc_feature (1)..(272): NCBI GI NO: 34895902 NR Description: putative protein kinase Xa21
  misc_feature (1)..(272): NCBI GI NO: 34895898 NR Description: putative protein kinase Xa21
  misc_feature (1)..(271): NCBI GI NO: 34895894 NR Description: putative protein kinase Xa21
  misc_feature (1)..(267): NCBI GI NO: 34914440 NR Description: putative protein kinase Xa21
  misc_feature (1)..(273): NCBI GI NO: 37575361 NR Description: receptor protein kinase [Triticum turgidum]
  misc_feature (1)..(267): NCBI GI NO: 37533018 NR Description: putative receptor protein kinase
  misc_feature (1)..(267): NCBI GI NO: 15232726 NR Description: leucine-rich repeat transmembrane protein kinase
  misc_feature (1)..(273): NCBI GI NO: 37533650 NR Description: putative Receptor-like protein kinase
MQGADKSFISECKALRNIRHRNLLPILTACSTIDNQGRDFKALVYQFMPNGNLDTWLHPAGDGKAPKQLDLSQRMKIAVDIADALQYIHHDCENPIVHCDLKPSNILLDYDMTARLGDFGIARLYIKSKSAAAGGSSSMGTITLRGTIGYIAPEYAGGGYLSTSGDAYSFGIVLLEMLTGRRPTDPMFCEGLDIVNFVKRNFPDQILDILDASLREECQDCSQDNLEGENEVHRCLLSLLKVALSCASQDPNERMNMREAATELHAIDTLYVS

SEQ ID NO: 15880 - DNA, 978 bp, Triticum aestivum
  misc_feature (1)..(978): Ceres Seq. ID no. 13663965
gaaaccaaaaaaccctcgttccccactctggactgccctcctcctccctcggcggtttgttcatcgcctctgccgaaaaatcaaacccaaaaccaagaaagggggcgaaaatggctgaggcgaactcgtacgaggagcagcgcaggaggcaggtggaggagaacaagcggaagctggaggagctgcgcctgcaccacctctccgccgccgtccgcgaggccgccgtcaagcccaagctgaagaggaaggccccgaagccgtgggacgccgccgatgacgccccgccccggcgttccggccgtatcgccaccctccccgagcagcccgactatcgcgacaatctgggcaccgggaaaccacggcagcagaaggaagtaaagcctgatcatgcgtacgccatcgccaaggccgaagagctacaggatgagctaggctccgactacccgacctttgtcaaacccatgccacagtctcttacctcgctgcatatcccggcacagttcagcatggagcatctcccggacaatggcatgagaatggttttggtggatgaggaggaggaggagtttaaggtgagctatcgtccacacagtagcagtcttgtcgccgggtggagcgagtttgccatcgacaatgagctagttgaaggtgattgcttggtgttccagctgatcaagagggcattgttcaaggtctacatattcagggcaagttcgtactatgaaaatgagcattaatggagcagccggcaggctcctggttgcttcatgtcaacttgtgttgaactagcacagttcagaaatctgcactatctcagcggttagttatgtatgtatggctactgtcaggcattattagaatctctcgtgtgattgcaagtcgtatggtaactgtcggcatcttgtaaagtttgtcatgcgacggcaagtgtgaaacttgacatgtgatacccatcatggttgatatcctattgattcg

SEQ ID NO: 15881 - protein, 244 aa, Triticum aestivum
  peptide (1)..(244): Ceres Seq. ID no. 13663966
  misc_feature (149)..(237): Pfam Name: Pfam Description:  B3 DNA binding domain
  misc_feature (132)..(243): NCBI GI NO: 15217278 NR Description: Unknown protein [Oryza sativa]
  misc_feature (42)..(123): NCBI GI NO: 15217278 NR Description: Unknown protein [Oryza sativa]
  misc_feature (131)..(243): NCBI GI NO: 9294620 NR Description: gene_id:MVI11.9~unknown protein
  misc_feature (37)..(100): NCBI GI NO: 9294620 NR Description: gene_id:MVI11.9~unknown protein
  misc_feature (43)..(242): NCBI GI NO: 30694114 NR Description: expressed protein [Arabidopsis thaliana]
  misc_feature (132)..(244): NCBI GI NO: 15237157 NR Description: transcriptional factor B3 family
  misc_feature (43)..(160): NCBI GI NO: 10177273 NR Description: gene_id:MJB21.7~unknown protein
NQKTLVPHSGLPSSSLGGLFIASAEKSNPKPRKGAKMAEANSYEEQRRRQVEENKRKLEELRLHHLSAAVREAAVKPKLKRKAPKPWDAADDAPPRRSGRIATLPEQPDYRDNLGTGKPRQQKEVKPDHAYAIAKAEELQDELGSDYPTFVKPMPQSLTSLHIPAQFSMEHLPDNGMRMVLVDEEEEEFKVSYRPHSSSLVAGWSEFAIDNELVEGDCLVFQLIKRALFKVYIFRASSYYENEH

SEQ ID NO: 15882 - protein, 208 aa, Triticum aestivum
  peptide (1)..(208): Ceres Seq. ID no. 13663967
  misc_feature (113)..(201): Pfam Name: Pfam Description:  B3 DNA binding domain
  misc_feature (96)..(207): NCBI GI NO: 15217278 NR Description: Unknown protein [Oryza sativa]
  misc_feature (6)..(87): NCBI GI NO: 15217278 NR Description: Unknown protein [Oryza sativa]
  misc_feature (95)..(207): NCBI GI NO: 9294620 NR Description: gene_id:MVI11.9~unknown protein
  misc_feature (1)..(64): NCBI GI NO: 9294620 NR Description: gene_id:MVI11.9~unknown protein
  misc_feature (7)..(206): NCBI GI NO: 30694114 NR Description: expressed protein [Arabidopsis thaliana]
  misc_feature (96)..(208): NCBI GI NO: 15237157 NR Description: transcriptional factor B3 family
  misc_feature (7)..(124): NCBI GI NO: 10177273 NR Description: gene_id:MJB21.7~unknown protein
MAEANSYEEQRRRQVEENKRKLEELRLHHLSAAVREAAVKPKLKRKAPKPWDAADDAPPRRSGRIATLPEQPDYRDNLGTGKPRQQKEVKPDHAYAIAKAEELQDELGSDYPTFVKPMPQSLTSLHIPAQFSMEHLPDNGMRMVLVDEEEEEFKVSYRPHSSSLVAGWSEFAIDNELVEGDCLVFQLIKRALFKVYIFRASSYYENEH

SEQ ID NO: 15883 - DNA, 1024 bp, Triticum aestivum
  misc_feature (1)..(1024): Ceres Seq. ID no. 15179804
agaaccagtaacccgcactgcgcccactccgatctccccagtcccctccaaatccctcgccggaaccctagccccgcgccgccgccatgcctccgcgccgctctaagggaggggccgggggcaagcccgaccccgaagccaccgacgccgagcccgtagacgagaccacggtcgacgccatgtccgaagacgaggccgacgacgacaactccaaggaggagtccgctgagagcggagctgaggatacggacggcgaggactccaaggaggaagccgccgagaccaaggccgagcagatggatgcggagcatcaaagagggaagccgccgagaccaaggccgaggagacggtcgccgaacctgaagccaatggtgcagatgcggagaccaaagtcgaggcggcggatgccaaagtcgaagaggaagccgccgagagcgactctgagcgcgaggcggatgccggggaagccgatccagaagcggaagcagaggaaaccgacggcgagaatgacaagcaagccgctcgggccgacggcgagagtggagaggaagctgctgggtctggtggcgaggatgaagaagaagccgccggcacagacggcgacaacgccgctgatgttggtggcgagaaggtagatgcggattctcaagccgaaggtgagggtactgatgccgagcctgatgctctcgaggaatcccctcctccctcccctccagcccgtagccgccgccgcaagcgagtggtcaaacctgacccgcccactgaggatgacgaggaagaggagacccctctgcccccacgccggcgccgacgtcgcaaagcaggggaacgtggcgactctccaccgccactgccggacaacctccggtgccgcagaagtgatggtaagaagtggcgctgctcagctcgtgcactccccactgtcagcttttgcgagtatcactatgccaaggctagcaagggcaagaaaccgccagccgatggggaggtccttgccgtggctctccaacggcaaaagaagaac

SEQ ID NO: 15884 - protein, 182 aa, Triticum aestivum
  peptide (1)..(182): Ceres Seq. ID no. 15179805
  misc_feature (12)..(74): Pfam Name: Pfam Description:  S-antigen protein
  misc_feature (13)..(74): NCBI GI NO: 2133786 NR Description: NF-180 - sea lamprey
  misc_feature (15)..(76): NCBI GI NO: 2133786 NR Description: NF-180 - sea lamprey
  misc_feature (1)..(76): NCBI GI NO: 21309836 NR Description: glutamic acid-rich protein cNBL1700
  misc_feature (1)..(76): NCBI GI NO: 21309834 NR Description: glutamic acid-rich protein cNBL1500
  misc_feature (7)..(74): NCBI GI NO: 9631239 NR Description: orf 48 [Ateline herpesvirus 3]
  misc_feature (12)..(65): NCBI GI NO: 31207045 NR Description: ENSANGP00000021340 [Anopheles gambiae]
  misc_feature (11)..(79): NCBI GI NO: 23479255 NR Description: hypothetical protein [Plasmodium yoelii yoelii]
  misc_feature (15)..(76): NCBI GI NO: 9631239 NR Description: orf 48 [Ateline herpesvirus 3]
  misc_feature (6)..(76): NCBI GI NO: 9631239 NR Description: orf 48 [Ateline herpesvirus 3]
  misc_feature (5)..(76): NCBI GI NO: 9631239 NR Description: orf 48 [Ateline herpesvirus 3]
MPPRRSKGGAGGKPDPEATDAEPVDETTVDAMSEDEADDDNSKEESAESGAEDTDGEDSKEEAAETKAEQMDAEHQRGKPPRPRPRRRSPNLKPMVQMRRPKSRRRMPKSKRKPPRATLSARRMPGKPIQKRKQRKPTARMTSKPLGPTARVERKLLGLVARMKKKPPAQTATTPLMLVARR

SEQ ID NO: 15885 - protein, 151 aa, Triticum aestivum
  peptide (1)..(151): Ceres Seq. ID no. 15179806
  misc_feature (1)..(43): NCBI GI NO: 2133786 NR Description: NF-180 - sea lamprey
  misc_feature (1)..(45): NCBI GI NO: 2133786 NR Description: NF-180 - sea lamprey
  misc_feature (1)..(45): NCBI GI NO: 21309836 NR Description: glutamic acid-rich protein cNBL1700
  misc_feature (1)..(45): NCBI GI NO: 21309834 NR Description: glutamic acid-rich protein cNBL1500
  misc_feature (1)..(43): NCBI GI NO: 9631239 NR Description: orf 48 [Ateline herpesvirus 3]
  misc_feature (1)..(34): NCBI GI NO: 31207045 NR Description: ENSANGP00000021340 [Anopheles gambiae]
  misc_feature (1)..(48): NCBI GI NO: 23479255 NR Description: hypothetical protein [Plasmodium yoelii yoelii]
  misc_feature (1)..(45): NCBI GI NO: 9631239 NR Description: orf 48 [Ateline herpesvirus 3]
  misc_feature (1)..(45): NCBI GI NO: 9631239 NR Description: orf 48 [Ateline herpesvirus 3]
  misc_feature (1)..(45): NCBI GI NO: 9631239 NR Description: orf 48 [Ateline herpesvirus 3]
MSEDEADDDNSKEESAESGAEDTDGEDSKEEAAETKAEQMDAEHQRGKPPRPRPRRRSPNLKPMVQMRRPKSRRRMPKSKRKPPRATLSARRMPGKPIQKRKQRKPTARMTSKPLGPTARVERKLLGLVARMKKKPPAQTATTPLMLVARR

SEQ ID NO: 15886 - protein, 129 aa, Triticum aestivum
  peptide (1)..(129): Ceres Seq. ID no. 15179807
MRILKPKVRVLMPSLMLSRNPLLPPLQPVAAAASEWSNLTRPLRMTRKRRPLCPHAGADVAKQGNVATLHRHCRTTSGAAEVMVRSGAAQLVHSPLSAFASITMPRLARARNRQPMGRSLPWLSNGKRR

SEQ ID NO: 15887 - DNA, 1528 bp, Triticum aestivum
  misc_feature (1)..(1528): Ceres Seq. ID no. 14313344
gtcaccctgtttgtccagtggacttccaactccagtctgacttcatcttcttcccaaaatcaaagaagcagcagaaatgcaggggtagcagctcacgccatgtccaaatccaaatccaaatagcttcgcctccgataggtggaggcggctactctgataggaggagaaggaagcaaaggagggaggcagcagaactgcagaagcaccatggtttccctctggcacacctccgtcattgtccttgtgctcctattcctcggaggatctgatgccaacccagctgcccgtcgacacggtcagctggatgtaaaccacaagaagaagccactacagacatccagaccttacaacattgcccacaggggttccaatggcgaaatacccgaagagacagctgcagcatatttgagggcaatcgaggaaggtgcagacttcatagagactgatatacttgcatcaaaggacggacatctgatatgtttccatgatgtaatcctggatgccacgacggacatcgtgaaccgtaccgagtttgctggcaggaagagaacctatgatgtccagggatttaagttgactgggtggtttatcgtggattttactttaagagaactgaaatcactgagggtgaaacagcgctacaatttcagggatcaacagtataattggaagtacaatattcttacatttgatgagtttattttgattgcacttcatgctgatagggtggtcggaatatacccagagatcaagaatcctattttcatcaaccagcatgtcaagtggtcaggtggcaagaagtttgaggacaagtttgtcgggacgcttctcaagcatggctacaaaggcaaatatatgtctaaagattggctcaagaagccactattcatccaatcctttgctccaacttcactaatttacatctcaaacatgacaaatgctccaaaactgcttctaatatacgataccacagttccaactcaagataccaaccagtcacactatgagataacttcgaacggctatctcgcgttcataaggaagtatgtaattgggattgggccatggaaggatacaattatccccccaaagaataaccatctaggccctgcaaccaatcttgtggcacgggcacacactctgaatcttcaggtgcatccgtacacattcagaaatgagaactcattcctgcacttcgacttccatcaagacccttatgctgaatatgagtactggctcagagaaatcggagtcgacgcgctgttcaccgatttcacgggcagcttgcacaagtaccaggagtggacagctccacacgaaaagaaggaaaagaagtgcagaggatctcctgcatgagatcgccaagacgctgaaggttgatgttcactaaagcttaggttgccaagtctgtatacctcctccctttcaggagctatttcattgttgtcagtaccgagaaaatgaactggttaataccattctatgtaattgcttcctataaatcacgagcagagcatcatagagttcg

SEQ ID NO: 15888 - protein, 382 aa, Triticum aestivum
  peptide (1)..(382): Ceres Seq. ID no. 14313345
  misc_feature (37)..(374): NCBI GI NO: 34909788 NR Description: putative glycerophosphoryl diesterphosphodiesterase
  misc_feature (38)..(378): NCBI GI NO: 15221164 NR Description: glycerophosphodiester phosphodiesterase -related
  misc_feature (11)..(369): NCBI GI NO: 15241502 NR Description: glycerophosphodiester phosphodiesterase
  misc_feature (38)..(372): NCBI GI NO: 34394918 NR Description: putative glycerophosphoryl diesterphosphodiesterase
  misc_feature (41)..(356): NCBI GI NO: 23126501 NR Description: hypothetical protein [Nostoc punctiforme]
  misc_feature (32)..(355): NCBI GI NO: 32997080 NR Description: glycerophosphoryl diester phosphodiesterase
  misc_feature (30)..(355): NCBI GI NO: 15595544 NR Description: glycerophosphoryl diester phosphodiesterase
  misc_feature (42)..(356): NCBI GI NO: 16127502 NR Description: glycerophosphoryl diester phosphodiesterase
  misc_feature (46)..(355): NCBI GI NO: 23105793 NR Description: hypothetical protein [Azotobacter vinelandii]
  misc_feature (49)..(355): NCBI GI NO: 22976139 NR Description: hypothetical protein [Ralstonia metallidurans]
MVSLWHTSVIVLVLLFLGGSDANPAARRHGQLDVNHKKKPLQTSRPYNIAHRGSNGEIPEETAAAYLRAIEEGADFIETDILASKDGHLICFHDVILDATTDIVNRTEFAGRKRTYDVQGFKLTGWFIVDFTLRELKSLRVKQRYNFRDQQYNWKYNILTFDEFILIALHADRVVGIYPEIKNPIFINQHVKWSGGKKFEDKFVGTLLKHGYKGKYMSKDWLKKPLFIQSFAPTSLIYISNMTNAPKLLLIYDTTVPTQDTNQSHYEITSNGYLAFIRKYVIGIGPWKDTIIPPKNNHLGPATNLVARAHTLNLQVHPYTFRNENSFLHFDFHQDPYAEYEYWLREIGVDALFTDFTGSLHKYQEWTAPHEKKEKKCRGSPA

SEQ ID NO: 15889 - DNA, 713 bp, Triticum aestivum
  misc_feature (1)..(713): Ceres Seq. ID no. 12618682
ctctctctcgtttatctctctgttcgatccagatcgagatggtcggcgcccgcaaccacctcgcttggcctcgccggccaccacctcgccgccggtcatccactttccccttcggctcgccgttaccggacccggcaccgtcgcccccacaggcccgctggcgcacgccacctcgtcgccttcgccctttgccccgggcgccgttggccccatcgcctcgggcccacgccggcctctacttcgcccatggcgtcgccggccacgtctcccttcgcccacctctgcttcgcccatggcgccgccagctctgtcgccccccgccgacctctgcttcgcccatggcgcagctggccccgtcgccccccgccagcctctgcttcgcccatggcaccgccggccccgtcgccccctccggcttctgccggccccggccacgtcgccctcgcgtgcctccgctaccctcgacgctgcaccgcctcacacctcgaggagcggcagcagctcctcgggcatcagtgtgctgcggaagggggagggagagtggtgcggctgctccggcgagcacgggcacagggggtggttgcaggttggcgcaggcgtgcagatcgagctcaatatggatgcgcatgctggatcttgggctgctatactctttgtaatattttcatgtgtaatccgttcatctaattaatagagcagttttgccttggatc

SEQ ID NO: 15890 - protein, 229 aa, Triticum aestivum
  peptide (1)..(229): Ceres Seq. ID no. 12618683
  misc_feature (50)..(166): Pfam Name: Pfam Description:  Herpesvirus glycoprotein D
SLSFISLFDPDRDGRRPQPPRLASPATTSPPVIHFPLRLAVTGPGTVAPTGPLAHATSSPSPFAPGAVGPIASGPRRPLLRPWRRRPRLPSPTSASPMAPPALSPPADLCFAHGAAGPVAPRQPLLRPWHRRPRRPLRLLPAPATSPSRASATLDAAPPHTSRSGSSSSGISVLRKGEGEWCGCSGEHGHRGWLQVGAGVQIELNMDAHAGSWAAILFVIFSCVIRSSN

SEQ ID NO: 15891 - protein, 228 aa, Triticum aestivum
  peptide (1)..(228): Ceres Seq. ID no. 12618684
  misc_feature (65)..(196): Pfam Name: pollen allergen Pfam Description: Ribonuclease
LSLVYLSVRSRSRWSAPATTSLGLAGHHLAAGHPLSPSARRYRTRHRRPHRPAGARHLVAFALCPGRRWPHRLGPTPASTSPMASPATSPFAHLCFAHGAASSVAPRRPLLRPWRSWPRRPPPASASPMAPPAPSPPPASAGPGHVALACLRYPRRCTASHLEERQQLLGHQCAAEGGGRVVRLLRRARAQGVVAGWRRRADRAQYGCACWILGCYTLCNIFMCNPFI

SEQ ID NO: 15892 - protein, 218 aa, Triticum aestivum
  peptide (1)..(218): Ceres Seq. ID no. 12618685
LSRLSLCSIQIEMVGARNHLAWPRRPPPRRRSSTFPFGSPLPDPAPSPPQARWRTPPRRLRPLPRAPLAPSPRAHAGLYFAHGVAGHVSLRPPLLRPWRRQLCRPPPTSASPMAQLAPSPPASLCFAHGTAGPVAPSGFCRPRPRRPRVPPLPSTLHRLTPRGAAAAPRASVCCGRGRESGAAAPASTGTGGGCRLAQACRSSSIWMRMLDLGLLYSL

SEQ ID NO: 15893 - protein, 132 aa, Triticum aestivum
  peptide (1)..(132): Ceres Seq. ID no. 12618686
  misc_feature (1)..(69): Pfam Name: Pfam Description:  Herpesvirus glycoprotein D
MAPPALSPPADLCFAHGAAGPVAPRQPLLRPWHRRPRRPLRLLPAPATSPSRASATLDAAPPHTSRSGSSSSGISVLRKGEGEWCGCSGEHGHRGWLQVGAGVQIELNMDAHAGSWAAILFVIFSCVIRSSN

SEQ ID NO: 15894 - DNA, 818 bp, Triticum aestivum
  misc_feature (1)..(818): Ceres Seq. ID no. 12625567
agttgcttcatcgtgacgagcagcccggacagcaattagggcaatcaatcagtccatttctttccctctccctccagcagctcggctctctctggtctctgcccgccatggcggccaagctgacccaggagcaggcggacgagtgcaaggaggtgttcgacctgttcgacggcgacgaggacggccgcatcgccgccggcgagctggtcacggcgctccactcgctgggccagaacgtggacgaggccgaggcgcggggcttcctcgaggacgccggcgcgggcggcgccggcgccgtcgccatcgacctccccacgttcctggccgtggccgcgcgcaaggccaacgccggcgtatcggccaagggactggcccagtgcctcgacgcgttcgacgacgacgggagcggcgtcatccccgcggagcagctgcggcaggtgatgctcacccacggcgaccggctcacggaggaggaggccgacgagctggtccgcaaggccgacccccgcggcgagggccgcgtccagtgcaaggagctcgtcaaggtgctcatgaacaacaagtgatcggcgagcttctctgatctgatgcgtcgatcgatcggccgatctggggaccggtgaagtgttgtcctccggtgaggaaatggtgccatgtttcttgatttggtgatgtactcctactggttttgctgtaatattggattggatgcgaatgctctgcatacgcgaagtcctggctgcaatatgtatgctgcgtttgtttcgttgtatgtatgtattgtatgcatacacaaattgctttaacgacgattttgc

SEQ ID NO: 15895 - protein, 187 aa, Triticum aestivum
  peptide (1)..(187): Ceres Seq. ID no. 12625568
  misc_feature (36)..(184): NCBI GI NO: 4959593 NR Description: calmodulin mutant SYNCAM5 [synthetic construct]
  misc_feature (36)..(184): NCBI GI NO: 4959149 NR Description: calmodulin mutant SYNCAM46 [synthetic construct]
  misc_feature (36)..(184): NCBI GI NO: 4959151 NR Description: calmodulin mutant SYNCAM48 [synthetic construct]
  misc_feature (36)..(184): NCBI GI NO: 4959618 NR Description: calmodulin mutant SYNCAM45 [synthetic construct]
  misc_feature (36)..(184): NCBI GI NO: 4959602 NR Description: calmodulin mutant SYNCAM8 [synthetic construct]
  misc_feature (36)..(184): NCBI GI NO: 4959590 NR Description: calmodulin mutant SYNCAM3 [synthetic construct]
  misc_feature (36)..(185): NCBI GI NO: 115519 NR Description: Calmodulin (CaM)
  misc_feature (36)..(184): NCBI GI NO: 1085679 NR Description: calmodulin - Macrocystis pyrifera
  misc_feature (36)..(184): NCBI GI NO: 4959142 NR Description: calmodulin mutant SYNCAM2 [synthetic construct]
  misc_feature (36)..(184): NCBI GI NO: 4959625 NR Description: calmodulin mutant SYNCAM13 [synthetic construct]
LLHRDEQPGQQLGQSISPFLSLSLQQLGSLWSLPAMAAKLTQEQADECKEVFDLFDGDEDGRIAAGELVTALHSLGQNVDEAEARGFLEDAGAGGAGAVAIDLPTFLAVAARKANAGVSAKGLAQCLDAFDDDGSGVIPAEQLRQVMLTHGDRLTEEEADELVRKADPRGEGRVQCKELVKVLMNNK

SEQ ID NO: 15896 - protein, 152 aa, Triticum aestivum
  peptide (1)..(152): Ceres Seq. ID no. 12625569
  misc_feature (1)..(149): NCBI GI NO: 4959593 NR Description: calmodulin mutant SYNCAM5 [synthetic construct]
  misc_feature (1)..(149): NCBI GI NO: 4959149 NR Description: calmodulin mutant SYNCAM46 [synthetic construct]
  misc_feature (1)..(149): NCBI GI NO: 4959151 NR Description: calmodulin mutant SYNCAM48 [synthetic construct]
  misc_feature (1)..(149): NCBI GI NO: 4959602 NR Description: calmodulin mutant SYNCAM8 [synthetic construct]
  misc_feature (1)..(149): NCBI GI NO: 4959618 NR Description: calmodulin mutant SYNCAM45 [synthetic construct]
  misc_feature (1)..(149): NCBI GI NO: 4959590 NR Description: calmodulin mutant SYNCAM3 [synthetic construct]
  misc_feature (1)..(150): NCBI GI NO: 115519 NR Description: Calmodulin (CaM)
  misc_feature (1)..(149): NCBI GI NO: 1085679 NR Description: calmodulin - Macrocystis pyrifera
  misc_feature (1)..(149): NCBI GI NO: 4959142 NR Description: calmodulin mutant SYNCAM2 [synthetic construct]
  misc_feature (1)..(149): NCBI GI NO: 4959625 NR Description: calmodulin mutant SYNCAM13 [synthetic construct]
MAAKLTQEQADECKEVFDLFDGDEDGRIAAGELVTALHSLGQNVDEAEARGFLEDAGAGGAGAVAIDLPTFLAVAARKANAGVSAKGLAQCLDAFDDDGSGVIPAEQLRQVMLTHGDRLTEEEADELVRKADPRGEGRVQCKELVKVLMNNK

SEQ ID NO: 15897 - DNA, 1216 bp, Triticum aestivum
  misc_feature (1)..(1216): Ceres Seq. ID no. 13502979
acgcaggcacgcggctgtccccgtccgcgtggcctccaactcgactcgttccctttccttccttcttcccctcgtctccccaaccagaaacctaaacagaatcccaacccacccccgcagccaatcccaccggacgccagtcagccaaccccaatctcgactcctccgccgcctgaatccggttccgagtccatatttgaggtgccaccatgttcaacaggttatttgggaagcccaaggagcaggccaacgccggcgcgttggccactttggataagttaaacgagactcttgatatgctggagaagaaagagaaagtgttagagaaaaaagcaggcgctgagcttgagagggccaaggaattctcaaaagcaaagaataaaagagcggctatccaatcattgaagaggaaaaaactttatgagcagcaaattgagcagcttgggaatttccagttgagaatccatgatcagatgatcatgttagaagctgctaaagctacaacagagactgttgatgcattgaggactggagctaaagctatgaaagcgatgcaaaaagcaacaaatatcgatgatgtcgacaagactatggacgaaattaatgaacagacagaaaacatgaaacaaatacaagatgctctgtcagctcctcttggagcttctgctgattttgacgaggatgaactggaagcggagctggaagagttggagggagcagagttggaatcccaactactggagcctgttgtaactattcctattcatacgacgcccgtcccaggcaaggcgcaaccaactcgccctgctccacagaaagcatcggctgaggaggatgagcttgctgcactgcaagctgaaatggcattgtgatcaggcccccagtgaatgaagaggtgaaatgtacaaatgattggctggacggtacgctgtcgcaggcgagtcctggctacacatatatttgcccgtgtgtataatctttggtgggagacatttggcgaacagaggcaggaaaggctgctccagtccagtgtttatctagttgtttgattgaaggtctgtttcccggacataatttttggcacggtcagctccattccaggtcgtgtgcaatgctcattgttgtggcacactatttactgttgacccgtattatctcttgccatgtaaaccaagttatctcattccagtgtttgctaatttggtgtgttgacggg

SEQ ID NO: 15898 - protein, 220 aa, Triticum aestivum
  peptide (1)..(220): Ceres Seq. ID no. 13502980
  misc_feature (20)..(201): Pfam Name: Pfam Description:  SNF7
  misc_feature (1)..(220): NCBI GI NO: 15233464 NR Description: expressed protein [Arabidopsis thaliana]
  misc_feature (3)..(220): NCBI GI NO: 21594892 NR Description: copia-like retroelement pol polyprotein
  misc_feature (1)..(220): NCBI GI NO: 15224854 NR Description: copia-related retroelement pol polyprotein
  misc_feature (1)..(216): NCBI GI NO: 28277855 NR Description: Unknown (protein for MGC:56112) [Danio rerio]
  misc_feature (1)..(215): NCBI GI NO: 28077049 NR Description: RIKEN cDNA 2010012F05 [Mus musculus]
  misc_feature (1)..(215): NCBI GI NO: 28827795 NR Description: chromosome 20 open reading frame 178
  misc_feature (1)..(210): NCBI GI NO: 28278647 NR Description: Similar to RIKEN cDNA 2010012F05 gene
  misc_feature (1)..(199): NCBI GI NO: 34859075 NR Description: similar to RIKEN cDNA 2010012F05
  misc_feature (4)..(214): NCBI GI NO: 13182765 NR Description: CDA04 [Homo sapiens]
  misc_feature (6)..(219): NCBI GI NO: 29841209 NR Description: similar to GenBank Accession Number BC011429unknown
MFNRLFGKPKEQANAGALATLDKLNETLDMLEKKEKVLEKKAGAELERAKEFSKAKNKRAAIQSLKRKKLYEQQIEQLGNFQLRIHDQMIMLEAAKATTETVDALRTGAKAMKAMQKATNIDDVDKTMDEINEQTENMKQIQDALSAPLGASADFDEDELEAELEELEGAELESQLLEPVVTIPIHTTPVPGKAQPTRPAPQKASAEEDELAALQAEMAL

SEQ ID NO: 15899 - protein, 191 aa, Triticum aestivum
  peptide (1)..(191): Ceres Seq. ID no. 13502981
  misc_feature (1)..(172): Pfam Name: Pfam Description:  SNF7
  misc_feature (1)..(191): NCBI GI NO: 15233464 NR Description: expressed protein [Arabidopsis thaliana]
  misc_feature (1)..(191): NCBI GI NO: 21594892 NR Description: copia-like retroelement pol polyprotein
  misc_feature (1)..(191): NCBI GI NO: 15224854 NR Description: copia-related retroelement pol polyprotein
  misc_feature (1)..(187): NCBI GI NO: 28277855 NR Description: Unknown (protein for MGC:56112) [Danio rerio]
  misc_feature (1)..(186): NCBI GI NO: 28077049 NR Description: RIKEN cDNA 2010012F05 [Mus musculus]
  misc_feature (1)..(186): NCBI GI NO: 28827795 NR Description: chromosome 20 open reading frame 178
  misc_feature (1)..(181): NCBI GI NO: 28278647 NR Description: Similar to RIKEN cDNA 2010012F05 gene
  misc_feature (1)..(170): NCBI GI NO: 34859075 NR Description: similar to RIKEN cDNA 2010012F05
  misc_feature (1)..(185): NCBI GI NO: 13182765 NR Description: CDA04 [Homo sapiens]
  misc_feature (1)..(190): NCBI GI NO: 29841209 NR Description: similar to GenBank Accession Number BC011429unknown
MLEKKEKVLEKKAGAELERAKEFSKAKNKRAAIQSLKRKKLYEQQIEQLGNFQLRIHDQMIMLEAAKATTETVDALRTGAKAMKAMQKATNIDDVDKTMDEINEQTENMKQIQDALSAPLGASADFDEDELEAELEELEGAELESQLLEPVVTIPIHTTPVPGKAQPTRPAPQKASAEEDELAALQAEMAL

SEQ ID NO: 15900 - protein, 132 aa, Triticum aestivum
  peptide (1)..(132): Ceres Seq. ID no. 13502982
  misc_feature (1)..(113): Pfam Name: Pfam Description:  SNF7
  misc_feature (1)..(132): NCBI GI NO: 15233464 NR Description: expressed protein [Arabidopsis thaliana]
  misc_feature (1)..(132): NCBI GI NO: 21594892 NR Description: copia-like retroelement pol polyprotein
  misc_feature (1)..(132): NCBI GI NO: 15224854 NR Description: copia-related retroelement pol polyprotein
  misc_feature (1)..(128): NCBI GI NO: 28277855 NR Description: Unknown (protein for MGC:56112) [Danio rerio]
  misc_feature (1)..(127): NCBI GI NO: 28077049 NR Description: RIKEN cDNA 2010012F05 [Mus musculus]
  misc_feature (1)..(127): NCBI GI NO: 28827795 NR Description: chromosome 20 open reading frame 178
  misc_feature (1)..(122): NCBI GI NO: 28278647 NR Description: Similar to RIKEN cDNA 2010012F05 gene
  misc_feature (1)..(111): NCBI GI NO: 34859075 NR Description: similar to RIKEN cDNA 2010012F05
  misc_feature (1)..(126): NCBI GI NO: 13182765 NR Description: CDA04 [Homo sapiens]
  misc_feature (1)..(131): NCBI GI NO: 29841209 NR Description: similar to GenBank Accession Number BC011429unknown
MIMLEAAKATTETVDALRTGAKAMKAMQKATNIDDVDKTMDEINEQTENMKQIQDALSAPLGASADFDEDELEAELEELEGAELESQLLEPVVTIPIHTTPVPGKAQPTRPAPQKASAEEDELAALQAEMAL

SEQ ID NO: 15901 - DNA, 723 bp, Triticum aestivum
  misc_feature (1)..(723): Ceres Seq. ID no. 13597990
caaggaaatctcttcatgtcatccgcgatggctggaagtccacaacatggagcatggcaatacccgttggtttgcaggagcgctggaaccgtgactgtgtatttgatgttaaagacatcagcttggagccatgcctttctgatcgcatggctatgctgagcagcaagaccatgaaggaacttcaagtgggacaccccatcctaagcatggatgatgacatcgtttacttgctttctgaaaccacacccaagcacatggacaagttggcactgatgtttgctattgatgtgaagaagtcaacactgcgaggattggctgagcttgatgtcaagaagttcgattacctgtccagcttctgcactagtgagatctgcaggggtacctgagcaatattaaggtaacttctttatgctggtagaagcgagctctatcgaataaacaaactgaagagggtaaaccatctgaggttcctgcgaagaactggctaggacaaagaaatttcaaccatgtttgttgaaacttgggagctggatgtgaccttggagattgaatttctttagttgatttatcatgtattacatgtaatgcaactatctgggttatattgcttgcttatgtacttgtcccggtcaaaaaaaagtgctagtgaacttgtgtgggctaaatgtcttggttgaaccatgtttttatgtgttttgatttggttttaattgttctgtatgc

SEQ ID NO: 15902 - protein, 127 aa, Triticum aestivum
  peptide (1)..(127): Ceres Seq. ID no. 13597991
  misc_feature (1)..(125): NCBI GI NO: 34910024 NR Description: P0413G02.13
  misc_feature (53)..(119): NCBI GI NO: 18855020 NR Description: unknown protein [Oryza sativa]
  misc_feature (11)..(54): NCBI GI NO: 18855020 NR Description: unknown protein [Oryza sativa]
RKSLHVIRDGWKSTTWSMAIPVGLQERWNRDCVFDVKDISLEPCLSDRMAMLSSKTMKELQVGHPILSMDDDIVYLLSETTPKHMDKLALMFAIDVKKSTLRGLAELDVKKFDYLSSFCTSEICRGT

SEQ ID NO: 15903 - protein, 110 aa, Triticum aestivum
  peptide (1)..(110): Ceres Seq. ID no. 13597992
  misc_feature (1)..(108): NCBI GI NO: 34910024 NR Description: P0413G02.13
  misc_feature (36)..(102): NCBI GI NO: 18855020 NR Description: unknown protein [Oryza sativa]
  misc_feature (1)..(37): NCBI GI NO: 18855020 NR Description: unknown protein [Oryza sativa]
MAIPVGLQERWNRDCVFDVKDISLEPCLSDRMAMLSSKTMKELQVGHPILSMDDDIVYLLSETTPKHMDKLALMFAIDVKKSTLRGLAELDVKKFDYLSSFCTSEICRGT

SEQ ID NO: 15904 - protein, 79 aa, Triticum aestivum
  peptide (1)..(79): Ceres Seq. ID no. 13597993
  misc_feature (1)..(77): NCBI GI NO: 34910024 NR Description: P0413G02.13
  misc_feature (5)..(71): NCBI GI NO: 18855020 NR Description: unknown protein [Oryza sativa]
MAMLSSKTMKELQVGHPILSMDDDIVYLLSETTPKHMDKLALMFAIDVKKSTLRGLAELDVKKFDYLSSFCTSEICRGT

SEQ ID NO: 15905 - DNA, 979 bp, Triticum aestivum
  misc_feature (1)..(979): Ceres Seq. ID no. 13656436
cagttggtctaaaatcgggctggcctgctggagcctggtcctctcccagcgcattgttgattgattcacgtcaagagcgagcgagacgccaagaactcggacggggaagtcgtgaggccgcctgcctccgcccgcccaggactcgatctcgatccccgccgacaagccgatcccccgtcctcctgcccgcgagagagaccggacgccgcgggagcgcccagatcccgccatgaatcccgagtatgattacctcttcaagcttttgcttattggagactcaggtgttggcaagtcatgtctgctgttaagatttgctgacgactcatacctggatagttacatcagtactattggagttgattttaaaatacggaccgtggagcaggacggaaagactatcaagttgcaaatctgggacactgctgggcaagaacgttttagaactattaccagcagctactaccgaggggcccatgggattattatcgtctatgatgtgacagaccaagatagcttcaacaatgtgaagcagtggctcaacgagattgaccgctatgccagtgagaatgtgaacaagcttctcgtggggaacaaatgtgatctggctgacaaaagagctgtgtcatatgaaacagcaaaggcatttgctgatgagattggcattccattcatggagaccagtgcaaagaacgccctgaatgttgaacaggccttcatggccatggctgcttcgatcaaggataggatggcgagccagccagccgcaaacaacgctcgcccagctactgtacagatccgcgggcaacctgtcgagcagaaggccagctgttgctcttcttagaaaaccatgcaaacttgttgatgctccgtcacctttatacatgttttcttatttgtttttacttgttatctttattcttttctttctagtgtacctgccttctgaaattgtgtaacttggatgaatatatatcttctt

SEQ ID NO: 15906 - protein, 203 aa, Triticum aestivum
  peptide (1)..(203): Ceres Seq. ID no. 15219223
  misc_feature (10)..(171): Pfam Name: Pfam Description:  Ras family
  misc_feature (1)..(203): NCBI GI NO: 1370166 NR Description: RAB1C [Lotus japonicus]
  misc_feature (1)..(203): NCBI GI NO: 14140133 NR Description: putative GTP-binding protein [Oryza sativa]
  misc_feature (1)..(203): NCBI GI NO: 466172 NR Description: GTP-BINDING PROTEIN YPTM2
  misc_feature (1)..(203): NCBI GI NO: 4586580 NR Description: rab-type small GTP-binding protein
  misc_feature (1)..(203): NCBI GI NO: 7643790 NR Description: small GTP-binding protein [Capsicum annuum]
  misc_feature (1)..(203): NCBI GI NO: 303750 NR Description: GTP-binding protein [Pisum sativum]
  misc_feature (1)..(203): NCBI GI NO: 1053067 NR Description: small GTP-binding protein
  misc_feature (1)..(203): NCBI GI NO: 541978 NR Description: GTP-binding protein, ras-like
  misc_feature (1)..(203): NCBI GI NO: 1616614 NR Description: small GTP-binding protein
  misc_feature (1)..(203): NCBI GI NO: 1381678 NR Description: small GTP-binding protein [Glycine max]
MNPEYDYLFKLLLIGDSGVGKSCLLLRFADDSYLDSYISTIGVDFKIRTVEQDGKTIKLQIWDTAGQERFRTITSSYYRGAHGIIIVYDVTDQDSFNNVKQWLNEIDRYASENVNKLLVGNKCDLADKRAVSYETAKAFADEIGIPFMETSAKNALNVEQAFMAMAASIKDRMASQPAANNARPATVQIRGQPVEQKASCCSS

SEQ ID NO: 15907 - DNA, 612 bp, Triticum aestivum
  misc_feature (1)..(612): Ceres Seq. ID no. 13657000
attgctttctgtaatctcaaaatcgattaaccgtatccgtctccacctttaagctttccaatggcggaaccctaagctaattccacgcctcccacctcgcgcagcgcgcatggaccagccggcgtcggacgccggcggctttctcgaggtccgcctcttctacgtgcgcctatcgccccgcggctccggagctgccgccccgccacggctctcgctggccatccaccacgccggggccgaggcctccccctcctcgctccctctccgcctcgaccgccgcgacccagtctctggcgaggccacctacgtctccaccgcggccgcgcgcctccccccacccgacgcctccttcgaggttgcagaccaccgcgacgccgccctcctccgaggcacccttcgacggtgccctgacgccaaggccgattcccctgcctgggcgatcgactgcgtccccgccgatgcagcggtggcctcagcctcggcctttgaggtctatgttgccgggtactgtgcaggcgaacccgccgttctcacgcgagccctgcggctggccaccccggaagaggctgctggcgggttggttcgccggcgatgtttaaacacaataaagtg

SEQ ID NO: 15908 - protein, 167 aa, Triticum aestivum
  peptide (1)..(167): Ceres Seq. ID no. 13657001
  misc_feature (4)..(161): NCBI GI NO: 28812134 NR Description: P0443G08.30
MDQPASDAGGFLEVRLFYVRLSPRGSGAAAPPRLSLAIHHAGAEASPSSLPLRLDRRDPVSGEATYVSTAAARLPPPDASFEVADHRDAALLRGTLRRCPDAKADSPAWAIDCVPADAAVASASAFEVYVAGYCAGEPAVLTRALRLATPEEAAGGLVRRRCLNTIK

SEQ ID NO: 15909 - DNA, 644 bp, Triticum aestivum
  misc_feature (1)..(644): Ceres Seq. ID no. 13656267
ttcacacatgggtgcttatagttatttttgttttatgtatttttatcaacccttctcatagatgaatctgtaatatcttatggtggtcagttataggatttggataattatctgcatttgcctatctgggatgtgatgctagaatatatattatgctaagtctgatttaacaatgtttaagatcttggaggcagccgacaccatgttctatctcctgggatcatgctaatgcttaaatgaactgcagtagaatagcggaagttgaagcaagtaaagaaaaaatcatgctaatgcttatagattctagaaacagtaacgtgatgaaatatgcaccttagtagtcttcacctttcttgttaactactactttcttctttggtctgtgctaattatttactttttggaaaatctttgccatgtttcatcttgctcttctcaacttattacagttggatgatggcttggagttctccttcactgataagaggcgttttgcaaaaatacgattgcttgacaatccagaagctgtccctccaatttctgaacttggaccagatgccctatgcgaaccaatgcagcttgatgattttgtacaatcttttggtagaaagaatgctccaataaatgtttaaacacaataaagt

SEQ ID NO: 15910 - protein, 71 aa, Triticum aestivum
  peptide (1)..(71): Ceres Seq. ID no. 13656268
  misc_feature (12)..(69): NCBI GI NO: 35215102 NR Description: formamidopyrimidine-DNA glycosylase-like
  misc_feature (11)..(69): NCBI GI NO: 34015259 NR Description: putative glycosylase
  misc_feature (10)..(69): NCBI GI NO: 30695252 NR Description: mutM homologue-1 [Arabidopsis thaliana]
  misc_feature (10)..(69): NCBI GI NO: 11358645 NR Description: probable formamidopyrimidine-DNA glycosylase 1
  misc_feature (10)..(69): NCBI GI NO: 18404050 NR Description: mutM homologue-1 [Arabidopsis thaliana]
MFHLALLNLLQLDDGLEFSFTDKRRFAKIRLLDNPEAVPPISELGPDALCEPMQLDDFVQSFGRKNAPINV

SEQ ID NO: 15911 - protein, 56 aa, Triticum aestivum
  peptide (1)..(56): Ceres Seq. ID no. 13656269
MMAWSSPSLIRGVLQKYDCLTIQKLSLQFLNLDQMPYANQCSLMILYNLLVERMLQ

SEQ ID NO: 15912 - protein, 55 aa, Triticum aestivum
  peptide (1)..(55): Ceres Seq. ID no. 13656270
MAWSSPSLIRGVLQKYDCLTIQKLSLQFLNLDQMPYANQCSLMILYNLLVERMLQ

SEQ ID NO: 15913 - DNA, 1948 bp, Triticum aestivum
  misc_feature (1)..(1948): Ceres Seq. ID no. 14301518
gatctcccatccccccaccctatcgaaaccattcccaagcaaaacaccctgcgcgatcccaaaccctagccatggcgaccggggcggcggcgaagactccgaccaagccatcggcccccgcggcgcccaagaccccggccaagcccgcgccctcggccgcggcgacggcggcgaagactcccgcaaggcccccgtcctcggcggcggcgacggcgaagaccccggccaggtccgtctcccgcgcgcggttcgcgcacgcctccgagaactccgaccccaacatcctcgcctcccctccccggaccacgtccaagacccccgccaagcccgccgccgccgccaccttctccgcctccgtcaggaagaagcgtgccacgcccgccccgccgccgccggtcccgcagcgccgcttcctcgtggcgaagaagggagcgcatcggcggaggcaagccggcgcgagcggaggaggcggccagttcgacttcgacaagtgccgcgaggccgcccgcgaggcgctgcgcgcgtcgcacgaggagttcttcctcaaggagcgcgcggtgtccgcggccagcgaggagcaggagtcgcagaaggaggaggaagcggccgaagatgacgcaaacagtgccgctgttgtcgaggagggggagggagcggaggtggcggatttggaggggagcggcaaagttagagcgattcggagcagagtcatggccaaggcgatgaacagcgtgccagatgctggggcgggccgtgtcaagcacctggtgcatgccttcgagagcctgctctccatctccggggccactgctgactccgaacgggcaggcgaggaggcctgggcgctgcctggattgcagccatggaacgaggggagtgggctcgccggtggcagtgttctcctcgtccgatttcatgagcatgggaccaaccagactttgcagttcactcgatggcaagagcaacagatctagctgggacagccagaccggaggacgcaggagccggcggaactcatccgaatcactaaggagcagctggaataaaaagctcaaggtcactagccagcatcccttcaagctgagaacagagcaaaggggaagagctaaagaacaacagtttattcagaaagtccaggaaatgctaattgaggatgagaagaagcgcatacatattgctcaaggacttccgtggacaacagatgagcctgagtgcttgattaagccaccagtcaaggaaagaacagagccagtcgaccttgttctacatagtgatgtgcgcgcagttgaacgtgctgaatttgatcaatatgtgtcagagaagaccaagttcggtgaggaattaagattggagcgggaacgtcaacaaaagttagaggaggaagaaatgataagacagctgaggaaagagcttgttcctaaagcacagccaatgccgtattttgatcggccattcatccccaaaaagtcatcaaagacaataacaattccgaaggagccaaactttcatctccggcctgaaaggttatcatgcgatgcatggtcactggaaagctgaagacatggccccgcaagcaacatgaatgtcagctgcatctagcaagagccgcagagcagcatcatcaacacgcatgatttagatgctcctcattctttcaagtgcctagcttcttcttaacgtctccatgcgcaacgagactcggtctttgtggcttgggtgatctccaacttctgttctgtgtacatgcgtttatgcatatcgatagctctgtgcttcagatgcatcctccacctccagggttaaaacagcttgttgtacaagagaccgcagatgggaaattcaaggatgaatttctgtggtcttgtattcctaagttgattgccaaaaaccccgaaataccaatgtgttgatatatatgtggattttgaaaaaaaatctctattttctg

SEQ ID NO: 15914 - protein, 323 aa, Triticum aestivum
  peptide (1)..(323): Ceres Seq. ID no. 14301519
  misc_feature (4)..(82): Pfam Name: Pfam Description:  Glycoprotein GG/GX
SPIPPPYRNHSQAKHPARSQTLAMATGAAAKTPTKPSAPAAPKTPAKPAPSAAATAAKTPARPPSSAAATAKTPARSVSRARFAHASENSDPNILASPPRTTSKTPAKPAAAATFSASVRKKRATPAPPPPVPQRRFLVAKKGAHRRRQAGASGGGGQFDFDKCREAAREALRASHEEFFLKERAVSAASEEQESQKEEEAAEDDANSAAVVEEGEGAEVADLEGSGKVRAIRSRVMAKAMNSVPDAGAGRVKHLVHAFESLLSISGATADSERAGEEAWALPGLQPWNEGSGLAGGSVLLVRFHEHGTNQTLQFTRWQEQQI

SEQ ID NO: 15915 - protein, 300 aa, Triticum aestivum
  peptide (1)..(300): Ceres Seq. ID no. 14301520
  misc_feature (1)..(59): Pfam Name: Pfam Description:  Glycoprotein GG/GX
MATGAAAKTPTKPSAPAAPKTPAKPAPSAAATAAKTPARPPSSAAATAKTPARSVSRARFAHASENSDPNILASPPRTTSKTPAKPAAAATFSASVRKKRATPAPPPPVPQRRFLVAKKGAHRRRQAGASGGGGQFDFDKCREAAREALRASHEEFFLKERAVSAASEEQESQKEEEAAEDDANSAAVVEEGEGAEVADLEGSGKVRAIRSRVMAKAMNSVPDAGAGRVKHLVHAFESLLSISGATADSERAGEEAWALPGLQPWNEGSGLAGGSVLLVRFHEHGTNQTLQFTRWQEQQI

SEQ ID NO: 15916 - protein, 272 aa, Triticum aestivum
  peptide (1)..(272): Ceres Seq. ID no. 14301521
  misc_feature (78)..(269): NCBI GI NO: 30685394 NR Description: expressed protein [Arabidopsis thaliana]
  misc_feature (54)..(269): NCBI GI NO: 15232025 NR Description: hypothetical protein [Arabidopsis thaliana]
  misc_feature (78)..(269): NCBI GI NO: 11358122 NR Description: hypothetical protein T20K14_120 - Arabidopsisthaliana
  misc_feature (1)..(36): NCBI GI NO: 23274133 NR Description: Similar to serine/arginine repetitive matrix 1
  misc_feature (1)..(36): NCBI GI NO: 34872074 NR Description: similar to Ser/Arg-related nuclear matrix protein
  misc_feature (1)..(111): NCBI GI NO: 7949115 NR Description: Ser/Arg-related nuclear matrix protein
  misc_feature (1)..(148): NCBI GI NO: 34784016 NR Description: Unknown (protein for MGC:63802) [Danio rerio]
  misc_feature (1)..(35): NCBI GI NO: 7949115 NR Description: Ser/Arg-related nuclear matrix protein
  misc_feature (1)..(34): NCBI GI NO: 23274133 NR Description: Similar to serine/arginine repetitive matrix 1
  misc_feature (1)..(34): NCBI GI NO: 5032119 NR Description: Ser/Arg-related nuclear matrix protein
MLGRAVSSTWCMPSRACSPSPGPLLTPNGQARRPGRCLDCSHGTRGVGSPVAVFSSSDFMSMGPTRLCSSLDGKSNRSSWDSQTGGRRSRRNSSESLRSSWNKKLKVTSQHPFKLRTEQRGRAKEQQFIQKVQEMLIEDEKKRIHIAQGLPWTTDEPECLIKPPVKERTEPVDLVLHSDVRAVERAEFDQYVSEKTKFGEELRLERERQQKLEEEEMIRQLRKELVPKAQPMPYFDRPFIPKKSSKTITIPKEPNFHLRPERLSCDAWSLES

SEQ ID NO: 15917 - DNA, 1533 bp, Triticum aestivum
  misc_feature (1)..(1533): Ceres Seq. ID no. 13656285
aacacacaacatccatcccccgcccggccgcgctcaatccccacccccactgtttccaggtccgattttctgccccggatccttgctcagttgctccgtcgatcaccatgaagatgccaagttcatcgtgctgagagcgggacgctgacaggtggtgggcgtggtgagcgcgctgcgggaggccaagttcgtcccgcagatcgtcagcgtcggaccggatcaggccgagaagaaacctgaccgcatcgcctccgtctggcagcccgacgggtctactctattgttctggttgcagagagatcgacatggatctgctgctaccgccgatcagtgcttctcttggtgccatgggctcccttgcacacaagctggatgcgctcctcgatacagaacacaaggatgagatggggaaactcggaacccggctgctggagctctccaaggcacgagaccctcccgttacagcgaggatctggatgaaggatgtgcgtgaactatcctatgatatggagaactttgtcgacactgaagaagattggatccacaacatgtcaccattcatgggccgtgtgaaggaagcaaatgcacggtacgagaggtacaggcttgagagcatccccagccacacagatgtctttccaatcatccaccaccgtggccgggagacaggtctagtcgtcggccttcatgacaagggtggcccggttgataggctctgccaattgctgaccgatggagatgagcagctcaaggtgttatccattgtcggtgttggagggatcgggaagaccacgcttgccaaacagctatggcgtgagcacaaactcagggactacttccactgccgggcttttgtccggacggccaagaaaccagacatgaggaggatcctaaggagcatactcgcacaagttcgtccgcaccaaccacctgatgctagcgaggtggacgacctcattcacgatctcaccgagcatctacaggataaaaggagaagtgatggcaagaaacaagcaagtgtggagctaccgaatgacccgcgatcatcggtgcaggtgatcgtaatcaagatagtggacattacagacaagcggtggaagtccagtgccttcaaagtcctttcgaagctccataggaccaattcggtagcggcaaacgaggaggaggggacgctaactgtggtgggggacctggacccggtggtcgtagtgctggcattacagaaggccaaactcaatgtgcagatcgtcagaacggggttgatgaacaaacccgagggacgcaaaatgcctggacgtaacccgcccgagggacaacagaagcctgaatctaacccaccccagctgccgcacagtctcatcaccccgtactcccctccctaccggccacccccctaccgtcaacaccgccacgaggtccaccagtcccgggaggaccccaactcatgtgtcatccagtgatttttttgcaggggtattgtggattgtattcatcwtaaayaatgttagagcatctactgggaggggggaaagg

SEQ ID NO: 15918 - protein, 384 aa, Triticum aestivum
  peptide (1)..(384): Ceres Seq. ID no. 15219816
  misc_feature (134)..(229): Pfam Name: Pfam Description:  NB-ARC domain
  misc_feature (54)..(228): NCBI GI NO: 20513858 NR Description: RGH2B [Hordeum vulgare]
  misc_feature (1)..(72): NCBI GI NO: 20513858 NR Description: RGH2B [Hordeum vulgare]
  misc_feature (82)..(229): NCBI GI NO: 37533576 NR Description: putative disease resistance protein
  misc_feature (4)..(73): NCBI GI NO: 37533576 NR Description: putative disease resistance protein
  misc_feature (134)..(229): NCBI GI NO: 12642090 NR Description: Pi-ta protein [Oryza sativa]
  misc_feature (134)..(229): NCBI GI NO: 28629809 NR Description: pi-ta protein
  misc_feature (47)..(73): NCBI GI NO: 12642090 NR Description: Pi-ta protein [Oryza sativa]
  misc_feature (47)..(73): NCBI GI NO: 28629809 NR Description: pi-ta protein
  misc_feature (155)..(229): NCBI GI NO: 28555875 NR Description: NBS-LRR disease resistance protein homologue
  misc_feature (74)..(230): NCBI GI NO: 4680207 NR Description: disease resistance protein RPM1 homolog
MDLLLPPISASLGAMGSLAHKLDALLDTEHKDEMGKLGTRLLELSKARDPPVTARIWMKDVRELSYDMENFVDTEEDWIHNMSPFMGRVKEANARYERYRLESIPSHTDVFPIIHHRGRETGLVVGLHDKGGPVDRLCQLLTDGDEQLKVLSIVGVGGIGKTTLAKQLWREHKLRDYFHCRAFVRTAKKPDMRRILRSILAQVRPHQPPDASEVDDLIHDLTEHLQDKRRSDGKKQASVELPNDPRSSVQVIVIKIVDITDKRWKSSAFKVLSKLHRTNSVAANEEEGTLTVVGDLDPVVVVLALQKAKLNVQIVRTGLMNKPEGRKMPGRNPPEGQQKPESNPPQLPHSLITPYSPPYRPPPYRQHRHEVHQSREDPNSCVIQ

SEQ ID NO: 15919 - protein, 370 aa, Triticum aestivum
  peptide (1)..(370): Ceres Seq. ID no. 15219817
  misc_feature (120)..(215): Pfam Name: Pfam Description:  NB-ARC domain
  misc_feature (40)..(214): NCBI GI NO: 20513858 NR Description: RGH2B [Hordeum vulgare]
  misc_feature (1)..(58): NCBI GI NO: 20513858 NR Description: RGH2B [Hordeum vulgare]
  misc_feature (68)..(215): NCBI GI NO: 37533576 NR Description: putative disease resistance protein
  misc_feature (1)..(59): NCBI GI NO: 37533576 NR Description: putative disease resistance protein
  misc_feature (120)..(215): NCBI GI NO: 12642090 NR Description: Pi-ta protein [Oryza sativa]
  misc_feature (120)..(215): NCBI GI NO: 28629809 NR Description: pi-ta protein
  misc_feature (33)..(59): NCBI GI NO: 12642090 NR Description: Pi-ta protein [Oryza sativa]
  misc_feature (33)..(59): NCBI GI NO: 28629809 NR Description: pi-ta protein
  misc_feature (141)..(215): NCBI GI NO: 28555875 NR Description: NBS-LRR disease resistance protein homologue
  misc_feature (60)..(216): NCBI GI NO: 4680207 NR Description: disease resistance protein RPM1 homolog
MGSLAHKLDALLDTEHKDEMGKLGTRLLELSKARDPPVTARIWMKDVRELSYDMENFVDTEEDWIHNMSPFMGRVKEANARYERYRLESIPSHTDVFPIIHHRGRETGLVVGLHDKGGPVDRLCQLLTDGDEQLKVLSIVGVGGIGKTTLAKQLWREHKLRDYFHCRAFVRTAKKPDMRRILRSILAQVRPHQPPDASEVDDLIHDLTEHLQDKRRSDGKKQASVELPNDPRSSVQVIVIKIVDITDKRWKSSAFKVLSKLHRTNSVAANEEEGTLTVVGDLDPVVVVLALQKAKLNVQIVRTGLMNKPEGRKMPGRNPPEGQQKPESNPPQLPHSLITPYSPPYRPPPYRQHRHEVHQSREDPNSCVIQ

SEQ ID NO: 15920 - protein, 351 aa, Triticum aestivum
  peptide (1)..(351): Ceres Seq. ID no. 15219818
  misc_feature (101)..(196): Pfam Name: Pfam Description:  NB-ARC domain
  misc_feature (21)..(195): NCBI GI NO: 20513858 NR Description: RGH2B [Hordeum vulgare]
  misc_feature (1)..(39): NCBI GI NO: 20513858 NR Description: RGH2B [Hordeum vulgare]
  misc_feature (49)..(196): NCBI GI NO: 37533576 NR Description: putative disease resistance protein
  misc_feature (1)..(40): NCBI GI NO: 37533576 NR Description: putative disease resistance protein
  misc_feature (101)..(196): NCBI GI NO: 12642090 NR Description: Pi-ta protein [Oryza sativa]
  misc_feature (101)..(196): NCBI GI NO: 28629809 NR Description: pi-ta protein
  misc_feature (14)..(40): NCBI GI NO: 12642090 NR Description: Pi-ta protein [Oryza sativa]
  misc_feature (14)..(40): NCBI GI NO: 28629809 NR Description: pi-ta protein
  misc_feature (122)..(196): NCBI GI NO: 28555875 NR Description: NBS-LRR disease resistance protein homologue
  misc_feature (41)..(197): NCBI GI NO: 4680207 NR Description: disease resistance protein RPM1 homolog
MGKLGTRLLELSKARDPPVTARIWMKDVRELSYDMENFVDTEEDWIHNMSPFMGRVKEANARYERYRLESIPSHTDVFPIIHHRGRETGLVVGLHDKGGPVDRLCQLLTDGDEQLKVLSIVGVGGIGKTTLAKQLWREHKLRDYFHCRAFVRTAKKPDMRRILRSILAQVRPHQPPDASEVDDLIHDLTEHLQDKRRSDGKKQASVELPNDPRSSVQVIVIKIVDITDKRWKSSAFKVLSKLHRTNSVAANEEEGTLTVVGDLDPVVVVLALQKAKLNVQIVRTGLMNKPEGRKMPGRNPPEGQQKPESNPPQLPHSLITPYSPPYRPPPYRQHRHEVHQSREDPNSCVIQ

SEQ ID NO: 15921 - DNA, 1545 bp, Triticum aestivum
  misc_feature (1)..(1545): Ceres Seq. ID no. 12780574
cactccagcatccagacccgagccattccccgagcagccaagccacacgcacacgcacgcgcacccgcacggaaaccctagctcccgcggcgcacctaccgcaggcgtacagtcagtcggtcggccgcgagagtctgccggcggatggtgtcgatgagcacgacgcccaagccgctcgaggccggggcggcggcggccgccgtggggggaggcggaggggacggagggggagggggaggcgggaaggggaaggagcagcagcaggtggtgccggtggccgcggggccgccgatggccgtgccggcggacgcggcggcggcggcggaggacgccaggatgaaggtcaggaagccctacaccatcaccaagtcccgggagagctggaccgagcccgagcacgacaagttcctcgaggccctgcagctgtttgatcgtgattggaaaaagatagaagcatttgttggctcaaaaactgtgatacagataaggagccatgcacagaagtactttttgaaggttcaaaagaacggtacaggcgaacatttaccaccgcctcggccgaagcgtaaagcagcacatccatatccgcagaaggcctctaaaactgcccctgtagcaccccaagctgttttatcacaacaacctgctcctcctccccctcctccgagggagcaagatggtgttgatgtgtctatggatgcatctatggttgtaccaaacacaaatgcaaatgcggtggtgccttcctgggacaatgctcttgttcaacctacacaagttacaagtgccattgccacaaataactgctctagtagtatagagagccaatctggaacatggccaacctctgaagcagttgaacaagaaaatgtgctgccacaaatgcgggctatgccagatttttcacaagtatacaacttcctgggaagtgtattcgatccagatacaactggacatttgcagaggttaaaggcaatggatcctattgatgtggaaacggtactactgctcatgcgaaatctatcggtgaacttgattaacccagaatttgaggcccataggcagttgctctcgtcgtatggttctggtggagacgaaaataaacctgaaggcatggaaaatttcgggtcccagagtagccatctcccatccatggtaacgagtgagtgagcgaacatcagccattcaccatggcagcttcagttgtttccgagagacgcttgtgttctccttgtattggtcctgtcggcgtctagtctggctatttatgaatgttggttggggcagtgacatttgtacagcttccgaaatggtgctctaaccctaggctagggttgcttaccaagttggtgtagatagccagttttgcgtgctcaagcaattcttttccctagggcggggcatagctcaagatggttcttgtatgtatacaccgataagtatgtgcttgtggatgtacatatgtgttattgtgtaaacgtttgagatactgcgagtatcctatcaaggcaaataataagctgaataataaatccagcttggcgt

SEQ ID NO: 15922 - protein, 341 aa, Triticum aestivum
  peptide (1)..(341): Ceres Seq. ID no. 12780575
  misc_feature (77)..(122): Pfam Name: Pfam Description:  Myb-like DNA-binding domain
  misc_feature (52)..(326): NCBI GI NO: 30696225 NR Description: myb family transcription factor
  misc_feature (52)..(326): NCBI GI NO: 30696221 NR Description: myb family transcription factor
  misc_feature (52)..(309): NCBI GI NO: 8953721 NR Description: contains similarity to MYB-related DNA-bindingprotein~gene_id:F6N7
  misc_feature (43)..(312): NCBI GI NO: 30680926 NR Description: myb family transcription factor
  misc_feature (61)..(314): NCBI GI NO: 15223419 NR Description: myb family transcription factor
  misc_feature (61)..(314): NCBI GI NO: 25517982 NR Description: F22L4.6 protein - Arabidopsis thaliana
  misc_feature (40)..(315): NCBI GI NO: 18414039 NR Description: myb family transcription factor
  misc_feature (40)..(315): NCBI GI NO: 14596213 NR Description: putative protein [Arabidopsis thaliana]
  misc_feature (60)..(314): NCBI GI NO: 15234118 NR Description: myb family transcription factor
  misc_feature (236)..(341): NCBI GI NO: 27125815 NR Description: MYB29 protein
MVSMSTTPKPLEAGAAAAAVGGGGGDGGGGGGGKGKEQQQVVPVAAGPPMAVPADAAAAAEDARMKVRKPYTITKSRESWTEPEHDKFLEALQLFDRDWKKIEAFVGSKTVIQIRSHAQKYFLKVQKNGTGEHLPPPRPKRKAAHPYPQKASKTAPVAPQAVLSQQPAPPPPPPREQDGVDVSMDASMVVPNTNANAVVPSWDNALVQPTQVTSAIATNNCSSSIESQSGTWPTSEAVEQENVLPQMRAMPDFSQVYNFLGSVFDPDTTGHLQRLKAMDPIDVETVLLLMRNLSVNLINPEFEAHRQLLSSYGSGGDENKPEGMENFGSQSSHLPSMVTSE

SEQ ID NO: 15923 - protein, 338 aa, Triticum aestivum
  peptide (1)..(338): Ceres Seq. ID no. 12780576
  misc_feature (74)..(119): Pfam Name: Pfam Description:  Myb-like DNA-binding domain
  misc_feature (49)..(323): NCBI GI NO: 30696225 NR Description: myb family transcription factor
  misc_feature (49)..(323): NCBI GI NO: 30696221 NR Description: myb family transcription factor
  misc_feature (49)..(306): NCBI GI NO: 8953721 NR Description: contains similarity to MYB-related DNA-bindingprotein~gene_id:F6N7
  misc_feature (40)..(309): NCBI GI NO: 30680926 NR Description: myb family transcription factor
  misc_feature (58)..(311): NCBI GI NO: 15223419 NR Description: myb family transcription factor
  misc_feature (58)..(311): NCBI GI NO: 25517982 NR Description: F22L4.6 protein - Arabidopsis thaliana
  misc_feature (37)..(312): NCBI GI NO: 18414039 NR Description: myb family transcription factor
  misc_feature (37)..(312): NCBI GI NO: 14596213 NR Description: putative protein [Arabidopsis thaliana]
  misc_feature (57)..(311): NCBI GI NO: 15234118 NR Description: myb family transcription factor
  misc_feature (233)..(338): NCBI GI NO: 27125815 NR Description: MYB29 protein
MSTTPKPLEAGAAAAAVGGGGGDGGGGGGGKGKEQQQVVPVAAGPPMAVPADAAAAAEDARMKVRKPYTITKSRESWTEPEHDKFLEALQLFDRDWKKIEAFVGSKTVIQIRSHAQKYFLKVQKNGTGEHLPPPRPKRKAAHPYPQKASKTAPVAPQAVLSQQPAPPPPPPREQDGVDVSMDASMVVPNTNANAVVPSWDNALVQPTQVTSAIATNNCSSSIESQSGTWPTSEAVEQENVLPQMRAMPDFSQVYNFLGSVFDPDTTGHLQRLKAMDPIDVETVLLLMRNLSVNLINPEFEAHRQLLSSYGSGGDENKPEGMENFGSQSSHLPSMVTSE

SEQ ID NO: 15924 - protein, 292 aa, Triticum aestivum
  peptide (1)..(292): Ceres Seq. ID no. 12780577
  misc_feature (28)..(73): Pfam Name: Pfam Description:  Myb-like DNA-binding domain
  misc_feature (3)..(277): NCBI GI NO: 30696225 NR Description: myb family transcription factor
  misc_feature (3)..(277): NCBI GI NO: 30696221 NR Description: myb family transcription factor
  misc_feature (3)..(260): NCBI GI NO: 8953721 NR Description: contains similarity to MYB-related DNA-bindingprotein~gene_id:F6N7
  misc_feature (1)..(263): NCBI GI NO: 30680926 NR Description: myb family transcription factor
  misc_feature (12)..(265): NCBI GI NO: 15223419 NR Description: myb family transcription factor
  misc_feature (12)..(265): NCBI GI NO: 25517982 NR Description: F22L4.6 protein - Arabidopsis thaliana
  misc_feature (1)..(266): NCBI GI NO: 18414039 NR Description: myb family transcription factor
  misc_feature (1)..(266): NCBI GI NO: 14596213 NR Description: putative protein [Arabidopsis thaliana]
  misc_feature (11)..(265): NCBI GI NO: 15234118 NR Description: myb family transcription factor
  misc_feature (187)..(292): NCBI GI NO: 27125815 NR Description: MYB29 protein
MAVPADAAAAAEDARMKVRKPYTITKSRESWTEPEHDKFLEALQLFDRDWKKIEAFVGSKTVIQIRSHAQKYFLKVQKNGTGEHLPPPRPKRKAAHPYPQKASKTAPVAPQAVLSQQPAPPPPPPREQDGVDVSMDASMVVPNTNANAVVPSWDNALVQPTQVTSAIATNNCSSSIESQSGTWPTSEAVEQENVLPQMRAMPDFSQVYNFLGSVFDPDTTGHLQRLKAMDPIDVETVLLLMRNLSVNLINPEFEAHRQLLSSYGSGGDENKPEGMENFGSQSSHLPSMVTSE

SEQ ID NO: 15925 - DNA, 1390 bp, Triticum aestivum
  misc_feature (1)..(1390): Ceres Seq. ID no. 13657369
aggcgttcccctgccgccgcctcctatgtgaacatcttcttcacatctcccaccgcagcagtctcctggcgccgcctccgatctttgcatcttcttcacatctatctccggatataccaaaacaaggaggaagtagagaggaaggggtgtcatggctagccggtttgtgaatctcgcggtcaagcacatgaacggccgccatattcctttcagcatacaccgtattaatccggcagatttcttttacccaaccggatcgccagttcccaaacaaggttcagcttttgtaccaccggacgaaattcagctgcctccggccaccatcgccttcgactggccctcccggcagggccaaccctgctcaatggatttcatggccttcggcgccaaccgggataagatcgtcgccgtggacagcatagggtgctcctacctttacgacgctcccgtacgcagtatcagcaccaatatgcccatgatgcccacgtgcatgctacaacccatgtccattgctgtcggtgacaacggcctgttagttatgagtaaagccgatcaccagttcgtggctctgaatgatggctgcgaccccaattccagatatttattaccaatgtctggctggtactggcagtccctcaagccgcctcccttccccagccgctcctaccaccagaacgagaaaggcagtcaccatccatttgaagtcagctcttacacggtagttggcaattcacagttctgggtgtccacagtgggtgcaggcacgttttcctttgatatgaacagcggtgcgtggatgaaggctggcaattgggagctgccattcagaggtcgtgccgagtatgtccccgagcacaatctctggtttggcatgtttggcaaagacgaccagctttgcgcatctgacctcattgccgtgtccgcagtgagctcaccagtgccacatatactttggaaagagctggtttggccgaaagattggaagctcaggtcgacccacctcctgcctcttggttctagcagactctgcattgccaggttcttcctaacttcagatgatgacaaggaagagaacatgtcagactataagcgcagcacaacaaataattttggggtgctcacgggggtggaagtggtgtctgatgaaggaggactgcgcattatccatcacaagtccattcgcttcgatttcggcctcagcattgctagtgtgctgtgatacgttgactcctctagtgcaggtgagtttatttatatccggaacctgctgtagcacacctttcttttccatcctttgctcaaacgcactacaaaagcttgtccttttagcactatggaaaacgctttctttgctggaacataatgcctcaatcaaataaaaagttcttag

SEQ ID NO: 15926 - protein, 355 aa, Triticum aestivum
  peptide (1)..(355): Ceres Seq. ID no. 15220606
  misc_feature (1)..(306): NCBI GI NO: 34904128 NR Description: unnamed protein product
  misc_feature (77)..(328): NCBI GI NO: 15451604 NR Description: Hypothetical protein [Oryza sativa]
  misc_feature (157)..(329): NCBI GI NO: 15451605 NR Description: Hypothetical protein [Oryza sativa]
  misc_feature (157)..(343): NCBI GI NO: 34902348 NR Description: Hypothetical protein
  misc_feature (157)..(328): NCBI GI NO: 37531434 NR Description: hypothetical protein
  misc_feature (77)..(342): NCBI GI NO: 38344193 NR Description: OSJNBa0064G10.9
  misc_feature (1)..(329): NCBI GI NO: 34907072 NR Description: OSJNBa0093F16.25
  misc_feature (202)..(305): NCBI GI NO: 27818009 NR Description: OSJNBb0041J06.17
  misc_feature (53)..(342): NCBI GI NO: 28876026 NR Description: hypothetical protein
  misc_feature (15)..(342): NCBI GI NO: 34897052 NR Description: hypothetical protein
MASRFVNLAVKHMNGRHIPFSIHRINPADFFYPTGSPVPKQGSAFVPPDEIQLPPATIAFDWPSRQGQPCSMDFMAFGANRDKIVAVDSIGCSYLYDAPVRSISTNMPMMPTCMLQPMSIAVGDNGLLVMSKADHQFVALNDGCDPNSRYLLPMSGWYWQSLKPPPFPSRSYHQNEKGSHHPFEVSSYTVVGNSQFWVSTVGAGTFSFDMNSGAWMKAGNWELPFRGRAEYVPEHNLWFGMFGKDDQLCASDLIAVSAVSSPVPHILWKELVWPKDWKLRSTHLLPLGSSRLCIARFFLTSDDDKEENMSDYKRSTTNNFGVLTGVEVVSDEGGLRIIHHKSIRFDFGLSIASVL

SEQ ID NO: 15927 - protein, 343 aa, Triticum aestivum
  peptide (1)..(343): Ceres Seq. ID no. 15220607
  misc_feature (1)..(294): NCBI GI NO: 34904128 NR Description: unnamed protein product
  misc_feature (65)..(316): NCBI GI NO: 15451604 NR Description: Hypothetical protein [Oryza sativa]
  misc_feature (145)..(317): NCBI GI NO: 15451605 NR Description: Hypothetical protein [Oryza sativa]
  misc_feature (145)..(331): NCBI GI NO: 34902348 NR Description: Hypothetical protein
  misc_feature (145)..(316): NCBI GI NO: 37531434 NR Description: hypothetical protein
  misc_feature (65)..(330): NCBI GI NO: 38344193 NR Description: OSJNBa0064G10.9
  misc_feature (1)..(317): NCBI GI NO: 34907072 NR Description: OSJNBa0093F16.25
  misc_feature (190)..(293): NCBI GI NO: 27818009 NR Description: OSJNBb0041J06.17
  misc_feature (41)..(330): NCBI GI NO: 28876026 NR Description: hypothetical protein
  misc_feature (3)..(330): NCBI GI NO: 34897052 NR Description: hypothetical protein
MNGRHIPFSIHRINPADFFYPTGSPVPKQGSAFVPPDEIQLPPATIAFDWPSRQGQPCSMDFMAFGANRDKIVAVDSIGCSYLYDAPVRSISTNMPMMPTCMLQPMSIAVGDNGLLVMSKADHQFVALNDGCDPNSRYLLPMSGWYWQSLKPPPFPSRSYHQNEKGSHHPFEVSSYTVVGNSQFWVSTVGAGTFSFDMNSGAWMKAGNWELPFRGRAEYVPEHNLWFGMFGKDDQLCASDLIAVSAVSSPVPHILWKELVWPKDWKLRSTHLLPLGSSRLCIARFFLTSDDDKEENMSDYKRSTTNNFGVLTGVEVVSDEGGLRIIHHKSIRFDFGLSIASVL

SEQ ID NO: 15928 - protein, 284 aa, Triticum aestivum
  peptide (1)..(284): Ceres Seq. ID no. 15220608
  misc_feature (1)..(235): NCBI GI NO: 34904128 NR Description: unnamed protein product
  misc_feature (6)..(257): NCBI GI NO: 15451604 NR Description: Hypothetical protein [Oryza sativa]
  misc_feature (86)..(258): NCBI GI NO: 15451605 NR Description: Hypothetical protein [Oryza sativa]
  misc_feature (86)..(272): NCBI GI NO: 34902348 NR Description: Hypothetical protein
  misc_feature (86)..(257): NCBI GI NO: 37531434 NR Description: hypothetical protein
  misc_feature (6)..(271): NCBI GI NO: 38344193 NR Description: OSJNBa0064G10.9
  misc_feature (1)..(258): NCBI GI NO: 34907072 NR Description: OSJNBa0093F16.25
  misc_feature (131)..(234): NCBI GI NO: 27818009 NR Description: OSJNBb0041J06.17
  misc_feature (1)..(271): NCBI GI NO: 28876026 NR Description: hypothetical protein
  misc_feature (1)..(271): NCBI GI NO: 34897052 NR Description: hypothetical protein
MDFMAFGANRDKIVAVDSIGCSYLYDAPVRSISTNMPMMPTCMLQPMSIAVGDNGLLVMSKADHQFVALNDGCDPNSRYLLPMSGWYWQSLKPPPFPSRSYHQNEKGSHHPFEVSSYTVVGNSQFWVSTVGAGTFSFDMNSGAWMKAGNWELPFRGRAEYVPEHNLWFGMFGKDDQLCASDLIAVSAVSSPVPHILWKELVWPKDWKLRSTHLLPLGSSRLCIARFFLTSDDDKEENMSDYKRSTTNNFGVLTGVEVVSDEGGLRIIHHKSIRFDFGLSIASVL

SEQ ID NO: 15929 - DNA, 1257 bp, Triticum aestivum
  misc_feature (1)..(1257): Ceres Seq. ID no. 15178472
actgctgctgcgaacacaggctttttcccagccccacggttggggggtcgcttgcatcacacccacgccgcctccgaaaagcgccgcaaatccgtcccagctgcgcggcttccatggctgccgcggcggctgcaggggactccggcgagcagccgctgctccacctcaagctcgccttcctcgccctggagccccccgcctgcgtcctcaccctcgccagaaaggctggtggaggttctgtcacgccacatgttcaaaattttattttggagaactgtgttggcactaatgtagggggaggtccagattgtacatatgtgaaaactattcttaaaaaggttatagctgaggcggaattatcgtcagatattgtgattgatgaactctatgaggaatttggccgttgtatgtcgtcaagggcaaataacccagagcttagcctggccaagatctacaaggagatatcttttctttctcctgcatatgagaatgtatcctcgaatccagtaagtttggttgctcgattattatgttctactaacatgctcgaaggggatacagggtgctgtctttggccatcaagtttattcttatctgagtttattctttcattcccagaacttttcgccaaaaaatgctgctttgagctaggttctggtgttggtttggttggtgtatgtctaaaccatgttggtgcttccaaggtagagtgcaaatatctttcctgggaagaagcgtgtgaaagcgatttaagagactaccagagagacatagttcttggtgcagacattatatacaacccgtcctgcgtgccccacctggtacgagtactttgtatgctacttagaggcgatgatggacgacatgaaagtgtcaatgcggcaaccaacggagaaattggtgacgaagtatctgggaccaccgcaaccggaggtcctgtggcctatattgccacggtcattcggaatgcagacactttcaattgctttgccaaggcagctgctgatgcgaagttgtctgttgtcaacattaccagcagcgcagctccatccagttttcttccttacatgatctcatatgatagatcgagcgtgcaacttcttaagattacactattatcctaagttgctggtgagtgcagctcctgtcagtctgttttgacgttgctacttaaacgtttattgcagagacatcaatcttatcggaatatcagtcgttcgtatcaagtctgtcctaaagtgtttccttcctgtgtcc

SEQ ID NO: 15930 - protein, 373 aa, Triticum aestivum
  peptide (1)..(373): Ceres Seq. ID no. 15178473
  misc_feature (43)..(235): NCBI GI NO: 15240919 NR Description: expressed protein [Arabidopsis thaliana]
  misc_feature (232)..(370): NCBI GI NO: 15240919 NR Description: expressed protein [Arabidopsis thaliana]
  misc_feature (100)..(227): NCBI GI NO: 26383095 NR Description: unnamed protein product [Mus musculus]
  misc_feature (231)..(280): NCBI GI NO: 26383095 NR Description: unnamed protein product [Mus musculus]
  misc_feature (100)..(227): NCBI GI NO: 34868598 NR Description: similar to RIKEN cDNA 2610015J01
  misc_feature (231)..(280): NCBI GI NO: 34868598 NR Description: similar to RIKEN cDNA 2610015J01
  misc_feature (231)..(280): NCBI GI NO: 29835170 NR Description: Unknown (protein for MGC:59002) [Mus musculus]
  misc_feature (184)..(227): NCBI GI NO: 29835170 NR Description: Unknown (protein for MGC:59002) [Mus musculus]
CCCEHRLFPSPTVGGSLASHPRRLRKAPQIRPSCAASMAAAAAAGDSGEQPLLHLKLAFLALEPPACVLTLARKAGGGSVTPHVQNFILENCVGTNVGGGPDCTYVKTILKKVIAEAELSSDIVIDELYEEFGRCMSSRANNPELSLAKIYKEISFLSPAYENVSSNPVSLVARLLCSTNMLEGDTGCCLWPSSLFLSEFILSFPELFAKKCCFELGSGVGLVGVCLNHVGASKVECKYLSWEEACESDLRDYQRDIVLGADIIYNPSCVPHLVRVLCMLLRGDDGRHESVNAATNGEIGDEVSGTTATGGPVAYIATVIRNADTFNCFAKAAADAKLSVVNITSSAAPSSFLPYMISYDRSSVQLLKITLLS

SEQ ID NO: 15931 - protein, 336 aa, Triticum aestivum
  peptide (1)..(336): Ceres Seq. ID no. 15178474
  misc_feature (6)..(198): NCBI GI NO: 15240919 NR Description: expressed protein [Arabidopsis thaliana]
  misc_feature (195)..(333): NCBI GI NO: 15240919 NR Description: expressed protein [Arabidopsis thaliana]
  misc_feature (63)..(190): NCBI GI NO: 26383095 NR Description: unnamed protein product [Mus musculus]
  misc_feature (194)..(243): NCBI GI NO: 26383095 NR Description: unnamed protein product [Mus musculus]
  misc_feature (63)..(190): NCBI GI NO: 34868598 NR Description: similar to RIKEN cDNA 2610015J01
  misc_feature (194)..(243): NCBI GI NO: 34868598 NR Description: similar to RIKEN cDNA 2610015J01
  misc_feature (194)..(243): NCBI GI NO: 29835170 NR Description: Unknown (protein for MGC:59002) [Mus musculus]
  misc_feature (147)..(190): NCBI GI NO: 29835170 NR Description: Unknown (protein for MGC:59002) [Mus musculus]
MAAAAAAGDSGEQPLLHLKLAFLALEPPACVLTLARKAGGGSVTPHVQNFILENCVGTNVGGGPDCTYVKTILKKVIAEAELSSDIVIDELYEEFGRCMSSRANNPELSLAKIYKEISFLSPAYENVSSNPVSLVARLLCSTNMLEGDTGCCLWPSSLFLSEFILSFPELFAKKCCFELGSGVGLVGVCLNHVGASKVECKYLSWEEACESDLRDYQRDIVLGADIIYNPSCVPHLVRVLCMLLRGDDGRHESVNAATNGEIGDEVSGTTATGGPVAYIATVIRNADTFNCFAKAAADAKLSVVNITSSAAPSSFLPYMISYDRSSVQLLKITLLS

SEQ ID NO: 15932 - protein, 238 aa, Triticum aestivum
  peptide (1)..(238): Ceres Seq. ID no. 15178475
  misc_feature (1)..(100): NCBI GI NO: 15240919 NR Description: expressed protein [Arabidopsis thaliana]
  misc_feature (97)..(235): NCBI GI NO: 15240919 NR Description: expressed protein [Arabidopsis thaliana]
  misc_feature (1)..(92): NCBI GI NO: 26383095 NR Description: unnamed protein product [Mus musculus]
  misc_feature (96)..(145): NCBI GI NO: 26383095 NR Description: unnamed protein product [Mus musculus]
  misc_feature (1)..(92): NCBI GI NO: 34868598 NR Description: similar to RIKEN cDNA 2610015J01
  misc_feature (96)..(145): NCBI GI NO: 34868598 NR Description: similar to RIKEN cDNA 2610015J01
  misc_feature (96)..(145): NCBI GI NO: 29835170 NR Description: Unknown (protein for MGC:59002) [Mus musculus]
  misc_feature (49)..(92): NCBI GI NO: 29835170 NR Description: Unknown (protein for MGC:59002) [Mus musculus]
MSSRANNPELSLAKIYKEISFLSPAYENVSSNPVSLVARLLCSTNMLEGDTGCCLWPSSLFLSEFILSFPELFAKKCCFELGSGVGLVGVCLNHVGASKVECKYLSWEEACESDLRDYQRDIVLGADIIYNPSCVPHLVRVLCMLLRGDDGRHESVNAATNGEIGDEVSGTTATGGPVAYIATVIRNADTFNCFAKAAADAKLSVVNITSSAAPSSFLPYMISYDRSSVQLLKITLLS

SEQ ID NO: 15933 - DNA, 640 bp, Triticum aestivum
  misc_feature (1)..(640): Ceres Seq. ID no. 13663039
acaccaaaacaaccagatctcaggctcatagctcagacaatggagaagtccccagccacagcaggataccatcatgcaccacttttccaagagccacttggtattctcatccttttcatcctcacctggtgcatctcgaagcttcaaagtctccttcccacttcttgttgccaatcctgcacttgtactgtctccccgacaacctcgacgccggtcctcgccgagacgaagatatcgaaggcaccaaataagagtgaatatgatgagatgaatgcgacgcagtcagatgccgaggtagccatgagaaagatgggacttgattttgatcaagagaaaagctgcgaatatatttctacgcttttcgatgaagacgagccaagcttcaaggaagtgaaaatggcattcttggtttttgatgagaacaatgatgggtacatcgatgcattggatttgcgacgagtcctccacaacttagggttaggcgaccgggtaggggtcaatgagtctgagcagatgattgctagatatgacatgaacaataacaagaggttagatttgatggagttcactaaggttttggaggacagcttttgctagacccctttatttctgtatttttttcctatatctgtagatgcat

SEQ ID NO: 15934 - protein, 198 aa, Triticum aestivum
  peptide (1)..(198): Ceres Seq. ID no. 13663040
  misc_feature (130)..(155): Pfam Name: Pfam Description:  EF hand
  misc_feature (58)..(198): NCBI GI NO: 9758343 NR Description: gene_id:MIJ24.17~unknown protein
  misc_feature (58)..(198): NCBI GI NO: 18421893 NR Description: calcium-binding EF-hand family protein
  misc_feature (88)..(197): NCBI GI NO: 15228558 NR Description: calcium-binding EF-hand family protein
  misc_feature (86)..(198): NCBI GI NO: 34913268 NR Description: P0519E12.12
  misc_feature (68)..(197): NCBI GI NO: 15232816 NR Description: calcium-binding EF-hand family protein
  misc_feature (78)..(193): NCBI GI NO: 24581540 NR Description: CG31960-PA [Drosophila melanogaster]
  misc_feature (109)..(194): NCBI GI NO: 15236276 NR Description: calcium-binding protein, putative
  misc_feature (78)..(194): NCBI GI NO: 15241500 NR Description: calcium-binding protein, putative
  misc_feature (109)..(194): NCBI GI NO: 15221358 NR Description: calcium-binding protein, putative
  misc_feature (123)..(193): NCBI GI NO: 20137483 NR Description: Calmodulin (CaM)
TPKQPDLRLIAQTMEKSPATAGYHHAPLFQEPLGILILFILTWCISKLQSLLPTSCCQSCTCTVSPTTSTPVLAETKISKAPNKSEYDEMNATQSDAEVAMRKMGLDFDQEKSCEYISTLFDEDEPSFKEVKMAFLVFDENNDGYIDALDLRRVLHNLGLGDRVGVNESEQMIARYDMNNNKRLDLMEFTKVLEDSFC

SEQ ID NO: 15935 - protein, 185 aa, Triticum aestivum
  peptide (1)..(185): Ceres Seq. ID no. 13663041
  misc_feature (117)..(142): Pfam Name: Pfam Description:  EF hand
  misc_feature (45)..(185): NCBI GI NO: 9758343 NR Description: gene_id:MIJ24.17~unknown protein
  misc_feature (45)..(185): NCBI GI NO: 18421893 NR Description: calcium-binding EF-hand family protein
  misc_feature (75)..(184): NCBI GI NO: 15228558 NR Description: calcium-binding EF-hand family protein
  misc_feature (73)..(185): NCBI GI NO: 34913268 NR Description: P0519E12.12
  misc_feature (55)..(184): NCBI GI NO: 15232816 NR Description: calcium-binding EF-hand family protein
  misc_feature (65)..(180): NCBI GI NO: 24581540 NR Description: CG31960-PA [Drosophila melanogaster]
  misc_feature (96)..(181): NCBI GI NO: 15236276 NR Description: calcium-binding protein, putative
  misc_feature (65)..(181): NCBI GI NO: 15241500 NR Description: calcium-binding protein, putative
  misc_feature (96)..(181): NCBI GI NO: 15221358 NR Description: calcium-binding protein, putative
  misc_feature (110)..(180): NCBI GI NO: 20137483 NR Description: Calmodulin (CaM)
MEKSPATAGYHHAPLFQEPLGILILFILTWCISKLQSLLPTSCCQSCTCTVSPTTSTPVLAETKISKAPNKSEYDEMNATQSDAEVAMRKMGLDFDQEKSCEYISTLFDEDEPSFKEVKMAFLVFDENNDGYIDALDLRRVLHNLGLGDRVGVNESEQMIARYDMNNNKRLDLMEFTKVLEDSFC

SEQ ID NO: 15936 - protein, 109 aa, Triticum aestivum
  peptide (1)..(109): Ceres Seq. ID no. 13663042
  misc_feature (41)..(66): Pfam Name: Pfam Description:  EF hand
  misc_feature (1)..(109): NCBI GI NO: 9758343 NR Description: gene_id:MIJ24.17~unknown protein
  misc_feature (1)..(109): NCBI GI NO: 18421893 NR Description: calcium-binding EF-hand family protein
  misc_feature (1)..(108): NCBI GI NO: 15228558 NR Description: calcium-binding EF-hand family protein
  misc_feature (1)..(109): NCBI GI NO: 34913268 NR Description: P0519E12.12
  misc_feature (1)..(108): NCBI GI NO: 15232816 NR Description: calcium-binding EF-hand family protein
  misc_feature (1)..(104): NCBI GI NO: 24581540 NR Description: CG31960-PA [Drosophila melanogaster]
  misc_feature (20)..(105): NCBI GI NO: 15236276 NR Description: calcium-binding protein, putative
  misc_feature (1)..(105): NCBI GI NO: 15241500 NR Description: calcium-binding protein, putative
  misc_feature (20)..(105): NCBI GI NO: 15221358 NR Description: calcium-binding protein, putative
  misc_feature (34)..(104): NCBI GI NO: 20137483 NR Description: Calmodulin (CaM)
MNATQSDAEVAMRKMGLDFDQEKSCEYISTLFDEDEPSFKEVKMAFLVFDENNDGYIDALDLRRVLHNLGLGDRVGVNESEQMIARYDMNNNKRLDLMEFTKVLEDSFC

SEQ ID NO: 15937 - DNA, 2100 bp, Triticum aestivum
  misc_feature (1)..(2100): Ceres Seq. ID no. 13657008
acctagaacatcctaatcgaaaaccctccccgcgttcccacaccgccacgcgcatacagactccacagccccgcactgttcctcgagctggagcgtgggctcgcgtagcctcgcccgttcatgagcggcggcgagtcggcggcctcgcgcgagggggattgtaggcaatgaggctgtacatcacggcggcggccgccgacgacgacgcgacgaagccgaaggcgccgcagcagctgcaggcggcgcggcgaggttaccgttccgttgtggtcacggggctcctggccggcgttctcctcttccgcgccgcgctcctcgccatcgagaccggcgcctccctctgcccttccgccaccggttgctcggactggagcgcggggctcgggcgctggctctacggcggcggcggcgacgcgacggaggaatttatgaaagagtggaagagaagccacagggtagctaccctgttggaccccgtggtggtggaagcggcaccagattccttggacgatctcatggtggagatggacaccattctggcgtcctatgatcggcttgacatggaggccgtggtggtcaagataatggccatgctgctaaagatggaccggaagctcaagtcgtcaagaatccgaactctgttcaaccggcacctggcctcgctcggcatccccaagagcatgcactgcctggcgctgcggctggccgaggagttcgcggtgaactccgcggcccgctccccggtaccgttgccgcagtacgcccctcgcctcaccgacgcctctcgcatccacgtctgcctcgtcaccgacaacgttcttgcggccgccgtcgccgtggcgtctgccgtccggagctcggccggtccgtcgaggctcgtgttccacgtcgtcaccgacaagaagagctacgtcccgatgcactcgtggttcgcgctgcacccggtctctccggcggtcgtcgaggtcaagggcctccaccagttcgactggcgcgacggcgatgccatcgcctctgtcatgaggaccatcgacgaggtccagaagagctcgctggattaccaccagctgtgtgatggatcggtggagagggagtacagaaggcttgaggccaccaagccaagcacgttttcgatcctcaactatctcaaaatccatctcccagagttcttcccggagctcccgagggtgatactgctcgacgacgacgtcttggtgcgcaaggatctggccgggctgtgggagcaggatctggacgggaacatcatgggcgcggtcggcgcgcaccggcccggcgcagacggtggcatctgcatcgagaggacgctcagcgagcacctcaacttctctgaccctgcagtgtcgtcgctaggcctcgacggttcgaactgcacgtggtcttggggcgccaccatcgtcgacctcgacgcttggcgaggagcgaacgtcaccgagacgtaccagctatggctgcaaaagaaccgcgaatcggggttcaggctgtggaagatgggatcgctgccgccggctctgatagcgttcgacggccgggtgcaggcgatcgagccgctgtggcacctgccggacctcggctggcgcatgcccgacgccgagctgctgcagctctccgccgtcctgcatttcagcgggccgcggaagccgtggctggaggtggcgttcccggagctgcgggagctgtggctcgggcacttgaataactcggacagcttcctacgaggctgtggcgtagtggaatgacggtaatggaacagggagaagattcaagctggaaaaggggatacgtacagtgatccggtgcaagaatcgggtgcggcgctgggtttgtgaggagagggaagtaggtgctgccttcagcctttcctcgacctggctctgccatgtttgctggtttaatgccactgagtagaaactactcatggcgtatacatatatataactgggatatttatttgttattagttacaaaacggaaagtggaaattgcagaagttgtagccacgagataatttttctttggctccaatgatgaactcactgtatggaactatggttcatttaagagtcaaatacattactggtg

SEQ ID NO: 15938 - protein, 529 aa, Triticum aestivum
  peptide (1)..(529): Ceres Seq. ID no. 15219227
  misc_feature (86)..(424): NCBI GI NO: 34910786 NR Description: P0042A10.22
  misc_feature (435)..(529): NCBI GI NO: 34910786 NR Description: P0042A10.22
  misc_feature (1)..(85): NCBI GI NO: 34910786 NR Description: P0042A10.22
  misc_feature (25)..(528): NCBI GI NO: 22331857 NR Description: glycosyltransferase family 8
  misc_feature (25)..(528): NCBI GI NO: 11358146 NR Description: hypothetical protein T20N10
  misc_feature (25)..(529): NCBI GI NO: 6714484 NR Description: unknown protein [Arabidopsis thaliana]
  misc_feature (25)..(529): NCBI GI NO: 30678270 NR Description: glycosyltransferase family 8
  misc_feature (25)..(529): NCBI GI NO: 30685369 NR Description: glycosyltransferase family 8
  misc_feature (25)..(529): NCBI GI NO: 11358133 NR Description: hypothetical protein T20K14_80 - Arabidopsisthaliana
  misc_feature (110)..(527): NCBI GI NO: 15239707 NR Description: glycosyltransferase family 8
MRLYITAAAADDDATKPKAPQQLQAARRGYRSVVVTGLLAGVLLFRAALLAIETGASLCPSATGCSDWSAGLGRWLYGGGGDATEEFMKEWKRSHRVATLLDPVVVEAAPDSLDDLMVEMDTILASYDRLDMEAVVVKIMAMLLKMDRKLKSSRIRTLFNRHLASLGIPKSMHCLALRLAEEFAVNSAARSPVPLPQYAPRLTDASRIHVCLVTDNVLAAAVAVASAVRSSAGPSRLVFHVVTDKKSYVPMHSWFALHPVSPAVVEVKGLHQFDWRDGDAIASVMRTIDEVQKSSLDYHQLCDGSVEREYRRLEATKPSTFSILNYLKIHLPEFFPELPRVILLDDDVLVRKDLAGLWEQDLDGNIMGAVGAHRPGADGGICIERTLSEHLNFSDPAVSSLGLDGSNCTWSWGATIVDLDAWRGANVTETYQLWLQKNRESGFRLWKMGSLPPALIAFDGRVQAIEPLWHLPDLGWRMPDAELLQLSAVLHFSGPRKPWLEVAFPELRELWLGHLNNSDSFLRGCGVVE

SEQ ID NO: 15939 - protein, 442 aa, Triticum aestivum
  peptide (1)..(442): Ceres Seq. ID no. 15219228
  misc_feature (1)..(337): NCBI GI NO: 34910786 NR Description: P0042A10.22
  misc_feature (348)..(442): NCBI GI NO: 34910786 NR Description: P0042A10.22
  misc_feature (1)..(441): NCBI GI NO: 22331857 NR Description: glycosyltransferase family 8
  misc_feature (1)..(441): NCBI GI NO: 11358146 NR Description: hypothetical protein T20N10
  misc_feature (1)..(442): NCBI GI NO: 6714484 NR Description: unknown protein [Arabidopsis thaliana]
  misc_feature (1)..(442): NCBI GI NO: 30678270 NR Description: glycosyltransferase family 8
  misc_feature (1)..(442): NCBI GI NO: 30685369 NR Description: glycosyltransferase family 8
  misc_feature (1)..(442): NCBI GI NO: 11358133 NR Description: hypothetical protein T20K14_80 - Arabidopsisthaliana
  misc_feature (23)..(440): NCBI GI NO: 15239707 NR Description: glycosyltransferase family 8
  misc_feature (1)..(440): NCBI GI NO: 10177914 NR Description: emb|CAB71043
MKEWKRSHRVATLLDPVVVEAAPDSLDDLMVEMDTILASYDRLDMEAVVVKIMAMLLKMDRKLKSSRIRTLFNRHLASLGIPKSMHCLALRLAEEFAVNSAARSPVPLPQYAPRLTDASRIHVCLVTDNVLAAAVAVASAVRSSAGPSRLVFHVVTDKKSYVPMHSWFALHPVSPAVVEVKGLHQFDWRDGDAIASVMRTIDEVQKSSLDYHQLCDGSVEREYRRLEATKPSTFSILNYLKIHLPEFFPELPRVILLDDDVLVRKDLAGLWEQDLDGNIMGAVGAHRPGADGGICIERTLSEHLNFSDPAVSSLGLDGSNCTWSWGATIVDLDAWRGANVTETYQLWLQKNRESGFRLWKMGSLPPALIAFDGRVQAIEPLWHLPDLGWRMPDAELLQLSAVLHFSGPRKPWLEVAFPELRELWLGHLNNSDSFLRGCGVVE

SEQ ID NO: 15940 - protein, 413 aa, Triticum aestivum
  peptide (1)..(413): Ceres Seq. ID no. 15219229
  misc_feature (1)..(308): NCBI GI NO: 34910786 NR Description: P0042A10.22
  misc_feature (319)..(413): NCBI GI NO: 34910786 NR Description: P0042A10.22
  misc_feature (1)..(412): NCBI GI NO: 22331857 NR Description: glycosyltransferase family 8
  misc_feature (1)..(412): NCBI GI NO: 11358146 NR Description: hypothetical protein T20N10
  misc_feature (1)..(413): NCBI GI NO: 6714484 NR Description: unknown protein [Arabidopsis thaliana]
  misc_feature (1)..(413): NCBI GI NO: 30678270 NR Description: glycosyltransferase family 8
  misc_feature (1)..(413): NCBI GI NO: 30685369 NR Description: glycosyltransferase family 8
  misc_feature (1)..(413): NCBI GI NO: 11358133 NR Description: hypothetical protein T20K14_80 - Arabidopsisthaliana
  misc_feature (1)..(411): NCBI GI NO: 15239707 NR Description: glycosyltransferase family 8
  misc_feature (1)..(411): NCBI GI NO: 10177914 NR Description: emb|CAB71043
MVEMDTILASYDRLDMEAVVVKIMAMLLKMDRKLKSSRIRTLFNRHLASLGIPKSMHCLALRLAEEFAVNSAARSPVPLPQYAPRLTDASRIHVCLVTDNVLAAAVAVASAVRSSAGPSRLVFHVVTDKKSYVPMHSWFALHPVSPAVVEVKGLHQFDWRDGDAIASVMRTIDEVQKSSLDYHQLCDGSVEREYRRLEATKPSTFSILNYLKIHLPEFFPELPRVILLDDDVLVRKDLAGLWEQDLDGNIMGAVGAHRPGADGGICIERTLSEHLNFSDPAVSSLGLDGSNCTWSWGATIVDLDAWRGANVTETYQLWLQKNRESGFRLWKMGSLPPALIAFDGRVQAIEPLWHLPDLGWRMPDAELLQLSAVLHFSGPRKPWLEVAFPELRELWLGHLNNSDSFLRGCGVVE

SEQ ID NO: 15941 - DNA, 860 bp, Triticum aestivum
  misc_feature (1)..(860): Ceres Seq. ID no. 13663127
ctctctctctctttccgtgccactccccaatccgttctccaatcccactcccctatgccggcgtccgggacgcgctcccggggccgcccgccgcagccggtggaggagggggcgcgcgacgaagaagcgccggtggaggaggcgggcgagctcggcgccgacggcgatgcggcggttcgtgcgttaccggctcacccggtgagctctaccagctcgggtgatgaggatggggaggaggcgggggatggggatgatgaggacgcggaggggacgctcctccccagctgccccgtgtgtatgaatccgtggaccgccgatggcgagcatcgcgtaagttgcattccttgtgggcatgtctatggcagatcttgcttagaaaaatggttagcacagtgtggaaagaaaagtgccatgtgtcctcagtgcggcaagatgtttagacaaaagaacattatcaacctctatgcaccagagattgttgttccaaataatgatcttgaaaagcaagtattgtcactgagagataaaaatgaatttcttgagaatcaacaacaaaaattaattgaggagattgcattggagcagcaaaaggagaaagaggcgctggaggagggaggcgatgcagctcaagagtgacgtggtactggtgccggtccaaatgtttgtgtagaacagaggaagcagctagcggaagtcaaacattgatgtgtttgtaatgcacggtgtcggctgaggactaatgtacggagattgtagtcatgtgctcacctgatacatggataatgattttcagttcagtacccagaattttgagttctagtgatggttagtgtcttatgtctaagtgatcaaattgaata

SEQ ID NO: 15942 - protein, 211 aa, Triticum aestivum
  peptide (1)..(211): Ceres Seq. ID no. 13663128
  misc_feature (96)..(142): Pfam Name: RING finger Pfam Description: Zinc finger, C3HC4 type
  misc_feature (35)..(204): NCBI GI NO: 37536588 NR Description: hypothetical protein
  misc_feature (24)..(191): NCBI GI NO: 34902396 NR Description: Hypothetical protein
  misc_feature (67)..(202): NCBI GI NO: 11357373 NR Description: hypothetical protein F12E4
  misc_feature (84)..(204): NCBI GI NO: 21356599 NR Description: CG13025-PA [Drosophila melanogaster]
  misc_feature (85)..(203): NCBI GI NO: 31213435 NR Description: ENSANGP00000021894 [Anopheles gambiae]
  misc_feature (18)..(187): NCBI GI NO: 31542200 NR Description: cDNA sequence BC027246 [Mus musculus]
  misc_feature (18)..(187): NCBI GI NO: 37514840 NR Description: Unknown (protein for MGC:6881) [Mus musculus]
  misc_feature (96)..(208): NCBI GI NO: 19074263 NR Description: hypothetical protein [Encephalitozoon cuniculi]
  misc_feature (86)..(211): NCBI GI NO: 34851762 NR Description: similar to CDNA sequence BC027246
  misc_feature (85)..(196): NCBI GI NO: 37589541 NR Description: FLJ10520 protein [Homo sapiens]
LSLSFRATPQSVLQSHSPMPASGTRSRGRPPQPVEEGARDEEAPVEEAGELGADGDAAVRALPAHPVSSTSSGDEDGEEAGDGDDEDAEGTLLPSCPVCMNPWTADGEHRVSCIPCGHVYGRSCLEKWLAQCGKKSAMCPQCGKMFRQKNIINLYAPEIVVPNNDLEKQVLSLRDKNEFLENQQQKLIEEIALEQQKEKEALEEGGDAAQE

SEQ ID NO: 15943 - protein, 193 aa, Triticum aestivum
  peptide (1)..(193): Ceres Seq. ID no. 13663129
  misc_feature (78)..(124): Pfam Name: RING finger Pfam Description: Zinc finger, C3HC4 type
  misc_feature (17)..(186): NCBI GI NO: 37536588 NR Description: hypothetical protein
  misc_feature (6)..(173): NCBI GI NO: 34902396 NR Description: Hypothetical protein
  misc_feature (49)..(184): NCBI GI NO: 11357373 NR Description: hypothetical protein F12E4
  misc_feature (66)..(186): NCBI GI NO: 21356599 NR Description: CG13025-PA [Drosophila melanogaster]
  misc_feature (67)..(185): NCBI GI NO: 31213435 NR Description: ENSANGP00000021894 [Anopheles gambiae]
  misc_feature (1)..(169): NCBI GI NO: 31542200 NR Description: cDNA sequence BC027246 [Mus musculus]
  misc_feature (1)..(169): NCBI GI NO: 37514840 NR Description: Unknown (protein for MGC:6881) [Mus musculus]
  misc_feature (78)..(190): NCBI GI NO: 19074263 NR Description: hypothetical protein [Encephalitozoon cuniculi]
  misc_feature (68)..(193): NCBI GI NO: 34851762 NR Description: similar to CDNA sequence BC027246
  misc_feature (67)..(178): NCBI GI NO: 37589541 NR Description: FLJ10520 protein [Homo sapiens]
MPASGTRSRGRPPQPVEEGARDEEAPVEEAGELGADGDAAVRALPAHPVSSTSSGDEDGEEAGDGDDEDAEGTLLPSCPVCMNPWTADGEHRVSCIPCGHVYGRSCLEKWLAQCGKKSAMCPQCGKMFRQKNIINLYAPEIVVPNNDLEKQVLSLRDKNEFLENQQQKLIEEIALEQQKEKEALEEGGDAAQE

SEQ ID NO: 15944 - protein, 112 aa, Triticum aestivum
  peptide (1)..(112): Ceres Seq. ID no. 13663130
  misc_feature (1)..(43): Pfam Name: RING finger Pfam Description: Zinc finger, C3HC4 type
  misc_feature (1)..(105): NCBI GI NO: 37536588 NR Description: hypothetical protein
  misc_feature (1)..(92): NCBI GI NO: 34902396 NR Description: Hypothetical protein
  misc_feature (1)..(103): NCBI GI NO: 11357373 NR Description: hypothetical protein F12E4
  misc_feature (1)..(105): NCBI GI NO: 21356599 NR Description: CG13025-PA [Drosophila melanogaster]
  misc_feature (1)..(104): NCBI GI NO: 31213435 NR Description: ENSANGP00000021894 [Anopheles gambiae]
  misc_feature (1)..(88): NCBI GI NO: 31542200 NR Description: cDNA sequence BC027246 [Mus musculus]
  misc_feature (1)..(88): NCBI GI NO: 37514840 NR Description: Unknown (protein for MGC:6881) [Mus musculus]
  misc_feature (1)..(109): NCBI GI NO: 19074263 NR Description: hypothetical protein [Encephalitozoon cuniculi]
  misc_feature (1)..(112): NCBI GI NO: 34851762 NR Description: similar to CDNA sequence BC027246
  misc_feature (1)..(97): NCBI GI NO: 37589541 NR Description: FLJ10520 protein [Homo sapiens]
MNPWTADGEHRVSCIPCGHVYGRSCLEKWLAQCGKKSAMCPQCGKMFRQKNIINLYAPEIVVPNNDLEKQVLSLRDKNEFLENQQQKLIEEIALEQQKEKEALEEGGDAAQE

SEQ ID NO: 15945 - DNA, 811 bp, Triticum aestivum
  misc_feature (1)..(811): Ceres Seq. ID no. 12626276
acaaaagccctccctaaaagcctctccctcatttttcttagctgccaaagctttcttctgttgctatttcttcactccattgctgtcttctcagcagctcaatttgctcatcacactcaaaaacaagctagctaagcgagccaggtccatttcccgcgctcatggggttgcaagagatggcgaagctgcagctgcaccgccatggcggcatgcgagtggaagcccacgcccccgtcgacgacgaccaggcggcggtccgcgggaggaggaagaaggcgacggcggcagcggtctggattgcagtgccgctcaggcccgtcaaggtcggccgccgaagacacggcggcggcgacagcagcggcgaggcaggggaggtggaggagaaggaagtggaagaggaggaggaggtgacgacgccgagaggggaagggtgcaggataccctgggaggcggcgacgtgcccgccggcgcccaagaaggcgaggacggcggtggcgatcttcgccgaccgccggtgcaaccgcgacgacggggaggcgacggagtacttccgcgtgccggcggacctggactccgtgttcgccgtcagccgggtcgccgaggccaactgaatgattcgtccatgctcgcgcgcgtgtagagctgcaagtgcgagcgatcaagtccagttaaaagacaagagacagaggagatgatccaataatgcagctgtaaaaatttcgcattgtcgatgcaatggatttatcttagttaattacttctctttcagtgtaaatgtaaattaatcgaggtcgaggagtgcatctgtact

SEQ ID NO: 15946 - protein, 212 aa, Triticum aestivum
  peptide (1)..(212): Ceres Seq. ID no. 12626277
  misc_feature (47)..(198): NCBI GI NO: 22901740 NR Description: Y-box protein Ct-p40 [Chironomus tentans]
  misc_feature (47)..(198): NCBI GI NO: 22901742 NR Description: Y-box protein Ct-p50 [Chironomus tentans]
  misc_feature (121)..(211): NCBI GI NO: 12597573 NR Description: p6.9
QKPSLKASPSFFLAAKAFFCCYFFTPLLSSQQLNLLITLKNKLAKRARSISRAHGVARDGEAAAAPPWRHASGSPRPRRRRPGGGPREEEEGDGGSGLDCSAAQARQGRPPKTRRRRQQRRGRGGGGEGSGRGGGGDDAERGRVQDTLGGGDVPAGAQEGEDGGGDLRRPPVQPRRRGGDGVLPRAGGPGLRVRRQPGRRGQLNDSSMLARV

SEQ ID NO: 15947 - protein, 149 aa, Triticum aestivum
  peptide (1)..(149): Ceres Seq. ID no. 12626278
MGLQEMAKLQLHRHGGMRVEAHAPVDDDQAAVRGRRKKATAAAVWIAVPLRPVKVGRRRHGGGDSSGEAGEVEEKEVEEEEEVTTPRGEGCRIPWEAATCPPAPKKARTAVAIFADRRCNRDDGEATEYFRVPADLDSVFAVSRVAEAN

SEQ ID NO: 15948 - protein, 144 aa, Triticum aestivum
  peptide (1)..(144): Ceres Seq. ID no. 12626279
MAKLQLHRHGGMRVEAHAPVDDDQAAVRGRRKKATAAAVWIAVPLRPVKVGRRRHGGGDSSGEAGEVEEKEVEEEEEVTTPRGEGCRIPWEAATCPPAPKKARTAVAIFADRRCNRDDGEATEYFRVPADLDSVFAVSRVAEAN

SEQ ID NO: 15949 - DNA, 1085 bp, Triticum aestivum
  misc_feature (1)..(1085): Ceres Seq. ID no. 13656286
tccaacattattccctgtctcacccaagctgtcctgccccgcctcgcggcagcaaacagcaatacctgcagctgccggccaccaccaaccgcgccacgccatttaccaccatataatcatcactcaccccaaggcttgtcgggagcgaagccaagccagtcttgtgttggaagaacagagcagcagcttgcagatcgagagttcgggagaggcaatggcgacttcgttccaggggacgaccaccaagtgcaacgcctgcgacaagacggtgtacctcgtcgacaagctcaccgccgacaaccgggtctaccacaaggcctgcttcaggtgccaccactgcaagggcaccctcaagctcgcaaattacaactcgttcgaaggagtgctctactgcaggcctcactttgaccagctcttcaagaggaccgggagcctggacaagagcttcgaaggcactccaaaggttgtcaagccagaaaggaatgttgggaatgagaatgctactaaagtctccagcgcatttgctggcactagagagaaatgttttggatgcagcaagacagtctatccaattgagagggttactgtgaataacactatgtaccacaagagctgcttcaaatgctgccatggagggtgcaccatcagcccttcgaattacatcgcgcacgagggcaagctcttctgcaagcaccaccacacccagctgatcaaagagaagggtaatttcagccagctcgagaacgaccacgacaagacatcacagagtgccgggtcagtggatgatgaagactcggagtattagtcagtccttgaggatatccagagatgaataacgagcccttctgcatttgcaccagagcagtatatctttctgctgtgtggttcttttgagtttttccaatcgagatcaagtgcattccgaagacaattatgttattgccttgtacgcatgtaaaccttgttatatccgagtcaaaatatctctacctggttcgacgacgtctatgcgcatacaagcaagagaattgtaagttgattttwaactcamawrawaraaamatgccacctttaaaaaaaaaaaa

SEQ ID NO: 15950 - protein, 267 aa, Triticum aestivum
  peptide (1)..(267): Ceres Seq. ID no. 15219819
  misc_feature (181)..(238): Pfam Name: Pfam Description:  LIM domain
  misc_feature (72)..(246): NCBI GI NO: 7715037 NR Description: LIM transcription factor homolog [Zea mays]
  misc_feature (75)..(256): NCBI GI NO: 18565112 NR Description: transcription factor LIM [Populus kitakamiensis]
  misc_feature (75)..(256): NCBI GI NO: 18565116 NR Description: transcription factor LIM [Populus kitakamiensis]
  misc_feature (75)..(251): NCBI GI NO: 6467903 NR Description: pollen specific LIM domain protein 1a
  misc_feature (75)..(251): NCBI GI NO: 5932418 NR Description: LIM domain protein PLIM1 [Nicotiana tabacum]
  misc_feature (75)..(263): NCBI GI NO: 5932413 NR Description: LIM domain protein WLIM1 [Nicotiana tabacum]
  misc_feature (75)..(263): NCBI GI NO: 18565124 NR Description: transcription factor LIM [Nicotiana tabacum]
  misc_feature (75)..(251): NCBI GI NO: 6467905 NR Description: pollen specific LIM domain protein 1b
  misc_feature (75)..(263): NCBI GI NO: 5689136 NR Description: transcription factor Ntlim1 [Nicotiana tabacum]
  misc_feature (75)..(255): NCBI GI NO: 15218450 NR Description: transcription factor -related
PTLFPVSPKLSCPASRQQTAIPAAAGHHQPRHAIYHHIIITHPKACRERSQASLVLEEQSSSLQIESSGEAMATSFQGTTTKCNACDKTVYLVDKLTADNRVYHKACFRCHHCKGTLKLANYNSFEGVLYCRPHFDQLFKRTGSLDKSFEGTPKVVKPERNVGNENATKVSSAFAGTREKCFGCSKTVYPIERVTVNNTMYHKSCFKCCHGGCTISPSNYIAHEGKLFCKHHHTQLIKEKGNFSQLENDHDKTSQSAGSVDDEDSEY

SEQ ID NO: 15951 - protein, 196 aa, Triticum aestivum
  peptide (1)..(196): Ceres Seq. ID no. 15219820
  misc_feature (110)..(167): Pfam Name: Pfam Description:  LIM domain
  misc_feature (1)..(175): NCBI GI NO: 7715037 NR Description: LIM transcription factor homolog [Zea mays]
  misc_feature (4)..(185): NCBI GI NO: 18565112 NR Description: transcription factor LIM [Populus kitakamiensis]
  misc_feature (4)..(185): NCBI GI NO: 18565116 NR Description: transcription factor LIM [Populus kitakamiensis]
  misc_feature (4)..(180): NCBI GI NO: 6467903 NR Description: pollen specific LIM domain protein 1a
  misc_feature (4)..(180): NCBI GI NO: 5932418 NR Description: LIM domain protein PLIM1 [Nicotiana tabacum]
  misc_feature (4)..(192): NCBI GI NO: 5932413 NR Description: LIM domain protein WLIM1 [Nicotiana tabacum]
  misc_feature (4)..(192): NCBI GI NO: 18565124 NR Description: transcription factor LIM [Nicotiana tabacum]
  misc_feature (4)..(180): NCBI GI NO: 6467905 NR Description: pollen specific LIM domain protein 1b
  misc_feature (4)..(192): NCBI GI NO: 5689136 NR Description: transcription factor Ntlim1 [Nicotiana tabacum]
  misc_feature (4)..(184): NCBI GI NO: 15218450 NR Description: transcription factor -related
MATSFQGTTTKCNACDKTVYLVDKLTADNRVYHKACFRCHHCKGTLKLANYNSFEGVLYCRPHFDQLFKRTGSLDKSFEGTPKVVKPERNVGNENATKVSSAFAGTREKCFGCSKTVYPIERVTVNNTMYHKSCFKCCHGGCTISPSNYIAHEGKLFCKHHHTQLIKEKGNFSQLENDHDKTSQSAGSVDDEDSEY

SEQ ID NO: 15952 - protein, 135 aa, Triticum aestivum
  peptide (1)..(135): Ceres Seq. ID no. 15219821
SNIIPCLTQAVLPRLAAANSNTCSCRPPPTAPRHLPPYNHHSPQGLSGAKPSQSCVGRTEQQLADREFGRGNGDFVPGDDHQVQRLRQDGVPRRQAHRRQPGLPQGLLQVPPLQGHPQARKLQLVRRSALLQASL

SEQ ID NO: 15953 - DNA, 1434 bp, Triticum aestivum
  misc_feature (1)..(1434): Ceres Seq. ID no. 13657014
cccttctgacctacccaagctccagtccaccgccgctgtgccctagaactgccgccgcgcccgccctcgtcgctggcgccctccctgtctcgtagcgtccctgctctcttccccccacgcgcaatcttgaacttcggttttgagatccgcccctgctgtcggttgcaggtttgcagagggctcgtcgacatgtcttgggcgccaatcgagaatgaccctggtgtttttacggagctgttgcaacagttgcaattgaagggtctccaagttgatgaactctactcacttgatcttgatgccctcaatgatcttcagccaatttatgggcttatagttctgtacaaatggcgacctccagaaaaagatgagcgccctgttatcaaggatgcagtcccaaatctgttctttgctaatcagataattaacagtgcatgtgcaacccaagctattgtttctgttctgttgaactcttctggcatcacccttagcgaggacctaaaaaagctcaaggagtttgcaaaggacatgccgccagagctcaaaggattggctatagtgaattgtgaaagcattcgtatgaccagtaactcatttgcaaagtcagatgactactctgaggaacagaaatccaaggatgatgatgtctaccatttcattagctatgttcctgttgacggcgtcctgtatgagcttgatggactaaaggaaggaccgattagcctgggaaaatgcccaggtggtattggggagatggggtggctgaagatggtgcagcctgtcatccaggaacgcgttgataagttctctcagaatgagataaggttcagtgtcatggctatcacaaagaaccggaaggaaattttcatcatggagctcaaggaacttcagaggaagagggagaacctcttatcacaaatgggtgatccttctgccaatcggcaaaggccatccattgagcggtcactcgcagaggttgctgctcagattgaggctgtgaccgagaagatcataatggaggaagagaaggcaaagaagtggaagacagagaacatcaggaggaagcacaactacgtgcctttcttgttcaatttcctcaagatcctcgaggagaagcagcaactgaagcccctgatagagaaggcgaaacagaattctcacagccgtaaccctaagtgaaacctgcgttgtaaattttttatcgtcttggttgttttggttttgtgtagagatggctgactgactttgtttcctagctgaatgggccttgtagttctagtcctagacaggccatatatcgataccgtcctggtttattcaggcagatcttaaaccattcatgtaggggggacactctgactccttatcagaattatatgtgcatcagagggttttttccctgtctaattcttcccaagctttaactgaaagtttgac

SEQ ID NO: 15954 - protein, 328 aa, Triticum aestivum
  peptide (1)..(328): Ceres Seq. ID no. 13657015
  misc_feature (1)..(320): NCBI GI NO: 18408331 NR Description: expressed protein [Arabidopsis thaliana]
  misc_feature (1)..(320): NCBI GI NO: 15724238 NR Description: F5I14.29/F5I14.29 [Arabidopsis thaliana]
  misc_feature (1)..(317): NCBI GI NO: 15237324 NR Description: ubiquitin C-terminal hydrolase-related protein
  misc_feature (42)..(320): NCBI GI NO: 6686411 NR Description: F1E22.3 [Arabidopsis thaliana]
  misc_feature (3)..(325): NCBI GI NO: 5738242 NR Description: ubiquitin C-terminal hydrolase UCH-L5
  misc_feature (3)..(325): NCBI GI NO: 18203574 NR Description: Ubiquitin carboxyl-terminal hydrolase isozyme L5
  misc_feature (3)..(325): NCBI GI NO: 9625047 NR Description: ubiquitin C-terminal hydrolase 37
  misc_feature (3)..(325): NCBI GI NO: 7706753 NR Description: ubiquitin C-terminal hydrolase UCH37
  misc_feature (3)..(325): NCBI GI NO: 30584639 NR Description: Homo sapiens ubiquitin carboxyl-terminal hydrolaseL5
  misc_feature (3)..(325): NCBI GI NO: 15930175 NR Description: Unknown (protein for MGC:9314) [Homo sapiens]
MSWAPIENDPGVFTELLQQLQLKGLQVDELYSLDLDALNDLQPIYGLIVLYKWRPPEKDERPVIKDAVPNLFFANQIINSACATQAIVSVLLNSSGITLSEDLKKLKEFAKDMPPELKGLAIVNCESIRMTSNSFAKSDDYSEEQKSKDDDVYHFISYVPVDGVLYELDGLKEGPISLGKCPGGIGEMGWLKMVQPVIQERVDKFSQNEIRFSVMAITKNRKEIFIMELKELQRKRENLLSQMGDPSANRQRPSIERSLAEVAAQIEAVTEKIIMEEEKAKKWKTENIRRKHNYVPFLFNFLKILEEKQQLKPLIEKAKQNSHSRNPK

SEQ ID NO: 15955 - protein, 216 aa, Triticum aestivum
  peptide (1)..(216): Ceres Seq. ID no. 13657016
  misc_feature (1)..(208): NCBI GI NO: 18408331 NR Description: expressed protein [Arabidopsis thaliana]
  misc_feature (1)..(208): NCBI GI NO: 15724238 NR Description: F5I14.29/F5I14.29 [Arabidopsis thaliana]
  misc_feature (1)..(205): NCBI GI NO: 15237324 NR Description: ubiquitin C-terminal hydrolase-related protein
  misc_feature (1)..(208): NCBI GI NO: 6686411 NR Description: F1E22.3 [Arabidopsis thaliana]
  misc_feature (1)..(213): NCBI GI NO: 5738242 NR Description: ubiquitin C-terminal hydrolase UCH-L5
  misc_feature (1)..(213): NCBI GI NO: 18203574 NR Description: Ubiquitin carboxyl-terminal hydrolase isozyme L5
  misc_feature (1)..(213): NCBI GI NO: 9625047 NR Description: ubiquitin C-terminal hydrolase 37
  misc_feature (1)..(213): NCBI GI NO: 7706753 NR Description: ubiquitin C-terminal hydrolase UCH37
  misc_feature (1)..(213): NCBI GI NO: 30584639 NR Description: Homo sapiens ubiquitin carboxyl-terminal hydrolaseL5
  misc_feature (1)..(213): NCBI GI NO: 15930175 NR Description: Unknown (protein for MGC:9314) [Homo sapiens]
MPPELKGLAIVNCESIRMTSNSFAKSDDYSEEQKSKDDDVYHFISYVPVDGVLYELDGLKEGPISLGKCPGGIGEMGWLKMVQPVIQERVDKFSQNEIRFSVMAITKNRKEIFIMELKELQRKRENLLSQMGDPSANRQRPSIERSLAEVAAQIEAVTEKIIMEEEKAKKWKTENIRRKHNYVPFLFNFLKILEEKQQLKPLIEKAKQNSHSRNPK

SEQ ID NO: 15956 - protein, 199 aa, Triticum aestivum
  peptide (1)..(199): Ceres Seq. ID no. 13657017
  misc_feature (1)..(191): NCBI GI NO: 18408331 NR Description: expressed protein [Arabidopsis thaliana]
  misc_feature (1)..(191): NCBI GI NO: 15724238 NR Description: F5I14.29/F5I14.29 [Arabidopsis thaliana]
  misc_feature (1)..(188): NCBI GI NO: 15237324 NR Description: ubiquitin C-terminal hydrolase-related protein
  misc_feature (1)..(191): NCBI GI NO: 6686411 NR Description: F1E22.3 [Arabidopsis thaliana]
  misc_feature (1)..(196): NCBI GI NO: 5738242 NR Description: ubiquitin C-terminal hydrolase UCH-L5
  misc_feature (1)..(196): NCBI GI NO: 18203574 NR Description: Ubiquitin carboxyl-terminal hydrolase isozyme L5
  misc_feature (1)..(196): NCBI GI NO: 9625047 NR Description: ubiquitin C-terminal hydrolase 37
  misc_feature (1)..(196): NCBI GI NO: 7706753 NR Description: ubiquitin C-terminal hydrolase UCH37
  misc_feature (1)..(196): NCBI GI NO: 15930175 NR Description: Unknown (protein for MGC:9314) [Homo sapiens]
  misc_feature (1)..(196): NCBI GI NO: 30584639 NR Description: Homo sapiens ubiquitin carboxyl-terminal hydrolaseL5
MTSNSFAKSDDYSEEQKSKDDDVYHFISYVPVDGVLYELDGLKEGPISLGKCPGGIGEMGWLKMVQPVIQERVDKFSQNEIRFSVMAITKNRKEIFIMELKELQRKRENLLSQMGDPSANRQRPSIERSLAEVAAQIEAVTEKIIMEEEKAKKWKTENIRRKHNYVPFLFNFLKILEEKQQLKPLIEKAKQNSHSRNPK

SEQ ID NO: 15957 - DNA, 568 bp, Triticum aestivum
  misc_feature (1)..(568): Ceres Seq. ID no. 13656228
gaggctcggcgtggctcggctggcatttgcttgtcctgtttctcgtggccgcctacttgtaatccgctgccagccaaatcgctagctcactccctccctcgtcagcctccggcagatcctcctccataccgctcgaagctccgccctcctcctcccgacacctcgagatctccgccccggacccatttcttccccaccaaggtccagcgccgtccggccggccctccctgttgcaggcaggcgacgccgccgccgccatgtccaagtcgggagccctggatctcgcgtccggccttggcgggaagatcgacaaggaacaggtcaaatccgcggtcgacgagtatgagaaatatcatggatattacggagggaaggaggaatcgaggaaatccaactacaccgatatggttaataaatactatgatcttgctactagcttctatgagtatggctggggtgaatccttccactttgctcacaggtggaatggggaatctttaagggaaagcatcaaacgacacgagcactttctggccttacagcttgagttgaaaccaggcatgaaggt

SEQ ID NO: 15958 - protein, 166 aa, Triticum aestivum
  peptide (1)..(166): Ceres Seq. ID no. 13656229
  misc_feature (17)..(94): Pfam Name: Pfam Description:  Extensin-like region
  misc_feature (17)..(94): NCBI GI NO: 4033606 NR Description: Extensin [Adiantum capillus-veneris]
  misc_feature (17)..(92): NCBI GI NO: 1076556 NR Description: extensin-like protein - cowpea (fragment)
  misc_feature (17)..(93): NCBI GI NO: 3204132 NR Description: extensin [Cicer arietinum]
  misc_feature (17)..(92): NCBI GI NO: 7488998 NR Description: extensin class I (clone uG-18) - tomato (fragment)
  misc_feature (17)..(92): NCBI GI NO: 7488998 NR Description: extensin class I (clone uG-18) - tomato (fragment)
  misc_feature (17)..(92): NCBI GI NO: 81870 NR Description: hydroxyproline-rich glycoprotein (clone Hyp3
  misc_feature (17)..(92): NCBI GI NO: 169345 NR Description: hydroxyproline-rich glycoprotein
  misc_feature (17)..(92): NCBI GI NO: 3204132 NR Description: extensin [Cicer arietinum]
  misc_feature (14)..(92): NCBI GI NO: 7488998 NR Description: extensin class I (clone uG-18) - tomato (fragment)
  misc_feature (17)..(92): NCBI GI NO: 7488998 NR Description: extensin class I (clone uG-18) - tomato (fragment)
EARRGSAGICLSCFSWPPTCNPLPAKSLAHSLPRQPPADPPPYRSKLRPPPPDTSRSPPRTHFFPTKVQRRPAGPPCCRQATPPPPCPSREPWISRPALAGRSTRNRSNPRSTSMRNIMDITEGRRNRGNPTTPIWLINTMILLLASMSMAGVNPSTLLTGGMGNL

SEQ ID NO: 15959 - protein, 103 aa, Triticum aestivum
  peptide (1)..(103): Ceres Seq. ID no. 13656230
  misc_feature (1)..(102): NCBI GI NO: 7443715 NR Description: sterol 24-C-methyltransferase (EC 2
  misc_feature (1)..(102): NCBI GI NO: 7443716 NR Description: sterol 24-C-methyltransferase (EC 2
  misc_feature (1)..(102): NCBI GI NO: 3560531 NR Description: cycloartenol-C24-methyltransferase
  misc_feature (1)..(102): NCBI GI NO: 34393309 NR Description: cycloartenol-C24-methyltransferase
  misc_feature (1)..(102): NCBI GI NO: 3560474 NR Description: S-adenosyl-methionine-sterol-C- methyltransferase
  misc_feature (1)..(102): NCBI GI NO: 7443719 NR Description: sterol 24-C-methyltransferase (EC 2
  misc_feature (1)..(102): NCBI GI NO: 3603295 NR Description: S-adenosyl-methionine cycloartenol-C24-methyltransferase
  misc_feature (1)..(102): NCBI GI NO: 7443720 NR Description: probable sterol 24-C-methyltransferase (EC2
  misc_feature (7)..(102): NCBI GI NO: 15240691 NR Description: 24-sterol C-methyltransferase
  misc_feature (7)..(102): NCBI GI NO: 21434843 NR Description: cephalopod [Arabidopsis thaliana]
MSKSGALDLASGLGGKIDKEQVKSAVDEYEKYHGYYGGKEESRKSNYTDMVNKYYDLATSFYEYGWGESFHFAHRWNGESLRESIKRHEHFLALQLELKPGMK

SEQ ID NO: 15960 - DNA, 874 bp, Triticum aestivum
  misc_feature (1)..(874): Ceres Seq. ID no. 12619532
tgacatacaagaggtggaggaggtgaagagtcagtacacttcctttgaaatagcaagaggaagagacctagggatcaacaggctcgagatatcaacagcaaccctggagcctcagcagttatggaccaaaaatgtccttgagaagctcgccaccgatgctcagggtctgctaatcatccaagcaagcatcgaggaagtgaagcagaaaatcgagggaacttccaagggcaaatctcccatgagctcagagtacagcagcatcagggctcagctgcaggagatcgagggctctgtcttggaacagataggtttcaacagcagtttgacaaagaaggccgagaattatcctgcattcgaggtgaatgccgacctagagggctattccagcagaaggaagatctccgagcaggtgcagaaagggtcggagaaggtggcgaggctggacctcgagctccagaagatacagtacgtgctgctgaagctcgaggaagagcatgagttcaagagggtcaaggtctccgagaagcggtcgcggctgctcttgagggactacgtgtacgcaaagaaggacaagaatgacgccgggcagaagaagaagagtagggtgcccttctgcggctgtgtgcgccccaaaacagtgactgagtcttgattcggagtccgcagcaagcaatgtctttagtatctcttctgtaatgggttgcatgataatgttaacaaggagctcatgcattcggagttttgtccttgttcagaaatgccccctagtttaactagttaatcctactgatacttttatgaatcgaagcattttgtaattccgttgcccttcgctgtttctctgtgtctgcaatgaagatatatgagaatcttc

SEQ ID NO: 15961 - protein, 216 aa, Triticum aestivum
  peptide (1)..(216): Ceres Seq. ID no. 12619533
  misc_feature (1)..(214): NCBI GI NO: 37534452 NR Description: putative centromere protein
  misc_feature (21)..(216): NCBI GI NO: 4894628 NR Description: NT3 [Nicotiana tabacum]
  misc_feature (1)..(210): NCBI GI NO: 15218702 NR Description: unknown protein; protein id: At1g03080.1
  misc_feature (4)..(209): NCBI GI NO: 15235468 NR Description: unknown protein; protein id: At4g02710.1
  misc_feature (9)..(209): NCBI GI NO: 15228859 NR Description: unknown protein; protein id: At3g22790.1
  misc_feature (9)..(209): NCBI GI NO: 9279697 NR Description: centromere protein [Arabidopsis thaliana]
  misc_feature (25)..(215): NCBI GI NO: 15233570 NR Description: centromere protein homolog; protein id: At4g14760
  misc_feature (21)..(133): NCBI GI NO: 29370236 NR Description: centromere protein-like protein
DIQEVEEVKSQYTSFEIARGRDLGINRLEISTATLEPQQLWTKNVLEKLATDAQGLLIIQASIEEVKQKIEGTSKGKSPMSSEYSSIRAQLQEIEGSVLEQIGFNSSLTKKAENYPAFEVNADLEGYSSRRKISEQVQKGSEKVARLDLELQKIQYVLLKLEEEHEFKRVKVSEKRSRLLLRDYVYAKKDKNDAGQKKKSRVPFCGCVRPKTVTES

SEQ ID NO: 15962 - protein, 137 aa, Triticum aestivum
  peptide (1)..(137): Ceres Seq. ID no. 12619534
  misc_feature (1)..(135): NCBI GI NO: 37534452 NR Description: putative centromere protein
  misc_feature (1)..(137): NCBI GI NO: 4894628 NR Description: NT3 [Nicotiana tabacum]
  misc_feature (1)..(131): NCBI GI NO: 15218702 NR Description: unknown protein; protein id: At1g03080.1
  misc_feature (1)..(130): NCBI GI NO: 15235468 NR Description: unknown protein; protein id: At4g02710.1
  misc_feature (1)..(130): NCBI GI NO: 15228859 NR Description: unknown protein; protein id: At3g22790.1
  misc_feature (1)..(130): NCBI GI NO: 9279697 NR Description: centromere protein [Arabidopsis thaliana]
  misc_feature (1)..(136): NCBI GI NO: 15233570 NR Description: centromere protein homolog; protein id: At4g14760
  misc_feature (1)..(54): NCBI GI NO: 29370236 NR Description: centromere protein-like protein
MSSEYSSIRAQLQEIEGSVLEQIGFNSSLTKKAENYPAFEVNADLEGYSSRRKISEQVQKGSEKVARLDLELQKIQYVLLKLEEEHEFKRVKVSEKRSRLLLRDYVYAKKDKNDAGQKKKSRVPFCGCVRPKTVTES

SEQ ID NO: 15963 - DNA, 1510 bp, Triticum aestivum
  misc_feature (1)..(1510): Ceres Seq. ID no. 13657170
acgcactaccaattaccaaataccaatccacgcatcagagctcagaagctaggccagcgccatgggagaagctgcagctgttgtcgccgcctcgcgcgacggcttcttcggcctgggcgagtgcaagggccaggtggtgatcgacggcgagcaggtgccactggtcctgacgccgggcagcgaggaggtgagcggccacgaccacaaggcgctggtggcggccctggtggccaaccgagagtgggtggaggagaaggtggtggccaacagcggcgtgctgctgcgcggcttcggcgtccgcgacgccgtggagttcgacgccatcgtggacgcgctcgggtggccggacatccggtacgtcggccccgccccgcgcacccacgtccacggccgcatctggaccgccaacgagggccccctcgaggagttcatctactaccaccacgagatggtcctcatcaaggagttcccggggaaggtgatcctgttctgcgaggtgccgccgccggagggcggggagacgccgttcgtgccgagcttccgggtgacggagcgcgcgctgcaggagttcccggacatggtggaggagctggacgccaaggggctccgctacaccttcaccgcgctgagcaaggacgacaccaagtccatgcgggggcgagggtgggaggacgccttcgccaccaccgacaaggccgtggccgagcagagagcccgcgcgctggggatggacgtggagtggctgccggaggaaggcggcgtgaggaccatcctcgggccgaggcagctgacgcgggtgttcccgggccggaagggccggcggatgtggttcaacacggtggtggggatgcacggcaaggagctcagctccgccacgttcgccgacggctccgagataccggcggacttcgtgcgccggtgcggcgagatcatcgaggaggagagcatccagttccggtgggagaagggcgacgtgctcatcctcgacaacctcgcaacgctccacggccgccggccgtcgctggcgcccaggagggtcctcgtcgccacatgcaagtgatctcatttcatgcatcacccaccttaactaattggttagttaattaagcttgagggtggacctggcttgattaactaattaatcttagttggtgctggggatgctgcatttggctcttctataataagctgccttgagttactacggtaaaatggctttgtgcattgtgatgcagaagctgggtactcccttttcagaaaaaaaaaagttactacggtaaaataagagctgaaggtttgattaagtcagtcggcttaatacttattacagccaaagaggggtgcggtagtttctcccttataattagtaattttgcatccatcattatgctttttcttttatatttcatccatcattatgctgggtgacatgcattacgacatgtaaggcttatttccttcgagtgatatattaagagatgcatgcagcagtgttatgcatcttctcttt

SEQ ID NO: 15964 - protein, 368 aa, Triticum aestivum
  peptide (1)..(368): Ceres Seq. ID no. 13657171
  misc_feature (43)..(283): Pfam Name: DUF390 Pfam Description: Protein of unknown function
  misc_feature (38)..(347): NCBI GI NO: 10140993 NR Description: putative immediate early protein
  misc_feature (12)..(349): NCBI GI NO: 25989121 NR Description: putative PHA synthase [Streptomyces aureofaciens]
  misc_feature (53)..(352): NCBI GI NO: 22960097 NR Description: hypothetical protein [Rhodobacter sphaeroides]
  misc_feature (37)..(332): NCBI GI NO: 11362193 NR Description: hypothetical protein
  misc_feature (10)..(349): NCBI GI NO: 22957039 NR Description: hypothetical protein [Rhodobacter sphaeroides]
  misc_feature (48)..(349): NCBI GI NO: 29247944 NR Description: GLP_26_54603_52153 [Giardia lamblia ATCC 50803]
  misc_feature (20)..(256): NCBI GI NO: 22959503 NR Description: hypothetical protein [Rhodobacter sphaeroides]
  misc_feature (38)..(347): NCBI GI NO: 13562004 NR Description: major ampullate spidroin 2-like protein
  misc_feature (38)..(347): NCBI GI NO: 13562004 NR Description: major ampullate spidroin 2-like protein
  misc_feature (37)..(353): NCBI GI NO: 23019401 NR Description: hypothetical protein [Thermobifida fusca]
THYQLPNTNPRIRAQKLGQRHGRSCSCCRRLARRLLRPGRVQGPGGDRRRAGATGPDAGQRGGERPRPQGAGGGPGGQPRVGGGEGGGQQRRAAARLRRPRRRGVRRHRGRARVAGHPVRRPRPAHPRPRPHLDRQRGPPRGVHLLPPRDGPHQGVPGEGDPVLRGAAAGGRGDAVRAELPGDGARAAGVPGHGGGAGRQGAPLHLHRAEQGRHQVHAGARVGGRLRHHRQGRGRAESPRAGDGRGVAAGGRRREDHPRAEAADAGVPGPEGPADVVQHGGGDARQGAQLRHVRRRLRDTGGLRAPVRRDHRGGEHPVPVGEGRRAHPRQPRNAPRPPAVAGAQEGPRRHMQVISFHASPTLTNWLVN

SEQ ID NO: 15965 - protein, 332 aa, Triticum aestivum
  peptide (1)..(332): Ceres Seq. ID no. 13657172
  misc_feature (8)..(329): NCBI GI NO: 34906388 NR Description: P0710E05.6
  misc_feature (28)..(332): NCBI GI NO: 15232542 NR Description: expressed protein [Arabidopsis thaliana]
  misc_feature (22)..(328): NCBI GI NO: 23128425 NR Description: hypothetical protein [Nostoc punctiforme]
  misc_feature (50)..(329): NCBI GI NO: 26541507 NR Description: putative regulatory protein
  misc_feature (29)..(329): NCBI GI NO: 1890776 NR Description: syringomycin biosynthesis enzyme
  misc_feature (29)..(329): NCBI GI NO: 23468398 NR Description: hypothetical protein
  misc_feature (51)..(329): NCBI GI NO: 29830181 NR Description: putative SyrP-like protein
  misc_feature (19)..(328): NCBI GI NO: 23128402 NR Description: hypothetical protein [Nostoc punctiforme]
  misc_feature (69)..(328): NCBI GI NO: 9937235 NR Description: SyrP-like protein [Streptomyces verticillus]
  misc_feature (59)..(332): NCBI GI NO: 22985582 NR Description: hypothetical protein [Burkholderia fungorum]
MGEAAAVVAASRDGFFGLGECKGQVVIDGEQVPLVLTPGSEEVSGHDHKALVAALVANREWVEEKVVANSGVLLRGFGVRDAVEFDAIVDALGWPDIRYVGPAPRTHVHGRIWTANEGPLEEFIYYHHEMVLIKEFPGKVILFCEVPPPEGGETPFVPSFRVTERALQEFPDMVEELDAKGLRYTFTALSKDDTKSMRGRGWEDAFATTDKAVAEQRARALGMDVEWLPEEGGVRTILGPRQLTRVFPGRKGRRMWFNTVVGMHGKELSSATFADGSEIPADFVRRCGEIIEEESIQFRWEKGDVLILDNLATLHGRRPSLAPRRVLVATCK

SEQ ID NO: 15966 - protein, 203 aa, Triticum aestivum
  peptide (1)..(203): Ceres Seq. ID no. 13657173
  misc_feature (1)..(200): NCBI GI NO: 34906388 NR Description: P0710E05.6
  misc_feature (1)..(203): NCBI GI NO: 15232542 NR Description: expressed protein [Arabidopsis thaliana]
  misc_feature (1)..(199): NCBI GI NO: 23128425 NR Description: hypothetical protein [Nostoc punctiforme]
  misc_feature (1)..(200): NCBI GI NO: 26541507 NR Description: putative regulatory protein
  misc_feature (1)..(200): NCBI GI NO: 1890776 NR Description: syringomycin biosynthesis enzyme
  misc_feature (1)..(200): NCBI GI NO: 23468398 NR Description: hypothetical protein
  misc_feature (1)..(200): NCBI GI NO: 29830181 NR Description: putative SyrP-like protein
  misc_feature (1)..(199): NCBI GI NO: 23128402 NR Description: hypothetical protein [Nostoc punctiforme]
  misc_feature (1)..(199): NCBI GI NO: 9937235 NR Description: SyrP-like protein [Streptomyces verticillus]
  misc_feature (1)..(203): NCBI GI NO: 22985582 NR Description: hypothetical protein [Burkholderia fungorum]
MVLIKEFPGKVILFCEVPPPEGGETPFVPSFRVTERALQEFPDMVEELDAKGLRYTFTALSKDDTKSMRGRGWEDAFATTDKAVAEQRARALGMDVEWLPEEGGVRTILGPRQLTRVFPGRKGRRMWFNTVVGMHGKELSSATFADGSEIPADFVRRCGEIIEEESIQFRWEKGDVLILDNLATLHGRRPSLAPRRVLVATCK

SEQ ID NO: 15967 - DNA, 1498 bp, Triticum aestivum
  misc_feature (1)..(1498): Ceres Seq. ID no. 14302388
gtacgctgccacgccagagcagagcagagcagaatccggtagccagatcgaacgccccaccctctctccctccctccctcgcccccttccgatcgagcccgtcgccatggcgccgccccgcgtcggcctgctcctcgccctcgccttgtgcctcgcgttcgcgcgcgcggacgcggccgtgagggagctcagggtcgggtactacgcgcagacgtgcccccgcgcggaggagatcgtgcggcgcgtcatggcccgcgcgctcgcgcgcgaggcccgcagcgtcgcctccgtcatgcgcctccagttccacgactgcttcgtcaacggatgcgacgggtcggtgctgatggacgcgacgccgacgatggcgggggagaaggaggcgctctccaacatcaactccctccgctccttcgaggtcgtggacgaggtcaagagcgccctggaggagcagtgccccggcgtcgtctcctgcgccgacatcatcatcatggccgcccgcgacgccgtcgtgctgactggtggacccaactgggacgtgaggctcgggcgcgaggacagtctgacggcgagccaggaggactcggacaacatcatgccgagcccgcgcgccaacgcgagcgcgctcatccgcctcttcgccggctacaagctcaccgtcaccgacctcgtcgcgctctccggctcgcactccatcggcgaggcccgctgcttctccatcgtcttccgcctctacaaccagtcgggctccggccgccccgacccccacatggacccggcctaccgccaggcgctcgacgcgctctgccccctcaccggcgaccagaacgtcaccggcggcctggacgctaccccggtcgtcttcgacaaccagtacttcaaggacctggtccacctccgcggattcctcaactccgaccagacgctcttctccgacaacgaggggacccggcgggtggtgacgcagttcagccagaaccaggacgccttcttcagggccttcatcgaggggatggtcaagctgggcgagctccagaaccccaggaagggggagatccggcgcaactgccgcgtcgccaacggcgggcggccgccgctggagaagcaggtcgcgccgttccgggtgctggacttctgaacctggttctacggtaggcctgtaggtgtctcacgggagctctggtgtgggagcgatccatatgcttgacataggtttggtcgtgtcgcagttctgtgcctacccaagaatggtttcaggtctggctactgcttattgctaattgttgaggaataatagagaaattgatgcctctggtactttgattgccaaaggctgcattaaggtttgcttctttgttgattctccaaagattagctagcgatagtgcaagatgcttacttagagagatggttacaagaacaaataatgattttaagagtcatagaactagcgcttaatgtttagtttggttttaaaactttgaaaatatgaaattgc

SEQ ID NO: 15968 - protein, 378 aa, Triticum aestivum
  peptide (1)..(378): Ceres Seq. ID no. 14302389
  misc_feature (79)..(326): Pfam Name: Pfam Description:  Peroxidase
  misc_feature (49)..(364): NCBI GI NO: 19698448 NR Description: gaiacol peroxidase [Gossypium hirsutum]
  misc_feature (41)..(367): NCBI GI NO: 15227200 NR Description: putative peroxidase [Arabidopsis thaliana]
  misc_feature (43)..(360): NCBI GI NO: 15234394 NR Description: peroxidase, putative [Arabidopsis thaliana]
  misc_feature (43)..(360): NCBI GI NO: 15224116 NR Description: peroxidase, putative [Arabidopsis thaliana]
  misc_feature (66)..(360): NCBI GI NO: 21537275 NR Description: putative peroxidase [Arabidopsis thaliana]
  misc_feature (41)..(360): NCBI GI NO: 15224114 NR Description: peroxidase, putative [Arabidopsis thaliana]
  misc_feature (43)..(360): NCBI GI NO: 1403134 NR Description: peroxidase [Arabidopsis thaliana]
  misc_feature (43)..(360): NCBI GI NO: 21593604 NR Description: peroxidase ATP N [Arabidopsis thaliana]
  misc_feature (43)..(360): NCBI GI NO: 18420061 NR Description: peroxidase, putative [Arabidopsis thaliana]
  misc_feature (44)..(360): NCBI GI NO: 1402918 NR Description: peroxidase [Arabidopsis thaliana]
YAATPEQSRAESGSQIERPTLSPSLPRPLPIEPVAMAPPRVGLLLALALCLAFARADAAVRELRVGYYAQTCPRAEEIVRRVMARALAREARSVASVMRLQFHDCFVNGCDGSVLMDATPTMAGEKEALSNINSLRSFEVVDEVKSALEEQCPGVVSCADIIIMAARDAVVLTGGPNWDVRLGREDSLTASQEDSDNIMPSPRANASALIRLFAGYKLTVTDLVALSGSHSIGEARCFSIVFRLYNQSGSGRPDPHMDPAYRQALDALCPLTGDQNVTGGLDATPVVFDNQYFKDLVHLRGFLNSDQTLFSDNEGTRRVVTQFSQNQDAFFRAFIEGMVKLGELQNPRKGEIRRNCRVANGGRPPLEKQVAPFRVLDF

SEQ ID NO: 15969 - protein, 343 aa, Triticum aestivum
  peptide (1)..(343): Ceres Seq. ID no. 14302390
  misc_feature (44)..(291): Pfam Name: Pfam Description:  Peroxidase
  misc_feature (14)..(329): NCBI GI NO: 19698448 NR Description: gaiacol peroxidase [Gossypium hirsutum]
  misc_feature (6)..(332): NCBI GI NO: 15227200 NR Description: putative peroxidase [Arabidopsis thaliana]
  misc_feature (8)..(325): NCBI GI NO: 15234394 NR Description: peroxidase, putative [Arabidopsis thaliana]
  misc_feature (8)..(325): NCBI GI NO: 15224116 NR Description: peroxidase, putative [Arabidopsis thaliana]
  misc_feature (31)..(325): NCBI GI NO: 21537275 NR Description: putative peroxidase [Arabidopsis thaliana]
  misc_feature (6)..(325): NCBI GI NO: 15224114 NR Description: peroxidase, putative [Arabidopsis thaliana]
  misc_feature (8)..(325): NCBI GI NO: 1403134 NR Description: peroxidase [Arabidopsis thaliana]
  misc_feature (8)..(325): NCBI GI NO: 21593604 NR Description: peroxidase ATP N [Arabidopsis thaliana]
  misc_feature (8)..(325): NCBI GI NO: 18420061 NR Description: peroxidase, putative [Arabidopsis thaliana]
  misc_feature (9)..(325): NCBI GI NO: 1402918 NR Description: peroxidase [Arabidopsis thaliana]
MAPPRVGLLLALALCLAFARADAAVRELRVGYYAQTCPRAEEIVRRVMARALAREARSVASVMRLQFHDCFVNGCDGSVLMDATPTMAGEKEALSNINSLRSFEVVDEVKSALEEQCPGVVSCADIIIMAARDAVVLTGGPNWDVRLGREDSLTASQEDSDNIMPSPRANASALIRLFAGYKLTVTDLVALSGSHSIGEARCFSIVFRLYNQSGSGRPDPHMDPAYRQALDALCPLTGDQNVTGGLDATPVVFDNQYFKDLVHLRGFLNSDQTLFSDNEGTRRVVTQFSQNQDAFFRAFIEGMVKLGELQNPRKGEIRRNCRVANGGRPPLEKQVAPFRVLDF

SEQ ID NO: 15970 - protein, 296 aa, Triticum aestivum
  peptide (1)..(296): Ceres Seq. ID no. 14302391
  misc_feature (1)..(244): Pfam Name: Pfam Description:  Peroxidase
  misc_feature (1)..(282): NCBI GI NO: 19698448 NR Description: gaiacol peroxidase [Gossypium hirsutum]
  misc_feature (1)..(285): NCBI GI NO: 15227200 NR Description: putative peroxidase [Arabidopsis thaliana]
  misc_feature (1)..(278): NCBI GI NO: 15234394 NR Description: peroxidase, putative [Arabidopsis thaliana]
  misc_feature (1)..(278): NCBI GI NO: 15224116 NR Description: peroxidase, putative [Arabidopsis thaliana]
  misc_feature (1)..(278): NCBI GI NO: 21537275 NR Description: putative peroxidase [Arabidopsis thaliana]
  misc_feature (1)..(278): NCBI GI NO: 15224114 NR Description: peroxidase, putative [Arabidopsis thaliana]
  misc_feature (1)..(278): NCBI GI NO: 1403134 NR Description: peroxidase [Arabidopsis thaliana]
  misc_feature (1)..(278): NCBI GI NO: 21593604 NR Description: peroxidase ATP N [Arabidopsis thaliana]
  misc_feature (1)..(278): NCBI GI NO: 18420061 NR Description: peroxidase, putative [Arabidopsis thaliana]
  misc_feature (1)..(278): NCBI GI NO: 1402918 NR Description: peroxidase [Arabidopsis thaliana]
MARALAREARSVASVMRLQFHDCFVNGCDGSVLMDATPTMAGEKEALSNINSLRSFEVVDEVKSALEEQCPGVVSCADIIIMAARDAVVLTGGPNWDVRLGREDSLTASQEDSDNIMPSPRANASALIRLFAGYKLTVTDLVALSGSHSIGEARCFSIVFRLYNQSGSGRPDPHMDPAYRQALDALCPLTGDQNVTGGLDATPVVFDNQYFKDLVHLRGFLNSDQTLFSDNEGTRRVVTQFSQNQDAFFRAFIEGMVKLGELQNPRKGEIRRNCRVANGGRPPLEKQVAPFRVLDF

SEQ ID NO: 15971 - DNA, 1124 bp, Triticum aestivum
  misc_feature (1)..(1124): Ceres Seq. ID no. 13496281
acagtcacaccgagcgagagagaaaataaagggggctcgtcgggctcgtgcagggtcgagagagaaaaaaaagagagagagctcgctcattcccattcccatcccatcccctcccctcgtcggagccgcgccgccgcccgccaatccgccgccgccgcccatgtcaaagacgccggggaagacgccgcggacgcccaggcggatcctggagtcctacaccatcaagggatccgacggcgtcatccgccctggggactctgtgctgatgaaggcgcccgacacatcaaagcctccgtatgtggccaagattgaggaaatcgaggcagcaggacctcggggcgcaaatgtcaaggttaaagtgcgctggtactaccgaccagaggagtctattggtgggcgcaggccattccatggcgaaaaggaggtgttcctctctgaccaccaagatgtgcagagtgctgacaccatagagtgcaagtgcaacgtttacagcttccgggactacaccaagctttctgctgtcaatcctgaggactatttttgccgcttcgagtacaagtcaatcacaggcagctttgtgcctgatcgcattgctgtgttttgtaagtgtgagatgccatacaaccctgatgatcttatgatccagtgtgaggaatgctctgattggtttcaccctgcttgtattggaaagaccatcaaagaagcaaagaaacttgagaattttacatgcgaaggttgtgttgctgaaaatggaaatggaaatggagtcaagaacgaaaattcccatgaatctactggtgaatcagatgagaagcaggtgcagtcgaagcggcgacggcggtgaaggcgaaggcgatctgggcggaagtcctccatctcttcacgcatgtgttgcggtggatgtacattgctgtttccagtttgatgtagaacgaacctgtattgagagtgtcttctagagtctggcaatcggccagtttgcgactttgcatatccatgtggacctaccagttagagggagtcatttttctctcttcttttttccatcccccttgtgttgacatggacaatggtgtgcttgaacgtcctttcttcattgactagaaaagaggatttcaactttc

SEQ ID NO: 15972 - protein, 280 aa, Triticum aestivum
  peptide (1)..(280): Ceres Seq. ID no. 15222984
  misc_feature (79)..(196): Pfam Name: Pfam Description:  BAH domain
  misc_feature (54)..(280): NCBI GI NO: 629783 NR Description: ES43 protein - barley
  misc_feature (63)..(280): NCBI GI NO: 33146914 NR Description: putative ES43 protein
  misc_feature (60)..(280): NCBI GI NO: 34897170 NR Description: putative DNA-binding protein
  misc_feature (66)..(280): NCBI GI NO: 37573088 NR Description: receptor like protein
  misc_feature (63)..(277): NCBI GI NO: 18420377 NR Description: ES43 like protein [Arabidopsis thaliana]
  misc_feature (63)..(277): NCBI GI NO: 21595796 NR Description: ES43 like protein [Arabidopsis thaliana]
  misc_feature (63)..(261): NCBI GI NO: 7484948 NR Description: ES43 protein homolog F19H22
  misc_feature (66)..(251): NCBI GI NO: 34904940 NR Description: OSJNBa0077M12.13
  misc_feature (84)..(271): NCBI GI NO: 11292613 NR Description: receptor like protein - Arabidopsis thaliana
  misc_feature (89)..(271): NCBI GI NO: 15234729 NR Description: receptor like protein (fragment)
QSHRAREKIKGARRARAGSREKKKRESSLIPIPIPSPPLVGAAPPPANPPPPPMSKTPGKTPRTPRRILESYTIKGSDGVIRPGDSVLMKAPDTSKPPYVAKIEEIEAAGPRGANVKVKVRWYYRPEESIGGRRPFHGEKEVFLSDHQDVQSADTIECKCNVYSFRDYTKLSAVNPEDYFCRFEYKSITGSFVPDRIAVFCKCEMPYNPDDLMIQCEECSDWFHPACIGKTIKEAKKLENFTCEGCVAENGNGNGVKNENSHESTGESDEKQVQSKRRRR

SEQ ID NO: 15973 - protein, 227 aa, Triticum aestivum
  peptide (1)..(227): Ceres Seq. ID no. 15222985
  misc_feature (26)..(143): Pfam Name: Pfam Description:  BAH domain
  misc_feature (1)..(227): NCBI GI NO: 629783 NR Description: ES43 protein - barley
  misc_feature (10)..(227): NCBI GI NO: 33146914 NR Description: putative ES43 protein
  misc_feature (7)..(227): NCBI GI NO: 34897170 NR Description: putative DNA-binding protein
  misc_feature (13)..(227): NCBI GI NO: 37573088 NR Description: receptor like protein
  misc_feature (10)..(224): NCBI GI NO: 18420377 NR Description: ES43 like protein [Arabidopsis thaliana]
  misc_feature (10)..(224): NCBI GI NO: 21595796 NR Description: ES43 like protein [Arabidopsis thaliana]
  misc_feature (10)..(208): NCBI GI NO: 7484948 NR Description: ES43 protein homolog F19H22
  misc_feature (13)..(198): NCBI GI NO: 34904940 NR Description: OSJNBa0077M12.13
  misc_feature (31)..(218): NCBI GI NO: 11292613 NR Description: receptor like protein - Arabidopsis thaliana
  misc_feature (36)..(218): NCBI GI NO: 15234729 NR Description: receptor like protein (fragment)
MSKTPGKTPRTPRRILESYTIKGSDGVIRPGDSVLMKAPDTSKPPYVAKIEEIEAAGPRGANVKVKVRWYYRPEESIGGRRPFHGEKEVFLSDHQDVQSADTIECKCNVYSFRDYTKLSAVNPEDYFCRFEYKSITGSFVPDRIAVFCKCEMPYNPDDLMIQCEECSDWFHPACIGKTIKEAKKLENFTCEGCVAENGNGNGVKNENSHESTGESDEKQVQSKRRRR

SEQ ID NO: 15974 - protein, 192 aa, Triticum aestivum
  peptide (1)..(192): Ceres Seq. ID no. 15222986
  misc_feature (1)..(108): Pfam Name: Pfam Description:  BAH domain
  misc_feature (1)..(192): NCBI GI NO: 629783 NR Description: ES43 protein - barley
  misc_feature (1)..(192): NCBI GI NO: 33146914 NR Description: putative ES43 protein
  misc_feature (1)..(192): NCBI GI NO: 34897170 NR Description: putative DNA-binding protein
  misc_feature (1)..(192): NCBI GI NO: 37573088 NR Description: receptor like protein
  misc_feature (1)..(189): NCBI GI NO: 18420377 NR Description: ES43 like protein [Arabidopsis thaliana]
  misc_feature (1)..(189): NCBI GI NO: 21595796 NR Description: ES43 like protein [Arabidopsis thaliana]
  misc_feature (1)..(173): NCBI GI NO: 7484948 NR Description: ES43 protein homolog F19H22
  misc_feature (1)..(163): NCBI GI NO: 34904940 NR Description: OSJNBa0077M12.13
  misc_feature (1)..(183): NCBI GI NO: 11292613 NR Description: receptor like protein - Arabidopsis thaliana
  misc_feature (1)..(183): NCBI GI NO: 15234729 NR Description: receptor like protein (fragment)
MKAPDTSKPPYVAKIEEIEAAGPRGANVKVKVRWYYRPEESIGGRRPFHGEKEVFLSDHQDVQSADTIECKCNVYSFRDYTKLSAVNPEDYFCRFEYKSITGSFVPDRIAVFCKCEMPYNPDDLMIQCEECSDWFHPACIGKTIKEAKKLENFTCEGCVAENGNGNGVKNENSHESTGESDEKQVQSKRRRR

SEQ ID NO: 15975 - DNA, 981 bp, Triticum aestivum
  misc_feature (1)..(981): Ceres Seq. ID no. 13546266
tatctcataatatggcactgttcaatggcaatcacatccgtgttgacatggcgtgtccacctcgtaaaaagctaagaggagaaggacctctttatgacagaaagaggacagtgtttgttggtaaccttccattcgatgtaaaggatgaggagctctaccagctgttctgcggtcccagtggaccacaaggtgatgttgaagctatacgagttgtcagagatccagattcaagcctaggaaagggtatcgcctatgttctattcaaaacaagggaaggcgctaactctgttgtcaaaaaacgtggccttaagatcagagatcgcgttttgaggctcacccatgcaaaggcagccgatgcgacgccgaagaaggcagattctgggaaaaagcgcggcactccaaaacagacacctttcacgccaggcagcaagtcccgcgaaggcagcgacagcaacaaacgcaaggcgccggcaagcctgtcttaccaaggcctgaagtcgaccaaatctggcgtcgtgaagaaggtgaaggtggcccggcgccccgtcaaccaaggcaagcagcaaggcaggcctagcgagacgggacaaagcgagagcgcccgcaaagccaagcggcccgccgtggcagccaggaaggcgaagcagctgaacaagaaacgcaagcaggacggctcgacgcccgagaacacgcaccggagcaagaaggcgaggaagtagccgtccgtccctgtcgtggatcgttcgcttcactttgtaatgggagtgttgagagttttggacaagatgaggtcctggtgatagctgccttgggttgaacgaggaagaaaatacgaggttgatgttgctgatgtaatgctgggaagtgtcgagtgtagtcatttggtacttgcctttggagtcgtagcccctgtactaatgtcaaaatgatgctcatctatgcaacatcatgtactgacaccatttttgcgttgcttgttct

SEQ ID NO: 15976 - protein, 238 aa, Triticum aestivum
  peptide (1)..(238): Ceres Seq. ID no. 13546267
  misc_feature (37)..(111): Pfam Name: a.k.a. RRM, RBD, or RNP domain Pfam Description: RNA recognition motif.
  misc_feature (1)..(238): NCBI GI NO: 29126350 NR Description: unknown protein
  misc_feature (1)..(238): NCBI GI NO: 15237960 NR Description: RNA recognition motif (RRM)-containing protein
  misc_feature (1)..(238): NCBI GI NO: 21554835 NR Description: unknown [Arabidopsis thaliana]
  misc_feature (1)..(214): NCBI GI NO: 19115130 NR Description: putative RNA-binding protein
  misc_feature (3)..(221): NCBI GI NO: 6324532 NR Description: Nucleolar Protein
  misc_feature (31)..(180): NCBI GI NO: 39593884 NR Description: Hypothetical protein CBG06224
  misc_feature (2)..(180): NCBI GI NO: 17539754 NR Description: RNA recognition motif containing protein (43.9 kD)
  misc_feature (2)..(112): NCBI GI NO: 7498869 NR Description: hypothetical protein F11A10
SHNMALFNGNHIRVDMACPPRKKLRGEGPLYDRKRTVFVGNLPFDVKDEELYQLFCGPSGPQGDVEAIRVVRDPDSSLGKGIAYVLFKTREGANSVVKKRGLKIRDRVLRLTHAKAADATPKKADSGKKRGTPKQTPFTPGSKSREGSDSNKRKAPASLSYQGLKSTKSGVVKKVKVARRPVNQGKQQGRPSETGQSESARKAKRPAVAARKAKQLNKKRKQDGSTPENTHRSKKARK

SEQ ID NO: 15977 - protein, 235 aa, Triticum aestivum
  peptide (1)..(235): Ceres Seq. ID no. 13546268
  misc_feature (34)..(108): Pfam Name: a.k.a. RRM, RBD, or RNP domain Pfam Description: RNA recognition motif.
  misc_feature (1)..(235): NCBI GI NO: 29126350 NR Description: unknown protein
  misc_feature (1)..(235): NCBI GI NO: 15237960 NR Description: RNA recognition motif (RRM)-containing protein
  misc_feature (1)..(235): NCBI GI NO: 21554835 NR Description: unknown [Arabidopsis thaliana]
  misc_feature (1)..(211): NCBI GI NO: 19115130 NR Description: putative RNA-binding protein
  misc_feature (1)..(218): NCBI GI NO: 6324532 NR Description: Nucleolar Protein
  misc_feature (28)..(177): NCBI GI NO: 39593884 NR Description: Hypothetical protein CBG06224
  misc_feature (1)..(177): NCBI GI NO: 17539754 NR Description: RNA recognition motif containing protein (43.9 kD)
  misc_feature (1)..(109): NCBI GI NO: 7498869 NR Description: hypothetical protein F11A10
MALFNGNHIRVDMACPPRKKLRGEGPLYDRKRTVFVGNLPFDVKDEELYQLFCGPSGPQGDVEAIRVVRDPDSSLGKGIAYVLFKTREGANSVVKKRGLKIRDRVLRLTHAKAADATPKKADSGKKRGTPKQTPFTPGSKSREGSDSNKRKAPASLSYQGLKSTKSGVVKKVKVARRPVNQGKQQGRPSETGQSESARKAKRPAVAARKAKQLNKKRKQDGSTPENTHRSKKARK

SEQ ID NO: 15978 - protein, 223 aa, Triticum aestivum
  peptide (1)..(223): Ceres Seq. ID no. 13546269
  misc_feature (22)..(96): Pfam Name: a.k.a. RRM, RBD, or RNP domain Pfam Description: RNA recognition motif.
  misc_feature (1)..(223): NCBI GI NO: 29126350 NR Description: unknown protein
  misc_feature (1)..(223): NCBI GI NO: 15237960 NR Description: RNA recognition motif (RRM)-containing protein
  misc_feature (1)..(223): NCBI GI NO: 21554835 NR Description: unknown [Arabidopsis thaliana]
  misc_feature (1)..(199): NCBI GI NO: 19115130 NR Description: putative RNA-binding protein
  misc_feature (1)..(206): NCBI GI NO: 6324532 NR Description: Nucleolar Protein
  misc_feature (16)..(165): NCBI GI NO: 39593884 NR Description: Hypothetical protein CBG06224
  misc_feature (1)..(165): NCBI GI NO: 17539754 NR Description: RNA recognition motif containing protein (43.9 kD)
  misc_feature (1)..(97): NCBI GI NO: 7498869 NR Description: hypothetical protein F11A10
MACPPRKKLRGEGPLYDRKRTVFVGNLPFDVKDEELYQLFCGPSGPQGDVEAIRVVRDPDSSLGKGIAYVLFKTREGANSVVKKRGLKIRDRVLRLTHAKAADATPKKADSGKKRGTPKQTPFTPGSKSREGSDSNKRKAPASLSYQGLKSTKSGVVKKVKVARRPVNQGKQQGRPSETGQSESARKAKRPAVAARKAKQLNKKRKQDGSTPENTHRSKKARK

SEQ ID NO: 15979 - DNA, 1396 bp, Triticum aestivum
  misc_feature (1)..(1396): Ceres Seq. ID no. 14301514
gttgattaccaaagactagtcctggtgttgccgcttttcactttccccctcccccctctcatcggatctggactctggagaggagacgagattcgccggcgatggcagaggagtcgtgggaggagggtcgggggttggacttcctcgagagcctgggcccggacatctccgccaccgtcttcagcctgctcgacgaccccgccgacctcgcgcgcgccaccaccgtctcccgctcctggcgccgattcgttattgcaaaccagttcagcaagatcctgtgcctgcgggtttatccggaggtgtccaacttcacacgtgttgagttgagcagcatcagcagtgcacaccgaaatgctggatcaagtgcttgtgctgggctggagaagctcgggagggatcatagggtgtatatgcatcttagccatggccttctctcgccgtacgaccccaaggattgcatcagtcactgcatgggcgcatccagcactgatcgtttccctgaggaggccatagaaaataccattgaaccggttgatcgtcaggagagtaaactgtcttattggtcgagtggtggccagaaagatcctgctgtgccagaatgcctgatatatagccttcagtcagagctgtgtcttgttgatgaaatcaggatacggccattaaaagcattttttcgatatggtcatccgatatattcagcaaaacacgtccggttccgcttgggctatctaaaaccaccccactggtctgaaacacatgtatatgttgaaagtgatgcggagctgattgatgatagcaactatatctggacgtacacatctccagaatttccaatgctacaggaaaatgtgatgcagtcttttaagctaccacactcagttctatgtattggtggagtggtgaagattgagcttcttggcagggtccacaaggacacgtttgatggtcggtactacatatgtgtgtctcatgtccaactagtcgggaagccactgtcagaagattttggggtcgccccgagcaaaaatgatgtagttctcagttactatctggattatcgtagattcgggggacgatcacagcaaagtacatgactttgcgatgaggatctggcacttcggtatgtcttgagggataggagaactgaaccatgagtgttagcacgctgtcctgtgggtacataaaagagatgcaacagaggagaagcttccatacaagtgaagcatatctcgtcgagctcgtgtctatcggtttcgaataaaagaagtcctttgtgatcccgtgggaaactgaaaatgtatttgtttgtgtaactgacaaggacgaaagagacgcatgattgactcgcttgttataaaatcactgctaatattattaagatcgagtgagtccatct

SEQ ID NO: 15980 - protein, 330 aa, Triticum aestivum
  peptide (1)..(330): Ceres Seq. ID no. 14301515
  misc_feature (15)..(61): Pfam Name: Pfam Description:  F-box domain
  misc_feature (1)..(323): NCBI GI NO: 31193913 NR Description: unknown protein
  misc_feature (12)..(304): NCBI GI NO: 18411435 NR Description: F-box protein family [Arabidopsis thaliana]
  misc_feature (145)..(304): NCBI GI NO: 28393062 NR Description: putative F-box protein [Arabidopsis thaliana]
  misc_feature (50)..(218): NCBI GI NO: 7452420 NR Description: hypothetical protein A_TM018A10
  misc_feature (239)..(313): NCBI GI NO: 18308222 NR Description: unknown protein [Oryza sativa]
  misc_feature (101)..(209): NCBI GI NO: 28850404 NR Description: hypothetical protein [Dictyostelium discoideum]
  misc_feature (238)..(322): NCBI GI NO: 28850404 NR Description: hypothetical protein [Dictyostelium discoideum]
MAEESWEEGRGLDFLESLGPDISATVFSLLDDPADLARATTVSRSWRRFVIANQFSKILCLRVYPEVSNFTRVELSSISSAHRNAGSSACAGLEKLGRDHRVYMHLSHGLLSPYDPKDCISHCMGASSTDRFPEEAIENTIEPVDRQESKLSYWSSGGQKDPAVPECLIYSLQSELCLVDEIRIRPLKAFFRYGHPIYSAKHVRFRLGYLKPPHWSETHVYVESDAELIDDSNYIWTYTSPEFPMLQENVMQSFKLPHSVLCIGGVVKIELLGRVHKDTFDGRYYICVSHVQLVGKPLSEDFGVAPSKNDVVLSYYLDYRRFGGRSQQST

SEQ ID NO: 15981 - protein, 227 aa, Triticum aestivum
  peptide (1)..(227): Ceres Seq. ID no. 14301516
  misc_feature (1)..(220): NCBI GI NO: 31193913 NR Description: unknown protein
  misc_feature (1)..(201): NCBI GI NO: 18411435 NR Description: F-box protein family [Arabidopsis thaliana]
  misc_feature (42)..(201): NCBI GI NO: 28393062 NR Description: putative F-box protein [Arabidopsis thaliana]
  misc_feature (1)..(115): NCBI GI NO: 7452420 NR Description: hypothetical protein A_TM018A10
  misc_feature (136)..(210): NCBI GI NO: 18308222 NR Description: unknown protein [Oryza sativa]
  misc_feature (1)..(106): NCBI GI NO: 28850404 NR Description: hypothetical protein [Dictyostelium discoideum]
  misc_feature (135)..(219): NCBI GI NO: 28850404 NR Description: hypothetical protein [Dictyostelium discoideum]
MHLSHGLLSPYDPKDCISHCMGASSTDRFPEEAIENTIEPVDRQESKLSYWSSGGQKDPAVPECLIYSLQSELCLVDEIRIRPLKAFFRYGHPIYSAKHVRFRLGYLKPPHWSETHVYVESDAELIDDSNYIWTYTSPEFPMLQENVMQSFKLPHSVLCIGGVVKIELLGRVHKDTFDGRYYICVSHVQLVGKPLSEDFGVAPSKNDVVLSYYLDYRRFGGRSQQST

SEQ ID NO: 15982 - protein, 207 aa, Triticum aestivum
  peptide (1)..(207): Ceres Seq. ID no. 14301517
  misc_feature (1)..(200): NCBI GI NO: 31193913 NR Description: unknown protein
  misc_feature (1)..(181): NCBI GI NO: 18411435 NR Description: F-box protein family [Arabidopsis thaliana]
  misc_feature (22)..(181): NCBI GI NO: 28393062 NR Description: putative F-box protein [Arabidopsis thaliana]
  misc_feature (1)..(95): NCBI GI NO: 7452420 NR Description: hypothetical protein A_TM018A10
  misc_feature (116)..(190): NCBI GI NO: 18308222 NR Description: unknown protein [Oryza sativa]
  misc_feature (1)..(86): NCBI GI NO: 28850404 NR Description: hypothetical protein [Dictyostelium discoideum]
  misc_feature (115)..(199): NCBI GI NO: 28850404 NR Description: hypothetical protein [Dictyostelium discoideum]
MGASSTDRFPEEAIENTIEPVDRQESKLSYWSSGGQKDPAVPECLIYSLQSELCLVDEIRIRPLKAFFRYGHPIYSAKHVRFRLGYLKPPHWSETHVYVESDAELIDDSNYIWTYTSPEFPMLQENVMQSFKLPHSVLCIGGVVKIELLGRVHKDTFDGRYYICVSHVQLVGKPLSEDFGVAPSKNDVVLSYYLDYRRFGGRSQQST

SEQ ID NO: 15983 - DNA, 1282 bp, Triticum aestivum
  misc_feature (1)..(1282): Ceres Seq. ID no. 14301595
actctctgcaaagaaagttcacgtatgtcacgcgttgatgatattctgagaaactgcatgcagctggtggatttgaggctgaaagatttaagttgtcgccaacctgcttttcatatctttggtcctaactcaaagttaaagagtctgcaattggacaactacaacactgtgggtgtctacctgggtttggtgccttatcttgaaacatttgcttgtcgtggtcagccaactatactacactatggcttggtgcctcggcttaggcatgtgagtttgaacttcttgcaaactggagatgacggcaagaatgattcctctggtagcaacaggacatatcgactaagcaaattctttttaggggcgccgccaccgctagagtgccttgttctgcagttaagagggcgtcaggtaagtagcttttcctgaaatgatctctttcatattggtcatgacattgcatcagtaagacagtactaaattatcacttcatttatgcagatgtggatggaactaaccgccattcccgaccagctcagtcatctcaagaaactattcattgcaaacgtgccaatgaactgggatacattctggattctccacctacttgctgccgcacctgccttggagtcgctccatgttcattttgacaacaactcagagaaggcgggtgccacaggatcaccagatgtgcaagtggaacaccatcagcgctactatcacctgaaagaactcgtggtcatcggcttcggcggggcggcgtggcagacaggctttgtgaagcagatcatccaggcatcgccgatcctggagcgcgtccgcctgctggacgggcacgtcgtggaggacgaagatcgggagctcgtcggcctggacattgtgcgccgccgccgggagtggcacgagtgcgagagatcggaggtgctcgacgaactgacggacgggatcagttcgccgcatctcgagatagttctggaatgactttcggcagaagtgttgctgtgccggcggtggccttccgttctgtagggcttgcagctgtatgccatggcctaatgattatgtgttatgctggctctcaagatagatcaacatgtgtttgtatcgggtatcttgcgctttacttttgctcgattatccaaaggacggatgtagctagctgttgagatgattgattccgtggtgctcatggtgtggcttgactaggcaaaattaccacttgcacgcgcctaaaagatattttcctttcctttctgatagaagcaaaaagatctgcggcatcccc

SEQ ID NO: 15984 - protein, 161 aa, Triticum aestivum
  peptide (1)..(161): Ceres Seq. ID no. 14301596
  misc_feature (2)..(160): NCBI GI NO: 15451608 NR Description: Putative retroelement [Oryza sativa]
  misc_feature (2)..(161): NCBI GI NO: 21397271 NR Description: Putative plant disease resistance polyprotein
  misc_feature (1)..(121): NCBI GI NO: 15451608 NR Description: Putative retroelement [Oryza sativa]
  misc_feature (4)..(116): NCBI GI NO: 21743052 NR Description: OSJNBa0083D01.2
  misc_feature (4)..(161): NCBI GI NO: 38346115 NR Description: OSJNBb0006N15.10
  misc_feature (1)..(115): NCBI GI NO: 32526680 NR Description: plant disease resistance polyprotein -like protein
  misc_feature (1)..(104): NCBI GI NO: 21743054 NR Description: OSJNBa0083D01.4
MQMWMELTAIPDQLSHLKKLFIANVPMNWDTFWILHLLAAAPALESLHVHFDNNSEKAGATGSPDVQVEHHQRYYHLKELVVIGFGGAAWQTGFVKQIIQASPILERVRLLDGHVVEDEDRELVGLDIVRRRREWHECERSEVLDELTDGISSPHLEIVLE

SEQ ID NO: 15985 - protein, 159 aa, Triticum aestivum
  peptide (1)..(159): Ceres Seq. ID no. 14301597
  misc_feature (1)..(158): NCBI GI NO: 15451608 NR Description: Putative retroelement [Oryza sativa]
  misc_feature (1)..(159): NCBI GI NO: 21397271 NR Description: Putative plant disease resistance polyprotein
  misc_feature (1)..(119): NCBI GI NO: 15451608 NR Description: Putative retroelement [Oryza sativa]
  misc_feature (2)..(114): NCBI GI NO: 21743052 NR Description: OSJNBa0083D01.2
  misc_feature (2)..(159): NCBI GI NO: 38346115 NR Description: OSJNBb0006N15.10
  misc_feature (1)..(113): NCBI GI NO: 32526680 NR Description: plant disease resistance polyprotein -like protein
  misc_feature (1)..(102): NCBI GI NO: 21743054 NR Description: OSJNBa0083D01.4
MWMELTAIPDQLSHLKKLFIANVPMNWDTFWILHLLAAAPALESLHVHFDNNSEKAGATGSPDVQVEHHQRYYHLKELVVIGFGGAAWQTGFVKQIIQASPILERVRLLDGHVVEDEDRELVGLDIVRRRREWHECERSEVLDELTDGISSPHLEIVLE

SEQ ID NO: 15986 - protein, 157 aa, Triticum aestivum
  peptide (1)..(157): Ceres Seq. ID no. 14301598
  misc_feature (1)..(156): NCBI GI NO: 15451608 NR Description: Putative retroelement [Oryza sativa]
  misc_feature (1)..(157): NCBI GI NO: 21397271 NR Description: Putative plant disease resistance polyprotein
  misc_feature (1)..(117): NCBI GI NO: 15451608 NR Description: Putative retroelement [Oryza sativa]
  misc_feature (1)..(112): NCBI GI NO: 21743052 NR Description: OSJNBa0083D01.2
  misc_feature (1)..(157): NCBI GI NO: 38346115 NR Description: OSJNBb0006N15.10
  misc_feature (1)..(111): NCBI GI NO: 32526680 NR Description: plant disease resistance polyprotein -like protein
  misc_feature (1)..(100): NCBI GI NO: 21743054 NR Description: OSJNBa0083D01.4
MELTAIPDQLSHLKKLFIANVPMNWDTFWILHLLAAAPALESLHVHFDNNSEKAGATGSPDVQVEHHQRYYHLKELVVIGFGGAAWQTGFVKQIIQASPILERVRLLDGHVVEDEDRELVGLDIVRRRREWHECERSEVLDELTDGISSPHLEIVLE

SEQ ID NO: 15987 - DNA, 1311 bp, Triticum aestivum
  misc_feature (1)..(1311): Ceres Seq. ID no. 15170183
aacatccaaatcgaaaaacagtagagagtatggctcgtggcgcccctctgcttgcagcagcagtggtagctgttgtggcacttgggtctgtaggggcgacagagcaggaggccgccggcttgaggcagcctccggtggcgcagggcctgtcgttcgagttctaccggcagagctgccccagggcagagtccatcgtgcgtgacttcgtccgggacgccgtccgcaaggacatcggcctcgccgccggcctgctccgcctccacttccacgattgcttcgtgcagggctgcgacgcgtcggtgcttctggacgggtcggccacggggccgggggagcagcaggcgccacccaacctcacgctccgcccgtccgccttcaaggccgtcaacgacatccgggaccggctggagcgtgagtgccgcggcgccgtcgtctcctgctccgacatcctggccctcgccgcccgcgactcggtggtcgcctcgggcgggccggagtaccgcgtgcccctcggccgccgcgacagccccaggttcgccacggcacaggacgtgctgtccggtcttcccccgccgtcctcgaacgtgccgtccctcctcgatgtgctccgggagatcggcctcgacgccaccgacctcgtcgcgctctccggcggccacaccgtggggctcgggcactgcacctccttcgacgaccgcctcttccctcgcccggaccccaccatgagcccggacttccttggcaggctgaaacgaacgtgtccatccaagggcaccgacgcgcgcacagtgctggacgtgcgcaccccaaacgtgttcgacaacaagtactacgtgaacctggtgaaccgggaggggctcttcgtgtccgaccaggacctcttcacgaacgccaccacccggcccatcgtggagcgcttcgcgcgcagccagcgtgacttcttcgaccagttcggcgtatccatggtcaagatgggccagatcaaggtgctcactggcgaccagggccaggttcgccgcaactgctccgctcgcaaccccgggactgctgacgggctccagtggtcgtccctggtgcagaccgtcgtcgacgccacccggagagcctcggtttgtaaatctatggtcgacaagtctatgtagtgtgtactgtacctggactagtagctgttagccatgcatgtggtaataaaaactgagcagggcaacccatggtcgacgaggctgtgtacgtacctgtgtaatgtaccttgtcgtgactcaaacgtgtgctaggctgctagctagcagacctacggtgaccagttagttt

SEQ ID NO: 15988 - protein, 379 aa, Triticum aestivum
  peptide (1)..(379): Ceres Seq. ID no. 15170184
  misc_feature (65)..(309): Pfam Name: Pfam Description:  Peroxidase
  misc_feature (10)..(364): NCBI GI NO: 22001285 NR Description: peroxidase 1 [Triticum aestivum]
  misc_feature (10)..(363): NCBI GI NO: 82410 NR Description: peroxidase (EC 1.11.1.7) BP1 precursor - barley
  misc_feature (42)..(347): NCBI GI NO: 2624498 NR Description: Crystal Structure Of Barley Grain Peroxidase 1
  misc_feature (16)..(357): NCBI GI NO: 34905838 NR Description: putative peroxidase
  misc_feature (10)..(364): NCBI GI NO: 421984 NR Description: peroxidase (EC 1.11.1.7) BP-2B - barley
  misc_feature (10)..(351): NCBI GI NO: 100603 NR Description: peroxidase (EC 1.11.1.7) BP-2A precursor - barley
  misc_feature (10)..(364): NCBI GI NO: 34905826 NR Description: putative peroxidase
  misc_feature (46)..(345): NCBI GI NO: 5777624 NR Description: CAA303712.1 protein [Oryza sativa]
  misc_feature (13)..(345): NCBI GI NO: 39545735 NR Description: OSJNBa0071I13.13
  misc_feature (40)..(345): NCBI GI NO: 39546236 NR Description: OSJNBa0089N06.6
HPNRKTVESMARGAPLLAAAVVAVVALGSVGATEQEAAGLRQPPVAQGLSFEFYRQSCPRAESIVRDFVRDAVRKDIGLAAGLLRLHFHDCFVQGCDASVLLDGSATGPGEQQAPPNLTLRPSAFKAVNDIRDRLERECRGAVVSCSDILALAARDSVVASGGPEYRVPLGRRDSPRFATAQDVLSGLPPPSSNVPSLLDVLREIGLDATDLVALSGGHTVGLGHCTSFDDRLFPRPDPTMSPDFLGRLKRTCPSKGTDARTVLDVRTPNVFDNKYYVNLVNREGLFVSDQDLFTNATTRPIVERFARSQRDFFDQFGVSMVKMGQIKVLTGDQGQVRRNCSARNPGTADGLQWSSLVQTVVDATRRASVCKSMVDKSM

SEQ ID NO: 15989 - protein, 370 aa, Triticum aestivum
  peptide (1)..(370): Ceres Seq. ID no. 15170185
  misc_feature (56)..(300): Pfam Name: Pfam Description:  Peroxidase
  misc_feature (1)..(355): NCBI GI NO: 22001285 NR Description: peroxidase 1 [Triticum aestivum]
  misc_feature (1)..(354): NCBI GI NO: 82410 NR Description: peroxidase (EC 1.11.1.7) BP1 precursor - barley
  misc_feature (33)..(338): NCBI GI NO: 2624498 NR Description: Crystal Structure Of Barley Grain Peroxidase 1
  misc_feature (7)..(348): NCBI GI NO: 34905838 NR Description: putative peroxidase
  misc_feature (1)..(355): NCBI GI NO: 421984 NR Description: peroxidase (EC 1.11.1.7) BP-2B - barley
  misc_feature (1)..(342): NCBI GI NO: 100603 NR Description: peroxidase (EC 1.11.1.7) BP-2A precursor - barley
  misc_feature (1)..(355): NCBI GI NO: 34905826 NR Description: putative peroxidase
  misc_feature (37)..(336): NCBI GI NO: 5777624 NR Description: CAA303712.1 protein [Oryza sativa]
  misc_feature (4)..(336): NCBI GI NO: 39545735 NR Description: OSJNBa0071I13.13
  misc_feature (31)..(336): NCBI GI NO: 39546236 NR Description: OSJNBa0089N06.6
MARGAPLLAAAVVAVVALGSVGATEQEAAGLRQPPVAQGLSFEFYRQSCPRAESIVRDFVRDAVRKDIGLAAGLLRLHFHDCFVQGCDASVLLDGSATGPGEQQAPPNLTLRPSAFKAVNDIRDRLERECRGAVVSCSDILALAARDSVVASGGPEYRVPLGRRDSPRFATAQDVLSGLPPPSSNVPSLLDVLREIGLDATDLVALSGGHTVGLGHCTSFDDRLFPRPDPTMSPDFLGRLKRTCPSKGTDARTVLDVRTPNVFDNKYYVNLVNREGLFVSDQDLFTNATTRPIVERFARSQRDFFDQFGVSMVKMGQIKVLTGDQGQVRRNCSARNPGTADGLQWSSLVQTVVDATRRASVCKSMVDKSM

SEQ ID NO: 15990 - DNA, 1346 bp, Triticum aestivum
  misc_feature (1)..(1346): Ceres Seq. ID no. 12780534
gcacgctttcccctcctccaagctttcccccaccggcctcccccgtctcctgcccccacccattcgccgctgaccccccttccagaaccttccagaagcgaacgagagagcccgcaggggcggcgcaggggcatggcgatggcgacgcacacgggggtcgccgcctccaaggtcctcatcctcgtcggcgcaggcctgacgggatcgatcgtgctccggaatggccgcttgtcggatgtattggcggagctccaggagctcatgaagggcgtaaatcaaggagaaggctcgagcgcctatgacatggctcttatccaagctcagattcggcatttagcccaagaagtcagagatttaactttgtcaaagcccattaccatattgagtggcaaatcggactcgggaggcagtttatcgtcctacatactgccagcagctgcagttggagcattaggttattgctatatgtggtgtaagggatggtccttgtcagatgtcatgtttgtcacaaaacgcaatatggccagtgctgtcgacagcatgtcgaagcaattggagcaagtttcatcagcactagcagcaaccaaaagacatttaacaaaacgccttgagaatttggatggcaaaatggacgaacaagtggaagtctccaaacaaatccggaatgaggtcactgatgttaaaactgacctgtcccaaattggctttgatgttgaagcaattcaacagatggtagctggactggaagagaagattgagttgcttgacaataaacaggatgcggctaatgctggtatatggtatctctgccgaatggcaggaggtataaaagagggaataaatgccaagtttttccaagaagcggatgaaaaactcaagctcttagaccttgctcaaactgaaaagaagccagtgaagggtctcgaattgtttctggagagcaccaaggaggtaaaggcactcgactccaagccaaagaccatcatgcagaacgacgtcaagaaaccgacgaaaacgttcgacgtgcccataaaaagcgctgcggtgcacaggtcaaacaggttcttaattcgtaaagaaggcctcgcgctgtgattgacgcggatcgcctcgtggtgtacattgcgttcttggttgctttgtttgatagaaaaaatatagaagaagaataacctgcatcccatgtggtgattttccaggatagacaggttgatacgtctgaaggcaatttgtattcgtttctttgtatttttgcgtcatttcatgtttggtctgaagttgttcgcttgtaaacaagtgacataaaggaataaataattaaaacacgtttcgcattcttacatcct

SEQ ID NO: 15991 - protein, 364 aa, Triticum aestivum
  peptide (1)..(364): Ceres Seq. ID no. 12780535
  misc_feature (47)..(352): NCBI GI NO: 18390460 NR Description: expressed protein; protein id: At1g04960
  misc_feature (47)..(318): NCBI GI NO: 18396143 NR Description: bZIP family transcription factor
  misc_feature (47)..(318): NCBI GI NO: 21537323 NR Description: unknown [Arabidopsis thaliana]
  misc_feature (47)..(318): NCBI GI NO: 25361065 NR Description: protein T7N9.6 [imported] - Arabidopsis thaliana
  misc_feature (47)..(300): NCBI GI NO: 15227027 NR Description: expressed protein; protein id: At2g02730
  misc_feature (47)..(300): NCBI GI NO: 7487252 NR Description: hypothetical protein At2g02730
  misc_feature (45)..(269): NCBI GI NO: 34906300 NR Description: unnamed protein product
  misc_feature (58)..(259): NCBI GI NO: 34894218 NR Description: P0439B06.30
  misc_feature (53)..(266): NCBI GI NO: 30688826 NR Description: expressed protein [Arabidopsis thaliana]
  misc_feature (57)..(266): NCBI GI NO: 22329773 NR Description: Expressed protein; protein id: At1g24265
ARFPLLQAFPHRPPPSPAPTHSPLTPLPEPSRSERESPQGRRRGMAMATHTGVAASKVLILVGAGLTGSIVLRNGRLSDVLAELQELMKGVNQGEGSSAYDMALIQAQIRHLAQEVRDLTLSKPITILSGKSDSGGSLSSYILPAAAVGALGYCYMWCKGWSLSDVMFVTKRNMASAVDSMSKQLEQVSSALAATKRHLTKRLENLDGKMDEQVEVSKQIRNEVTDVKTDLSQIGFDVEAIQQMVAGLEEKIELLDNKQDAANAGIWYLCRMAGGIKEGINAKFFQEADEKLKLLDLAQTEKKPVKGLELFLESTKEVKALDSKPKTIMQNDVKKPTKTFDVPIKSAAVHRSNRFLIRKEGLAL

SEQ ID NO: 15992 - protein, 320 aa, Triticum aestivum
  peptide (1)..(320): Ceres Seq. ID no. 12780536
  misc_feature (3)..(308): NCBI GI NO: 18390460 NR Description: expressed protein; protein id: At1g04960
  misc_feature (3)..(274): NCBI GI NO: 18396143 NR Description: bZIP family transcription factor
  misc_feature (3)..(274): NCBI GI NO: 21537323 NR Description: unknown [Arabidopsis thaliana]
  misc_feature (3)..(274): NCBI GI NO: 25361065 NR Description: protein T7N9.6 [imported] - Arabidopsis thaliana
  misc_feature (3)..(256): NCBI GI NO: 15227027 NR Description: expressed protein; protein id: At2g02730
  misc_feature (3)..(256): NCBI GI NO: 7487252 NR Description: hypothetical protein At2g02730
  misc_feature (1)..(225): NCBI GI NO: 34906300 NR Description: unnamed protein product
  misc_feature (14)..(215): NCBI GI NO: 34894218 NR Description: P0439B06.30
  misc_feature (9)..(222): NCBI GI NO: 30688826 NR Description: expressed protein [Arabidopsis thaliana]
  misc_feature (13)..(222): NCBI GI NO: 22329773 NR Description: Expressed protein; protein id: At1g24265
MAMATHTGVAASKVLILVGAGLTGSIVLRNGRLSDVLAELQELMKGVNQGEGSSAYDMALIQAQIRHLAQEVRDLTLSKPITILSGKSDSGGSLSSYILPAAAVGALGYCYMWCKGWSLSDVMFVTKRNMASAVDSMSKQLEQVSSALAATKRHLTKRLENLDGKMDEQVEVSKQIRNEVTDVKTDLSQIGFDVEAIQQMVAGLEEKIELLDNKQDAANAGIWYLCRMAGGIKEGINAKFFQEADEKLKLLDLAQTEKKPVKGLELFLESTKEVKALDSKPKTIMQNDVKKPTKTFDVPIKSAAVHRSNRFLIRKEGLAL

SEQ ID NO: 15993 - protein, 318 aa, Triticum aestivum
  peptide (1)..(318): Ceres Seq. ID no. 12780537
  misc_feature (1)..(306): NCBI GI NO: 18390460 NR Description: expressed protein; protein id: At1g04960
  misc_feature (1)..(272): NCBI GI NO: 18396143 NR Description: bZIP family transcription factor
  misc_feature (1)..(272): NCBI GI NO: 21537323 NR Description: unknown [Arabidopsis thaliana]
  misc_feature (1)..(272): NCBI GI NO: 25361065 NR Description: protein T7N9.6 [imported] - Arabidopsis thaliana
  misc_feature (1)..(254): NCBI GI NO: 15227027 NR Description: expressed protein; protein id: At2g02730
  misc_feature (1)..(254): NCBI GI NO: 7487252 NR Description: hypothetical protein At2g02730
  misc_feature (1)..(223): NCBI GI NO: 34906300 NR Description: unnamed protein product
  misc_feature (12)..(213): NCBI GI NO: 34894218 NR Description: P0439B06.30
  misc_feature (7)..(220): NCBI GI NO: 30688826 NR Description: expressed protein [Arabidopsis thaliana]
  misc_feature (11)..(220): NCBI GI NO: 22329773 NR Description: Expressed protein; protein id: At1g24265
MATHTGVAASKVLILVGAGLTGSIVLRNGRLSDVLAELQELMKGVNQGEGSSAYDMALIQAQIRHLAQEVRDLTLSKPITILSGKSDSGGSLSSYILPAAAVGALGYCYMWCKGWSLSDVMFVTKRNMASAVDSMSKQLEQVSSALAATKRHLTKRLENLDGKMDEQVEVSKQIRNEVTDVKTDLSQIGFDVEAIQQMVAGLEEKIELLDNKQDAANAGIWYLCRMAGGIKEGINAKFFQEADEKLKLLDLAQTEKKPVKGLELFLESTKEVKALDSKPKTIMQNDVKKPTKTFDVPIKSAAVHRSNRFLIRKEGLAL

SEQ ID NO: 15994 - DNA, 1263 bp, Triticum aestivum
  misc_feature (1)..(1263): Ceres Seq. ID no. 12780542
gaagaatcgctcctcccttcacgccgtcacgccgccactcacctgccgccgacagcccgccactcgcctcgacggccgtcgcccgtcgcgggtccccgaccgtactccccgccgccccctctccccctcctacatcgtcgccgccgtttcctcagttgctccccccgaccccccacacccccaaagccccctctgtactaccccgcccctcctctccattccttcgggtagcccaacgccgaccatgggtttcgcgcagctcgtcatcggccccgccggcagcggcaagtcgacctactgctctggtctgtatcaacattgcgagacggtgggcaggaggattcatatggtcaacctggatccagctgcagagcacttcagctatcccgtatctactgacattagagagctcatatcactggatgatgtcatggaggagcttgggatgggaccaaatggcggcctcatctattgcatggagcaccttgaagacaatttggatgattggttggatgaacaattggagaactacttggatgatgactatcttgtgtttgattgtccaggccagattgaactcttcactcatgttccagttctgcgtaactttgttgagtatctgaaacggaaaaatttcactgtttgcgctgtgtaccttttggattcgcagtttgtcagtgatgtcacaaaatacattagcggttgcatggcttctctttctgctatgattcaacttgagcttcctcatatcaacatcctttcaaagatggacctggtttccaataaaaaagatgtagaagactatctgaaccctgaggcacaggttcttctgtcacagctgaatcggcagatggcacctcggtttcacaagttaaacaaggctttagctgaactggttgatgattacaacatggtgaatttcataccacttgatttgaggaaggagagcagcattcagtatgtgctgtcaaacatcgacaactgcatccagtacggggaagacgccgatgtgaaggttagggacttcattcccgaggaggatgattaaccattttgatcgagcagaagcaacaaattagccagtatcatgtagaatgggtccatgggaggaggaattcaccgcacatggtagtatctgtttcaatcaatcattggtcgaaaaaacaagacataatgcatctgcgaagagtgtgtgggtcaccttctttcttatgcgtgtggttgactagcaattgcttgtgtaaacaaaccatcatcctcttc

SEQ ID NO: 15995 - protein, 348 aa, Triticum aestivum
  peptide (1)..(348): Ceres Seq. ID no. 12780543
  misc_feature (88)..(331): Pfam Name: Pfam Description:  Conserved hypothetical ATP binding protein
  misc_feature (82)..(347): NCBI GI NO: 18071342 NR Description: putative ATP(GTP)-binding protein
  misc_feature (82)..(348): NCBI GI NO: 18413871 NR Description: putative protein; protein id: At4g12790
  misc_feature (161)..(348): NCBI GI NO: 7487264 NR Description: hypothetical protein T20K18
  misc_feature (82)..(176): NCBI GI NO: 7487264 NR Description: hypothetical protein T20K18
  misc_feature (84)..(346): NCBI GI NO: 37606123 NR Description: SI:zK83D9
  misc_feature (84)..(338): NCBI GI NO: 34872358 NR Description: similar to RIKEN cDNA A930018B01
  misc_feature (84)..(338): NCBI GI NO: 21312642 NR Description: RIKEN cDNA A930018B01 [Mus musculus]
  misc_feature (84)..(338): NCBI GI NO: 21410245 NR Description: protein x 0004 [Homo sapiens]
  misc_feature (84)..(338): NCBI GI NO: 21361523 NR Description: protein x 0004 [Homo sapiens]
  misc_feature (87)..(338): NCBI GI NO: 6323272 NR Description: Protein required for cell viability; Ylr243wp
KNRSSLHAVTPPLTCRRQPATRLDGRRPSRVPDRTPRRPLSPSYIVAAVSSVAPPDPPHPQSPLCTTPPLLSIPSGSPTPTMGFAQLVIGPAGSGKSTYCSGLYQHCETVGRRIHMVNLDPAAEHFSYPVSTDIRELISLDDVMEELGMGPNGGLIYCMEHLEDNLDDWLDEQLENYLDDDYLVFDCPGQIELFTHVPVLRNFVEYLKRKNFTVCAVYLLDSQFVSDVTKYISGCMASLSAMIQLELPHINILSKMDLVSNKKDVEDYLNPEAQVLLSQLNRQMAPRFHKLNKALAELVDDYNMVNFIPLDLRKESSIQYVLSNIDNCIQYGEDADVKVRDFIPEEDD

SEQ ID NO: 15996 - protein, 267 aa, Triticum aestivum
  peptide (1)..(267): Ceres Seq. ID no. 12780544
  misc_feature (7)..(250): Pfam Name: Pfam Description:  Conserved hypothetical ATP binding protein
  misc_feature (1)..(266): NCBI GI NO: 18071342 NR Description: putative ATP(GTP)-binding protein
  misc_feature (1)..(267): NCBI GI NO: 18413871 NR Description: putative protein; protein id: At4g12790
  misc_feature (80)..(267): NCBI GI NO: 7487264 NR Description: hypothetical protein T20K18
  misc_feature (1)..(95): NCBI GI NO: 7487264 NR Description: hypothetical protein T20K18
  misc_feature (3)..(265): NCBI GI NO: 37606123 NR Description: SI:zK83D9
  misc_feature (3)..(257): NCBI GI NO: 34872358 NR Description: similar to RIKEN cDNA A930018B01
  misc_feature (3)..(257): NCBI GI NO: 21312642 NR Description: RIKEN cDNA A930018B01 [Mus musculus]
  misc_feature (3)..(257): NCBI GI NO: 21410245 NR Description: protein x 0004 [Homo sapiens]
  misc_feature (3)..(257): NCBI GI NO: 21361523 NR Description: protein x 0004 [Homo sapiens]
  misc_feature (6)..(257): NCBI GI NO: 6323272 NR Description: Protein required for cell viability; Ylr243wp
MGFAQLVIGPAGSGKSTYCSGLYQHCETVGRRIHMVNLDPAAEHFSYPVSTDIRELISLDDVMEELGMGPNGGLIYCMEHLEDNLDDWLDEQLENYLDDDYLVFDCPGQIELFTHVPVLRNFVEYLKRKNFTVCAVYLLDSQFVSDVTKYISGCMASLSAMIQLELPHINILSKMDLVSNKKDVEDYLNPEAQVLLSQLNRQMAPRFHKLNKALAELVDDYNMVNFIPLDLRKESSIQYVLSNIDNCIQYGEDADVKVRDFIPEEDD

SEQ ID NO: 15997 - protein, 233 aa, Triticum aestivum
  peptide (1)..(233): Ceres Seq. ID no. 12780545
  misc_feature (1)..(216): Pfam Name: Pfam Description:  Conserved hypothetical ATP binding protein
  misc_feature (1)..(232): NCBI GI NO: 18071342 NR Description: putative ATP(GTP)-binding protein
  misc_feature (1)..(233): NCBI GI NO: 18413871 NR Description: putative protein; protein id: At4g12790
  misc_feature (46)..(233): NCBI GI NO: 7487264 NR Description: hypothetical protein T20K18
  misc_feature (1)..(61): NCBI GI NO: 7487264 NR Description: hypothetical protein T20K18
  misc_feature (1)..(231): NCBI GI NO: 37606123 NR Description: SI:zK83D9
  misc_feature (1)..(223): NCBI GI NO: 34872358 NR Description: similar to RIKEN cDNA A930018B01
  misc_feature (1)..(223): NCBI GI NO: 21312642 NR Description: RIKEN cDNA A930018B01 [Mus musculus]
  misc_feature (1)..(223): NCBI GI NO: 21410245 NR Description: protein x 0004 [Homo sapiens]
  misc_feature (1)..(223): NCBI GI NO: 21361523 NR Description: protein x 0004 [Homo sapiens]
  misc_feature (1)..(223): NCBI GI NO: 6323272 NR Description: Protein required for cell viability; Ylr243wp
MVNLDPAAEHFSYPVSTDIRELISLDDVMEELGMGPNGGLIYCMEHLEDNLDDWLDEQLENYLDDDYLVFDCPGQIELFTHVPVLRNFVEYLKRKNFTVCAVYLLDSQFVSDVTKYISGCMASLSAMIQLELPHINILSKMDLVSNKKDVEDYLNPEAQVLLSQLNRQMAPRFHKLNKALAELVDDYNMVNFIPLDLRKESSIQYVLSNIDNCIQYGEDADVKVRDFIPEEDD

SEQ ID NO: 15998 - DNA, 1168 bp, Triticum aestivum
  misc_feature (1)..(1168): Ceres Seq. ID no. 14302462
acagcggtcgtgccactcaacattattgccagatccattcctcccgtgcgagagcgacaggcagacagcggccgtgccgtgccggtggcgcgcggcaagcggcgacggccatggagctcctgcgggacagcatccccatggtgtccctggccgccgcggccgccgcgctgtacgcgcgcatggcctcgtcgctcctccgccccggcctcccgcgcctcgtctcgctgctcccgctcttcccattcctcgccgccgctcccctggccctcacttcctccgccatcgtccggggcaccgccgccttcttcctgacctggctctgcacgttcaagctcgccctcctcgccgccggccgcgggccgctcgaccccgcgctccccgtgctgccgttcctcttcaccacgctgctccccgtcaagctccgcccctccggtgcgggagcatccaaagccaagccgctgccgtcgctcgtctcttgcgcggccaaggtcgccgccatagccgccatcctcggcatctaccagtacaacgctcggctgcacccctacgcgcgccggacgctgtacggcgtccacatatactgcttcctggacctcttcttcccctgcatcgcggcggccgccggcgcgctcggcatggagacggagccgcagttcgaccgcccctacctggcctcctcgctgcgggacttctggggccgccggtggaacctcatggtgtcggccatcctccggccgtcggtgtacatccccgtgcttgcgcgcgccgggagccccgccggcgtgctggccaccttcctggtgtccgggctgatgcacgagggcatggtgtactacctcagcttccggcggccggacggccggatgaccgccttcttcctgctccatggcgtctgctgcgtcgccgaggggtggtgcgcccggcggtgggcggcgagggggtggccgtcgccgtcgcgggccgtggcgacggtgattgtggtggtgttcgtcgcccgcacgtcgttctggctcttcttcccgccgttgtgcagggacggaggcgaggagaagctgctggcggagtgggctgccctggcggccttcttcctcgacgccggcagaaagattaatggcattgtacgttcaaccgactaacgaaggaaaataaacactctcaaaagtttaac

SEQ ID NO: 15999 - protein, 377 aa, Triticum aestivum
  peptide (1)..(377): Ceres Seq. ID no. 14302463
  misc_feature (86)..(344): Pfam Name: Pfam Description:  MBOAT family
  misc_feature (37)..(377): NCBI GI NO: 38347115 NR Description: OSJNBa0009K15.12
  misc_feature (43)..(366): NCBI GI NO: 38345254 NR Description: OSJNBb0011N17.15
  misc_feature (40)..(375): NCBI GI NO: 38345253 NR Description: OSJNBb0011N17.14
  misc_feature (57)..(374): NCBI GI NO: 28812087 NR Description: putative wax synthase isoform protein
  misc_feature (43)..(361): NCBI GI NO: 27728714 NR Description: wax synthase isoform 1 [Vitis vinifera]
  misc_feature (43)..(361): NCBI GI NO: 27728716 NR Description: wax synthase isoform 2 [Vitis vinifera]
  misc_feature (49)..(369): NCBI GI NO: 34911838 NR Description: wax synthase-like protein
  misc_feature (47)..(354): NCBI GI NO: 27728718 NR Description: wax synthase isoform 3 [Vitis vinifera]
  misc_feature (57)..(369): NCBI GI NO: 15231093 NR Description: long-chain-alcohol O-fatty-acyltransferase
  misc_feature (43)..(354): NCBI GI NO: 15240497 NR Description: long-chain-alcohol O-fatty-acyltransferase
SGRATQHYCQIHSSRARATGRQRPCRAGGARQAATAMELLRDSIPMVSLAAAAAALYARMASSLLRPGLPRLVSLLPLFPFLAAAPLALTSSAIVRGTAAFFLTWLCTFKLALLAAGRGPLDPALPVLPFLFTTLLPVKLRPSGAGASKAKPLPSLVSCAAKVAAIAAILGIYQYNARLHPYARRTLYGVHIYCFLDLFFPCIAAAAGALGMETEPQFDRPYLASSLRDFWGRRWNLMVSAILRPSVYIPVLARAGSPAGVLATFLVSGLMHEGMVYYLSFRRPDGRMTAFFLLHGVCCVAEGWCARRWAARGWPSPSRAVATVIVVVFVARTSFWLFFPPLCRDGGEEKLLAEWAALAAFFLDAGRKINGIVRSTD

SEQ ID NO: 16000 - protein, 369 aa, Triticum aestivum
  peptide (1)..(369): Ceres Seq. ID no. 14302464
  misc_feature (55)..(89): NCBI GI NO: 1184100 NR Description: pistil extensin-like protein
  misc_feature (23)..(287): NCBI GI NO: 22962211 NR Description: hypothetical protein [Rhodopseudomonas palustris]
QRSCHSTLLPDPFLPCESDRQTAAVPCRWRAASGDGHGAPAGQHPHGVPGRRGRRAVRAHGLVAPPPRPPAPRLAAPALPIPRRRSPGPHFLRHRPGHRRLLPDLALHVQARPPRRRPRAARPRAPRAAVPLHHAAPRQAPPLRCGSIQSQAAAVARLLRGQGRRHSRHPRHLPVQRSAAPLRAPDAVRRPHILLPGPLLPLHRGGRRRARHGDGAAVRPPLPGLLAAGLLGPPVEPHGVGHPPAVGVHPRACARREPRRRAGHLPGVRADARGHGVLPQLPAAGRPDDRLLPAPWRLLRRRGVVRPAVGGEGVAVAVAGRGDGDCGGVRRPHVVLALLPAVVQGRRRGEAAGGVGCPGGLLPRRRQKD

SEQ ID NO: 16001 - protein, 341 aa, Triticum aestivum
  peptide (1)..(341): Ceres Seq. ID no. 14302465
  misc_feature (50)..(308): Pfam Name: Pfam Description:  MBOAT family
  misc_feature (1)..(341): NCBI GI NO: 38347115 NR Description: OSJNBa0009K15.12
  misc_feature (7)..(330): NCBI GI NO: 38345254 NR Description: OSJNBb0011N17.15
  misc_feature (4)..(339): NCBI GI NO: 38345253 NR Description: OSJNBb0011N17.14
  misc_feature (21)..(338): NCBI GI NO: 28812087 NR Description: putative wax synthase isoform protein
  misc_feature (7)..(325): NCBI GI NO: 27728714 NR Description: wax synthase isoform 1 [Vitis vinifera]
  misc_feature (7)..(325): NCBI GI NO: 27728716 NR Description: wax synthase isoform 2 [Vitis vinifera]
  misc_feature (13)..(333): NCBI GI NO: 34911838 NR Description: wax synthase-like protein
  misc_feature (11)..(318): NCBI GI NO: 27728718 NR Description: wax synthase isoform 3 [Vitis vinifera]
  misc_feature (21)..(333): NCBI GI NO: 15231093 NR Description: long-chain-alcohol O-fatty-acyltransferase
  misc_feature (7)..(318): NCBI GI NO: 15240497 NR Description: long-chain-alcohol O-fatty-acyltransferase
MELLRDSIPMVSLAAAAAALYARMASSLLRPGLPRLVSLLPLFPFLAAAPLALTSSAIVRGTAAFFLTWLCTFKLALLAAGRGPLDPALPVLPFLFTTLLPVKLRPSGAGASKAKPLPSLVSCAAKVAAIAAILGIYQYNARLHPYARRTLYGVHIYCFLDLFFPCIAAAAGALGMETEPQFDRPYLASSLRDFWGRRWNLMVSAILRPSVYIPVLARAGSPAGVLATFLVSGLMHEGMVYYLSFRRPDGRMTAFFLLHGVCCVAEGWCARRWAARGWPSPSRAVATVIVVVFVARTSFWLFFPPLCRDGGEEKLLAEWAALAAFFLDAGRKINGIVRSTD

SEQ ID NO: 16002 - DNA, 992 bp, Triticum aestivum
  misc_feature (1)..(992): Ceres Seq. ID no. 13656581
atcgttccctcctcctcccgttcgtttcctcagcgcctccaccacacactcagcgcccgatacccatcaccagccccgagtcgctgctttgcctccccgccatggccacctctgcttcctcccctccgtcgccggccggtcaccagcaagggcccgcaaccgcaaccgcgcccatggtcgctgttgcctcgtgcctcctcgcgcgcacccatagagcttcgccgcgccacctcgctcatgtcttgccggcttcctccgcctctgaactcgtcggccgtcgcgcctccagccgccagcacccctctgccgcaggccccgtgctccctccgctcgtctattcctcgccctcgccgcacttcgcgggtagccgcaccgcactggaccagcgcgccaccaggtgcagccatgggcaccgttttcctcaagcaacagccgccgttcggcctcgggccggtaagatcctgcaaccccacgtcgaggtcgccgttcccggccttcccctcacccgtcatcgccgcatccgacgggagctggccagaggccgccctttctcgcgtcagcctcctctgcattgagcgccgctgcctccgccccgtgccgttgacctcctatagcctcttgtttgttgtgtgcatcgctgcccacgactccggtagcaccttcgggtcctccttcgtcgaagggcactccccaacatcgtttcttcgttttggatcatgccaagtccgactacgacctgaacgactacacgatgaccccgaagaacatggattcgtcaagttctctttgacatgagtaccactaccgccgcccgaacaactacaaaccgaaatgccatgttcctctccgaacgtgtacgactaccgatgagtacctctaccgatgtcgtgtagcactactttcgtctgcactgcatcaaactcgtccgccccgaattgcacgcttcgaaggtataaacccgagacaacgccgaacaaatacatatgtgttgt

SEQ ID NO: 16003 - protein, 264 aa, Triticum aestivum
  peptide (1)..(264): Ceres Seq. ID no. 13656582
  misc_feature (3)..(185): NCBI GI NO: 81286 NR Description: extensin - Volvox carteri (fragment)
IVPSSSRSFPQRLHHTLSARYPSPAPSRCFASPPWPPLLPPLRRRPVTSKGPQPQPRPWSLLPRASSRAPIELRRATSLMSCRLPPPLNSSAVAPPAASTPLPQAPCSLRSSIPRPRRTSRVAAPHWTSAPPGAAMGTVFLKQQPPFGLGPVRSCNPTSRSPFPAFPSPVIAASDGSWPEAALSRVSLLCIERRCLRPVPLTSYSLLFVVCIAAHDSGSTFGSSFVEGHSPTSFLRFGSCQVRLRPERLHDDPEEHGFVKFSLT

SEQ ID NO: 16004 - protein, 190 aa, Triticum aestivum
  peptide (1)..(190): Ceres Seq. ID no. 13656583
RSLLLPFVSSAPPPHTQRPIPITSPESLLCLPAMATSASSPPSPAGHQQGPATATAPMVAVASCLLARTHRASPRHLAHVLPASSASELVGRRASSRQHPSAAGPVLPPLVYSSPSPHFAGSRTALDQRATRCSHGHRFPQATAAVRPRAGKILQPHVEVAVPGLPLTRHRRIRRELARGRPFSRQPPLH

SEQ ID NO: 16005 - protein, 185 aa, Triticum aestivum
  peptide (1)..(185): Ceres Seq. ID no. 13656584
  misc_feature (1)..(106): NCBI GI NO: 81286 NR Description: extensin - Volvox carteri (fragment)
MSCRLPPPLNSSAVAPPAASTPLPQAPCSLRSSIPRPRRTSRVAAPHWTSAPPGAAMGTVFLKQQPPFGLGPVRSCNPTSRSPFPAFPSPVIAASDGSWPEAALSRVSLLCIERRCLRPVPLTSYSLLFVVCIAAHDSGSTFGSSFVEGHSPTSFLRFGSCQVRLRPERLHDDPEEHGFVKFSLT

SEQ ID NO: 16006 - protein, 157 aa, Triticum aestivum
  peptide (1)..(157): Ceres Seq. ID no. 13656585
MATSASSPPSPAGHQQGPATATAPMVAVASCLLARTHRASPRHLAHVLPASSASELVGRRASSRQHPSAAGPVLPPLVYSSPSPHFAGSRTALDQRATRCSHGHRFPQATAAVRPRAGKILQPHVEVAVPGLPLTRHRRIRRELARGRPFSRQPPLH

SEQ ID NO: 16007 - DNA, 527 bp, Triticum aestivum
  misc_feature (1)..(527): Ceres Seq. ID no. 12626214
atcaacccaagcagtcagttcttcacttacacaacagattctacactccactactgcccaatcttcaggaacctcaaagttttgcaaaagaaagaagagagagatcatggcgggtgcggcgaaggcgtcatggacggtggcgatgagtgtgggcgcggtggaggcgctcaaggaccaggcggggctctgccgctggaactatgcgctcaagtccatccaccgagctgccaaggccaaggccaccatccgcggtggcgtctcgcagggcagcaagcagcttcaggcctccgcgtcggccgtggcggagaggcggcgagcagagaaagcagaggaggggctgaggacggcgatgtacctcagttgctggggtcccagttagtggtagctagcatgaggtgtttctgcagttctgctagctctatcctccagcaacaactatgccgtgtggcttggctggttaattccttcccggttgtaaatatgtctcaccatgatgatgatgatgatgatgatgatgaaatctttcc

SEQ ID NO: 16008 - protein, 175 aa, Triticum aestivum
  peptide (1)..(175): Ceres Seq. ID no. 12626215
INPSSQFFTYTTDSTLHYCPIFRNLKVLQKKEERDHGGCGEGVMDGGDECGRGGGAQGPGGALPLELCAQVHPPSCQGQGHHPRWRLAGQQAASGLRVGRGGEAASRESRGGAEDGDVPQLLGSQLVVASMRCFCSSASSILQQQLCRVAWLVNSFPVVNMSHHDDDDDDDDEIF

SEQ ID NO: 16009 - protein, 132 aa, Triticum aestivum
  peptide (1)..(132): Ceres Seq. ID no. 12626216
MDGGDECGRGGGAQGPGGALPLELCAQVHPPSCQGQGHHPRWRLAGQQAASGLRVGRGGEAASRESRGGAEDGDVPQLLGSQLVVASMRCFCSSASSILQQQLCRVAWLVNSFPVVNMSHHDDDDDDDDEIF

SEQ ID NO: 16010 - protein, 125 aa, Triticum aestivum
  peptide (1)..(125): Ceres Seq. ID no. 12626217
  misc_feature (36)..(125): NCBI GI NO: 38344799 NR Description: OSJNBa0043L09.19
  misc_feature (36)..(125): NCBI GI NO: 38344803 NR Description: OSJNBa0043L09.23
  misc_feature (36)..(122): NCBI GI NO: 38344804 NR Description: OSJNBa0043L09.24
  misc_feature (36)..(122): NCBI GI NO: 38344805 NR Description: OSJNBa0043L09.25
  misc_feature (36)..(125): NCBI GI NO: 15234987 NR Description: probable wound-induced protein
  misc_feature (38)..(125): NCBI GI NO: 38344798 NR Description: OSJNBa0043L09.18
  misc_feature (37)..(125): NCBI GI NO: 38636812 NR Description: unknown protein
  misc_feature (36)..(125): NCBI GI NO: 30681389 NR Description: wound-induced protein, putative
  misc_feature (44)..(125): NCBI GI NO: 82114 NR Description: wound-induced protein - tomato (fragment)
  misc_feature (44)..(125): NCBI GI NO: 6688818 NR Description: putative wound-induced protein
STQAVSSSLTQQILHSTTAQSSGTSKFCKRKKREIMAGAAKASWTVAMSVGAVEALKDQAGLCRWNYALKSIHRAAKAKATIRGGVSQGSKQLQASASAVAERRRAEKAEEGLRTAMYLSCWGPS

SEQ ID NO: 16011 - protein, 90 aa, Triticum aestivum
  peptide (1)..(90): Ceres Seq. ID no. 12626218
  misc_feature (1)..(90): NCBI GI NO: 38344799 NR Description: OSJNBa0043L09.19
  misc_feature (1)..(90): NCBI GI NO: 38344803 NR Description: OSJNBa0043L09.23
  misc_feature (1)..(87): NCBI GI NO: 38344804 NR Description: OSJNBa0043L09.24
  misc_feature (1)..(87): NCBI GI NO: 38344805 NR Description: OSJNBa0043L09.25
  misc_feature (1)..(90): NCBI GI NO: 15234987 NR Description: probable wound-induced protein
  misc_feature (3)..(90): NCBI GI NO: 38344798 NR Description: OSJNBa0043L09.18
  misc_feature (2)..(90): NCBI GI NO: 38636812 NR Description: unknown protein
  misc_feature (1)..(90): NCBI GI NO: 30681389 NR Description: wound-induced protein, putative
  misc_feature (9)..(90): NCBI GI NO: 82114 NR Description: wound-induced protein - tomato (fragment)
  misc_feature (9)..(90): NCBI GI NO: 6688818 NR Description: putative wound-induced protein
MAGAAKASWTVAMSVGAVEALKDQAGLCRWNYALKSIHRAAKAKATIRGGVSQGSKQLQASASAVAERRRAEKAEEGLRTAMYLSCWGPS

SEQ ID NO: 16012 - DNA, 825 bp, Triticum aestivum
  misc_feature (1)..(825): Ceres Seq. ID no. 12619024
atgaacctaaagctgatgagaaaatggaggaagaagatcctgaatatgaagaagatcccgatgaagtagaatatgaaggcgacgaggacatggatgatgccactgctgaagagccggcagaagcacagaatgaggataactcaaacgaaagagaaaccaagccagaagaggtaactgcagaagatgatggaaagaggacaacggagaatcttaagttggaaaaagcagaagaggacaagcagtctgtagcagagaaaggagatttgaaagaagttgaagagaaatctgttggtaaggagggaaagatatctggttcacaaaaaggagattcagcgaaacatgatgtggttgataaggacctgttgcaggcttttaggtacttcgaccaaaacagagttggttatataaaggtggatgatttaaggtgcatccttcacaacttggggaaatttttatccaacagggatgtgaaggacatggttcaaattgctcttgctgagagcaattctgcaagggatggtcgcattatctatacaaagcttgtcaagaaagctgacctctgatctggacctggttttggccctagcagctagttgagttatggaacttgtttgttggagattcttgacagtgaatcgatgatcaatggaaagtcacccgagtagtgtacttccatgtagctgggagctagtttttgtttctttgaatgaatatttgttaatgaactgatatcgtttgtatgttgacctactaggaaaatttcattagatttttttcacacagcaaacataatggcctaataataataacatttcctggtgtggt

SEQ ID NO: 16013 - protein, 186 aa, Triticum aestivum
  peptide (1)..(186): Ceres Seq. ID no. 12619025
  misc_feature (1)..(62): Pfam Name: Pfam Description:  Prothymosin/parathymosin family
  misc_feature (6)..(182): NCBI GI NO: 15227543 NR Description: putative calmodulin; protein id: At2g03150.1
  misc_feature (3)..(167): NCBI GI NO: 26345990 NR Description: unnamed protein product [Mus musculus]
  misc_feature (3)..(167): NCBI GI NO: 7022719 NR Description: unnamed protein product [Homo sapiens]
  misc_feature (1)..(167): NCBI GI NO: 26347237 NR Description: unnamed protein product [Mus musculus]
  misc_feature (3)..(167): NCBI GI NO: 29789088 NR Description: hypothetical protein FLJ10839 [Homo sapiens]
  misc_feature (3)..(167): NCBI GI NO: 32441867 NR Description: cell-cycle and apoptosis regulatory protein 1
  misc_feature (3)..(167): NCBI GI NO: 33563288 NR Description: RIKEN cDNA 2610511G16 [Mus musculus]
  misc_feature (42)..(183): NCBI GI NO: 4731916 NR Description: development protein DG1124
  misc_feature (42)..(183): NCBI GI NO: 28829323 NR Description: similar to Dictyostelium discoideum (Slime mold)
  misc_feature (1)..(119): NCBI GI NO: 9631239 NR Description: orf 48 [Ateline herpesvirus 3]
EPKADEKMEEEDPEYEEDPDEVEYEGDEDMDDATAEEPAEAQNEDNSNERETKPEEVTAEDDGKRTTENLKLEKAEEDKQSVAEKGDLKEVEEKSVGKEGKISGSQKGDSAKHDVVDKDLLQAFRYFDQNRVGYIKVDDLRCILHNLGKFLSNRDVKDMVQIALAESNSARDGRIIYTKLVKKADL

SEQ ID NO: 16014 - protein, 179 aa, Triticum aestivum
  peptide (1)..(179): Ceres Seq. ID no. 12619026
  misc_feature (1)..(55): Pfam Name: Pfam Description:  Prothymosin/parathymosin family
  misc_feature (1)..(175): NCBI GI NO: 15227543 NR Description: putative calmodulin; protein id: At2g03150.1
  misc_feature (1)..(160): NCBI GI NO: 26345990 NR Description: unnamed protein product [Mus musculus]
  misc_feature (1)..(160): NCBI GI NO: 7022719 NR Description: unnamed protein product [Homo sapiens]
  misc_feature (1)..(160): NCBI GI NO: 26347237 NR Description: unnamed protein product [Mus musculus]
  misc_feature (1)..(160): NCBI GI NO: 29789088 NR Description: hypothetical protein FLJ10839 [Homo sapiens]
  misc_feature (1)..(160): NCBI GI NO: 32441867 NR Description: cell-cycle and apoptosis regulatory protein 1
  misc_feature (1)..(160): NCBI GI NO: 33563288 NR Description: RIKEN cDNA 2610511G16 [Mus musculus]
  misc_feature (35)..(176): NCBI GI NO: 4731916 NR Description: development protein DG1124
  misc_feature (35)..(176): NCBI GI NO: 28829323 NR Description: similar to Dictyostelium discoideum (Slime mold)
  misc_feature (1)..(112): NCBI GI NO: 9631239 NR Description: orf 48 [Ateline herpesvirus 3]
MEEEDPEYEEDPDEVEYEGDEDMDDATAEEPAEAQNEDNSNERETKPEEVTAEDDGKRTTENLKLEKAEEDKQSVAEKGDLKEVEEKSVGKEGKISGSQKGDSAKHDVVDKDLLQAFRYFDQNRVGYIKVDDLRCILHNLGKFLSNRDVKDMVQIALAESNSARDGRIIYTKLVKKADL

SEQ ID NO: 16015 - protein, 157 aa, Triticum aestivum
  peptide (1)..(157): Ceres Seq. ID no. 12619027
  misc_feature (1)..(70): Pfam Name: Pfam Description:  Transferrin binding protein-like solute binding protein
  misc_feature (1)..(153): NCBI GI NO: 15227543 NR Description: putative calmodulin; protein id: At2g03150.1
  misc_feature (1)..(138): NCBI GI NO: 26345990 NR Description: unnamed protein product [Mus musculus]
  misc_feature (1)..(138): NCBI GI NO: 7022719 NR Description: unnamed protein product [Homo sapiens]
  misc_feature (1)..(138): NCBI GI NO: 26347237 NR Description: unnamed protein product [Mus musculus]
  misc_feature (1)..(138): NCBI GI NO: 29789088 NR Description: hypothetical protein FLJ10839 [Homo sapiens]
  misc_feature (1)..(138): NCBI GI NO: 32441867 NR Description: cell-cycle and apoptosis regulatory protein 1
  misc_feature (1)..(138): NCBI GI NO: 33563288 NR Description: RIKEN cDNA 2610511G16 [Mus musculus]
  misc_feature (13)..(154): NCBI GI NO: 4731916 NR Description: development protein DG1124
  misc_feature (13)..(154): NCBI GI NO: 28829323 NR Description: similar to Dictyostelium discoideum (Slime mold)
  misc_feature (1)..(90): NCBI GI NO: 9631239 NR Description: orf 48 [Ateline herpesvirus 3]
MDDATAEEPAEAQNEDNSNERETKPEEVTAEDDGKRTTENLKLEKAEEDKQSVAEKGDLKEVEEKSVGKEGKISGSQKGDSAKHDVVDKDLLQAFRYFDQNRVGYIKVDDLRCILHNLGKFLSNRDVKDMVQIALAESNSARDGRIIYTKLVKKADL

SEQ ID NO: 16016 - DNA, 1416 bp, Triticum aestivum
  misc_feature (1)..(1416): Ceres Seq. ID no. 14303528
gaaaaaaaaaaagactagacggtggcggaaaatggcgtgcggtctcctgccgctgctccacggccccctctcctctccgcctcgtcccctcgtcccctcccgctccccctccctcctcgcgcccgggaccctgcccctagcccctcgccggagcagggtttcgcgtcacctgtcccctgcccctccgcgcgcgctcccggacattgccgcggcggcggcgggcctccgggacgcggtcgccggcgccttccaggcgtccccgcctacgtggagctcggctgccacaaccaacgtcgccatcttcgtcgcgggcacgccgctgctcctctccggcctctccgcctccggcatcgcggccgcctacgtcctcggcaccctcacgtggcgcgcatttggggcccgggcttacctcctcgtcgccgcctacttcgtggtgggcacagcagtgaccaagttaaagataaaacaaaaagaagctttgggagtggctgagaaaaaaggaggaaggagaggtcctggtagtgttattggttctagtgctgctggttgtgtctgtgctctcctatcagtatataatgtgggcaggggagcattcgcggaactctggacacttggctttgttgcaagtttctgtactaaactcagtgatacagtttccagtgaaatagggaaggcatatggaagaacaacttacctagtgacaacatttaagattgttccaagaggtacagaaggtgcagtcagtgttgagggcactcttgctggaattgtagcatcaacgtttctggcagggattggttatattttggggcaggtaaatctaccacagggtgtgctatgtgttcttgcatcccagattgcaaattttggcgagagtttgattggcgcaacgctgcaggataaggaaggttttgaatggctgaacaatgatgttgtcaacgtggtcaatatctcggccggcgccgttttggctgctctaatgcagcagctgctagtgagctggcgctcatgatctttgtttcctgacttttctccagtgcatccgctctcgtagtttcttagcggtataagcagctggcatttgcttgtggaactctcaagtcgcaattgagtggatgcacgtgcttctcctttgtgacacatcttcctgtacttctaattctagcttaaggcctgttcccgttcgctccactccgcggagctccaggagctcggtttgagctgctccgtggaaataagctgcagtttcctccgctccgggggcgcagtccagggatcggagaggaaccgaacaggcctttagtaacattgatttgtggaagtaaaacactctctgccagagcatcatatgttcaagaaatactgagctggctggcgtgctactagctactactccaaacaatgatcattctacac

SEQ ID NO: 16017 - protein, 336 aa, Triticum aestivum
  peptide (1)..(336): Ceres Seq. ID no. 14303529
  misc_feature (79)..(305): Pfam Name: Pfam Description:  Integral membrane protein DUF92
  misc_feature (11)..(307): NCBI GI NO: 34910822 NR Description: P0456A01.17
  misc_feature (23)..(334): NCBI GI NO: 21592713 NR Description: unknown [Arabidopsis thaliana]
  misc_feature (70)..(334): NCBI GI NO: 18412044 NR Description: expressed protein [Arabidopsis thaliana]
  misc_feature (112)..(324): NCBI GI NO: 22299927 NR Description: ORF_ID:tlr2384~hypothetical protein
  misc_feature (90)..(324): NCBI GI NO: 16330187 NR Description: hypothetical protein [Synechocystis sp. PCC 6803]
  misc_feature (112)..(327): NCBI GI NO: 17229104 NR Description: hypothetical protein [Nostoc sp. PCC 7120]
  misc_feature (90)..(334): NCBI GI NO: 23043616 NR Description: hypothetical protein
  misc_feature (201)..(327): NCBI GI NO: 23125371 NR Description: hypothetical protein [Nostoc punctiforme]
  misc_feature (112)..(194): NCBI GI NO: 23125371 NR Description: hypothetical protein [Nostoc punctiforme]
  misc_feature (90)..(325): NCBI GI NO: 37520469 NR Description: hypothetical protein gll0900
KKKKTRRWRKMACGLLPLLHGPLSSPPRPLVPSRSPSLLAPGTLPLAPRRSRVSRHLSPAPPRALPDIAAAAAGLRDAVAGAFQASPPTWSSAATTNVAIFVAGTPLLLSGLSASGIAAAYVLGTLTWRAFGARAYLLVAAYFVVGTAVTKLKIKQKEALGVAEKKGGRRGPGSVIGSSAAGCVCALLSVYNVGRGAFAELWTLGFVASFCTKLSDTVSSEIGKAYGRTTYLVTTFKIVPRGTEGAVSVEGTLAGIVASTFLAGIGYILGQVNLPQGVLCVLASQIANFGESLIGATLQDKEGFEWLNNDVVNVVNISAGAVLAALMQQLLVSWRS

SEQ ID NO: 16018 - protein, 326 aa, Triticum aestivum
  peptide (1)..(326): Ceres Seq. ID no. 14303530
  misc_feature (69)..(295): Pfam Name: Pfam Description:  Integral membrane protein DUF92
  misc_feature (1)..(297): NCBI GI NO: 34910822 NR Description: P0456A01.17
  misc_feature (13)..(324): NCBI GI NO: 21592713 NR Description: unknown [Arabidopsis thaliana]
  misc_feature (60)..(324): NCBI GI NO: 18412044 NR Description: expressed protein [Arabidopsis thaliana]
  misc_feature (102)..(314): NCBI GI NO: 22299927 NR Description: ORF_ID:tlr2384~hypothetical protein
  misc_feature (80)..(314): NCBI GI NO: 16330187 NR Description: hypothetical protein [Synechocystis sp. PCC 6803]
  misc_feature (102)..(317): NCBI GI NO: 17229104 NR Description: hypothetical protein [Nostoc sp. PCC 7120]
  misc_feature (80)..(324): NCBI GI NO: 23043616 NR Description: hypothetical protein
  misc_feature (191)..(317): NCBI GI NO: 23125371 NR Description: hypothetical protein [Nostoc punctiforme]
  misc_feature (102)..(184): NCBI GI NO: 23125371 NR Description: hypothetical protein [Nostoc punctiforme]
  misc_feature (80)..(315): NCBI GI NO: 37520469 NR Description: hypothetical protein gll0900
MACGLLPLLHGPLSSPPRPLVPSRSPSLLAPGTLPLAPRRSRVSRHLSPAPPRALPDIAAAAAGLRDAVAGAFQASPPTWSSAATTNVAIFVAGTPLLLSGLSASGIAAAYVLGTLTWRAFGARAYLLVAAYFVVGTAVTKLKIKQKEALGVAEKKGGRRGPGSVIGSSAAGCVCALLSVYNVGRGAFAELWTLGFVASFCTKLSDTVSSEIGKAYGRTTYLVTTFKIVPRGTEGAVSVEGTLAGIVASTFLAGIGYILGQVNLPQGVLCVLASQIANFGESLIGATLQDKEGFEWLNNDVVNVVNISAGAVLAALMQQLLVSWRS

SEQ ID NO: 16019 - DNA, 1686 bp, Triticum aestivum
  misc_feature (1)..(1686): Ceres Seq. ID no. 13656635
atcgcgtcgcatatcccctccctcccctctcatcacccacacccacgcggcagccggcttcaatttttccatctgctccccgtgctcttaatgggctttccctccctccgacatggccggcgacccccgcacccgcgccgccggtgaccactccctctccccctcctcccccgccgccgtcctcgtgcccgggggcggcctccgcctggggccctccaggctcttcctccacctgctcctcctccactcgctcttataaccccgcgcccccccgccgccaggccatggccgccgtcttctaccaccacgtcgtcggcgacctcaccgtcggcaagcccgagatcgccgagctcagcgacgcggacacgcttgacgacgcggcgcgggccatcgccggcagccccgagggcgccgtgcccgtctggcgcgcgcgggccgcccccgacgacccgccctccggggcccggttcctcggcatgatctccgccgtcgacatcgccgccttcctcgccggcgccggcgccggcgaccgcgccatgcgcgccgccgtcggcgaggtcgtgcagcccaaccaggacctgctccgggaggtcgatcccggcaccaggttgattgatgcgctggagttgatgaggaatggagtgaagcgcttccttgtccgcaagaacggctcctggacaggcatcaccaagcggttttctatgctttacaatgggaaatggatgaagaactcggaatcgggatccccaagctcagctggcagcagcagcatgcagttgtccccatttatcagttgcgcggagaggttttgctgcctgtcaagggaagacatcctccggttcctgatcgggtgcctcggcgccctcgcgcccatcccactgtctccaatctgtaccctcggagctatcaacccgcactactgccacgtcgaggcgtctgcgccagccatggaggcgatccagaagatccctggggacccctgcggcgtggccgtggttgagacgacatcggacggggtccgcaagatcatcggggacatctctgcctacaagctgtggaagtgtgactacgtggcggccgcgtgggcgctggcgaacctgtcggcggggcagtttgtcatcggcgccgacgagaacgggtcgacccccatctccgccttcccgctgccttccatcagctcgtcgttgtcggaggaggccaccgagcccgggcgctctcccaggctgcttaagaagttcagcagcaggaacatcgggttcctgaacagccaggcgaaccaggtgcggagcatgtaccggggccggagctcgccgctgatgtgccggagcacgagctccctggccgccgtcatggcgcagatgctgtcccaccgggcgactcacgtgtgggtgacggacgcggaggctgaggaggatgacgtcctcgttggcgtggtcgggtacacggacatctttgccgccgtcacccggagcagcgcctgaccgtcgacgacgtcctgatggcggtggcgtgtgtttgggtggtgtactataatttggggttagtttggtggttgtccagagctgagaactttgttttgggtgtgtgggcgtgtgagactgaatgggttgtgtattgttggatgtgcattcgttgttgatggtcctataataaggtagactcgggcctatttatgcctgggagtcc

SEQ ID NO: 16020 - protein, 492 aa, Triticum aestivum
  peptide (1)..(492): Ceres Seq. ID no. 13656636
  misc_feature (431)..(488): Pfam Name: Pfam Description:  CBS domain
  misc_feature (95)..(490): NCBI GI NO: 19386732 NR Description: P0678F11.21
  misc_feature (95)..(492): NCBI GI NO: 15218643 NR Description: CBS domain containing protein
  misc_feature (203)..(492): NCBI GI NO: 7487793 NR Description: hypothetical protein T8F5
  misc_feature (95)..(202): NCBI GI NO: 7487793 NR Description: hypothetical protein T8F5
  misc_feature (95)..(489): NCBI GI NO: 15238832 NR Description: expressed protein [Arabidopsis thaliana]
  misc_feature (5)..(88): NCBI GI NO: 31414574 NR Description: large tegument protein
  misc_feature (264)..(483): NCBI GI NO: 27754524 NR Description: unknown protein [Arabidopsis thaliana]
  misc_feature (264)..(483): NCBI GI NO: 30687603 NR Description: expressed protein [Arabidopsis thaliana]
  misc_feature (4)..(56): NCBI GI NO: 322759 NR Description: pistil extensin-like protein
  misc_feature (3)..(90): NCBI GI NO: 17939907 NR Description: UL36 protein [Pseudorabies virus]
RVAYPLPPLSSPTPTRQPASIFPSAPRALNGLSLPPTWPATPAPAPPVTTPSPPPPPPPSSCPGAASAWGPPGSSSTCSSSTRSYNPAPPRRQAMAAVFYHHVVGDLTVGKPEIAELSDADTLDDAARAIAGSPEGAVPVWRARAAPDDPPSGARFLGMISAVDIAAFLAGAGAGDRAMRAAVGEVVQPNQDLLREVDPGTRLIDALELMRNGVKRFLVRKNGSWTGITKRFSMLYNGKWMKNSESGSPSSAGSSSMQLSPFISCAERFCCLSREDILRFLIGCLGALAPIPLSPICTLGAINPHYCHVEASAPAMEAIQKIPGDPCGVAVVETTSDGVRKIIGDISAYKLWKCDYVAAAWALANLSAGQFVIGADENGSTPISAFPLPSISSSLSEEATEPGRSPRLLKKFSSRNIGFLNSQANQVRSMYRGRSSPLMCRSTSSLAAVMAQMLSHRATHVWVTDAEAEEDDVLVGVVGYTDIFAAVTRSSA

SEQ ID NO: 16021 - protein, 398 aa, Triticum aestivum
  peptide (1)..(398): Ceres Seq. ID no. 13656637
  misc_feature (337)..(394): Pfam Name: Pfam Description:  CBS domain
  misc_feature (1)..(396): NCBI GI NO: 19386732 NR Description: P0678F11.21
  misc_feature (1)..(398): NCBI GI NO: 15218643 NR Description: CBS domain containing protein
  misc_feature (109)..(398): NCBI GI NO: 7487793 NR Description: hypothetical protein T8F5
  misc_feature (1)..(108): NCBI GI NO: 7487793 NR Description: hypothetical protein T8F5
  misc_feature (1)..(395): NCBI GI NO: 15238832 NR Description: expressed protein [Arabidopsis thaliana]
  misc_feature (170)..(389): NCBI GI NO: 27754524 NR Description: unknown protein [Arabidopsis thaliana]
  misc_feature (170)..(389): NCBI GI NO: 30687603 NR Description: expressed protein [Arabidopsis thaliana]
  misc_feature (170)..(384): NCBI GI NO: 7486257 NR Description: hypothetical protein F27G19
MAAVFYHHVVGDLTVGKPEIAELSDADTLDDAARAIAGSPEGAVPVWRARAAPDDPPSGARFLGMISAVDIAAFLAGAGAGDRAMRAAVGEVVQPNQDLLREVDPGTRLIDALELMRNGVKRFLVRKNGSWTGITKRFSMLYNGKWMKNSESGSPSSAGSSSMQLSPFISCAERFCCLSREDILRFLIGCLGALAPIPLSPICTLGAINPHYCHVEASAPAMEAIQKIPGDPCGVAVVETTSDGVRKIIGDISAYKLWKCDYVAAAWALANLSAGQFVIGADENGSTPISAFPLPSISSSLSEEATEPGRSPRLLKKFSSRNIGFLNSQANQVRSMYRGRSSPLMCRSTSSLAAVMAQMLSHRATHVWVTDAEAEEDDVLVGVVGYTDIFAAVTRSSA

SEQ ID NO: 16022 - protein, 334 aa, Triticum aestivum
  peptide (1)..(334): Ceres Seq. ID no. 13656638
  misc_feature (273)..(330): Pfam Name: Pfam Description:  CBS domain
  misc_feature (1)..(332): NCBI GI NO: 19386732 NR Description: P0678F11.21
  misc_feature (1)..(334): NCBI GI NO: 15218643 NR Description: CBS domain containing protein
  misc_feature (45)..(334): NCBI GI NO: 7487793 NR Description: hypothetical protein T8F5
  misc_feature (1)..(44): NCBI GI NO: 7487793 NR Description: hypothetical protein T8F5
  misc_feature (1)..(331): NCBI GI NO: 15238832 NR Description: expressed protein [Arabidopsis thaliana]
  misc_feature (106)..(325): NCBI GI NO: 27754524 NR Description: unknown protein [Arabidopsis thaliana]
  misc_feature (106)..(325): NCBI GI NO: 30687603 NR Description: expressed protein [Arabidopsis thaliana]
  misc_feature (106)..(320): NCBI GI NO: 7486257 NR Description: hypothetical protein F27G19
MISAVDIAAFLAGAGAGDRAMRAAVGEVVQPNQDLLREVDPGTRLIDALELMRNGVKRFLVRKNGSWTGITKRFSMLYNGKWMKNSESGSPSSAGSSSMQLSPFISCAERFCCLSREDILRFLIGCLGALAPIPLSPICTLGAINPHYCHVEASAPAMEAIQKIPGDPCGVAVVETTSDGVRKIIGDISAYKLWKCDYVAAAWALANLSAGQFVIGADENGSTPISAFPLPSISSSLSEEATEPGRSPRLLKKFSSRNIGFLNSQANQVRSMYRGRSSPLMCRSTSSLAAVMAQMLSHRATHVWVTDAEAEEDDVLVGVVGYTDIFAAVTRSSA

SEQ ID NO: 16023 - DNA, 1099 bp, Triticum aestivum
  misc_feature (1)..(1099): Ceres Seq. ID no. 12780602
atcctaatcgaaaaatccctcccttcctcacggtctccgccccccaaatcgcattcctctcctcgccgccgtccgccgccgctcgctcgccatggacgccgccaagcccgccccggcccccgcccgccccgccggccccgggctctacgccgacatcggcaagaaggccagagatctcctcaacagggactacaccacgggccagaagttcaccttcaccaccaccgccgccaacggagctacaattactagttcgagcacaaagaaaaatgaagctatcgtggctgacctccagacccaggtgaagatcaagaatttcacagtggatgtgaaagcaacttcggactcaagtgttgtaactacaatcactgttcctgagctgtacacaccgggcttgaagggagttctttctcttcctttcccctaccagaagtctacccctgggaaggctgaactccagtacttgcatccccatcttggcatcaacggcagtgttggcctgaattcaaaccctcttgttaacttttctggtgtcattgggactaaggcttttgcttttggtgttgatgttgcatttgacactgcctctggtgacttcaccaagtacaatgctggactgagccacactaatcaagatcttactgcttcgttgaatctgaacaacaaggcaaacaccctggctgcttcctactaccaccaggtgcagcgcaccactgctgtgggagcagagatcgctcacagcttctcgagcaacgagaacaccatcaccgtcgggacgcagcacgagctggaccccctgacgaccgtgaaggggcgctacaacaacttcggcatcgcaagtgcgctcatccagcacgcgtggaggcccaagtctctcatcaccttctccaccgaggttgacaccaaggccattgagaagagccccaagttcgggctggccctgtcactcaagccctgatgtgggattcgtgggtgcgttaggatgctagcattttggtaccatcagctcttggtccagcgaacaaagcttggacagacagaacttgtaatgcccaactttggtgacgcgacaaacttatgtcgttttttagcctgttcc

SEQ ID NO: 16024 - protein, 288 aa, Triticum aestivum
  peptide (1)..(288): Ceres Seq. ID no. 12780603
  misc_feature (16)..(281): Pfam Name: Pfam Description:  Eukaryotic porin
  misc_feature (16)..(288): NCBI GI NO: 2130108 NR Description: porin VDAC2 - wheat (fragment)
  misc_feature (9)..(288): NCBI GI NO: 18076158 NR Description: voltage-dependent anion channel
  misc_feature (14)..(288): NCBI GI NO: 5929932 NR Description: voltage-dependent anion channel protein 2
  misc_feature (16)..(287): NCBI GI NO: 34912192 NR Description: voltage-dependent anion channel
  misc_feature (15)..(288): NCBI GI NO: 7339529 NR Description: voltage-dependent anion channel [Oryza sativa]
  misc_feature (15)..(288): NCBI GI NO: 7442953 NR Description: porin - common ice plant
  misc_feature (15)..(288): NCBI GI NO: 1172553 NR Description: Outer mitochondrial membrane protein porin
  misc_feature (8)..(288): NCBI GI NO: 34910590 NR Description: putative voltage-dependent anion channel protein
  misc_feature (15)..(288): NCBI GI NO: 5929928 NR Description: voltage-dependent anion channel protein 1a
  misc_feature (15)..(288): NCBI GI NO: 2130107 NR Description: porin (clone Tavdac1) - wheat
MDAAKPAPAPARPAGPGLYADIGKKARDLLNRDYTTGQKFTFTTTAANGATITSSSTKKNEAIVADLQTQVKIKNFTVDVKATSDSSVVTTITVPELYTPGLKGVLSLPFPYQKSTPGKAELQYLHPHLGINGSVGLNSNPLVNFSGVIGTKAFAFGVDVAFDTASGDFTKYNAGLSHTNQDLTASLNLNNKANTLAASYYHQVQRTTAVGAEIAHSFSSNENTITVGTQHELDPLTTVKGRYNNFGIASALIQHAWRPKSLITFSTEVDTKAIEKSPKFGLALSLKP

SEQ ID NO: 16025 - DNA, 1273 bp, Triticum aestivum
  misc_feature (1)..(1273): Ceres Seq. ID no. 13663074
  misc_feature (1152)..(1152): n is a, c, t, g, unknown, or other
  misc_feature (1151)..(1151): n is a, c, t, g, unknown, or other
attctcctccccgctcgctcctatcctcccccatgccgccgcccccttccccccgctcgcctctgccgcctcctctccttccccgcacgtccggcctaccccctcctccctcctcctccatcctccctcattcgtcatcacggcagaccatctcccgtcacttgggccccatgctggcggccgggtcggggtggaggcgcagcagggctgcaggggccctacgtgtactacctctacagccagtacgggttcgacaagggcgacatcggccgcctcttcatcgccggctttggctcctccatgctcttcggcaccatcgtcgggtcgctcgccgacaagcagggaaggaagagggcgtgcatcacctacatcctcagctgcatcacgaagcactcgccgcagtacaggattctgatgataggccgtgtgcttggaggcattgcaacatcgctgctcttctcggcattcgagtcgtggctcgtggcggagcacaacaagggagagttgactgatgtacatgagacccaggcgaaaatgagtgtgctagcggaggctccagggatgcagggtgatagggcccagtctatgctccggttgtgttgttggggaagcttcggacgggatttagataaggaaaaggagtcccgtgcgaaatcgagcgtcctggtgttgggactgatgatccgcacttgttgtctaaatgcagaacatgcgcattgcagtgctttctatcagtaccgacgaccacaaatgggatggatcgagcaaccaagactcagagtgtggttgacagtgcggcctgctcccaaccctgcagataactctgggtttgaactggaaccttgtgtcatttggtgcaatgggtaattttgttcacagtacttgcttatgaagttaaagttggcatatatgcctgcccatgaacaagtctattgatacatgttttttaaagcacacatgttagtgggtctccgtgtcatttgcgtacatgatttcaaatggatccatttgcgtacatgatttcaaatggatccatttgcgtacatgatttcaaatggatctttgcgaatatggtagcaagtattttgtgctatgaaattaaaatgtgtacatacatctcatcgtagacaacaatccaacatgtttcttannaaaaaaaaaaaaaaaaaaaaaaaaaaaaaaaaaaaaaaaaaaaaaaaaaaaaaaaaaaaaaaaaaagaaaaaaaaaaaaaaaaaggtttatcgataccgccaacctcaagggggggcccgg

SEQ ID NO: 16026 - protein, 288 aa, Triticum aestivum
  peptide (1)..(288): Ceres Seq. ID no. 13663075
  misc_feature (70)..(166): Pfam Name: DUF791 Pfam Description: Protein of unknown function
  misc_feature (70)..(166): NCBI GI NO: 34902182 NR Description: Putative transporter
  misc_feature (70)..(166): NCBI GI NO: 37536124 NR Description: putative transporter
  misc_feature (70)..(166): NCBI GI NO: 7487513 NR Description: hypothetical protein T29A15
  misc_feature (70)..(166): NCBI GI NO: 11292198 NR Description: hypothetical protein F2K15
  misc_feature (70)..(166): NCBI GI NO: 18417054 NR Description: expressed protein [Arabidopsis thaliana]
  misc_feature (70)..(166): NCBI GI NO: 30693172 NR Description: expressed protein [Arabidopsis thaliana]
  misc_feature (70)..(166): NCBI GI NO: 6633826 NR Description: F1N19.22 [Arabidopsis thaliana]
  misc_feature (70)..(166): NCBI GI NO: 15217708 NR Description: expressed protein [Arabidopsis thaliana]
  misc_feature (70)..(171): NCBI GI NO: 25148676 NR Description: Transporter (48.1 kD) [Caenorhabditis elegans]
  misc_feature (70)..(171): NCBI GI NO: 39587911 NR Description: Hypothetical protein CBG13530
ILLPARSYPPPCRRPLPPARLCRLLSFPARPAYPLLPPPPSSLIRHHGRPSPVTWAPCWRPGRGGGAAGLQGPYVYYLYSQYGFDKGDIGRLFIAGFGSSMLFGTIVGSLADKQGRKRACITYILSCITKHSPQYRILMIGRVLGGIATSLLFSAFESWLVAEHNKGELTDVHETQAKMSVLAEAPGMQGDRAQSMLRLCCWGSFGRDLDKEKESRAKSSVLVLGLMIRTCCLNAEHAHCSAFYQYRRPQMGWIEQPRLRVWLTVRPAPNPADNSGFELEPCVIWCNG

SEQ ID NO: 16027 - protein, 188 aa, Triticum aestivum
  peptide (1)..(188): Ceres Seq. ID no. 13663076
  misc_feature (1)..(66): Pfam Name: DUF791 Pfam Description: Protein of unknown function
  misc_feature (1)..(66): NCBI GI NO: 34902182 NR Description: Putative transporter
  misc_feature (1)..(66): NCBI GI NO: 37536124 NR Description: putative transporter
  misc_feature (1)..(66): NCBI GI NO: 7487513 NR Description: hypothetical protein T29A15
  misc_feature (1)..(66): NCBI GI NO: 30693172 NR Description: expressed protein [Arabidopsis thaliana]
  misc_feature (1)..(66): NCBI GI NO: 18417054 NR Description: expressed protein [Arabidopsis thaliana]
  misc_feature (1)..(66): NCBI GI NO: 11292198 NR Description: hypothetical protein F2K15
  misc_feature (1)..(66): NCBI GI NO: 6633826 NR Description: F1N19.22 [Arabidopsis thaliana]
  misc_feature (1)..(66): NCBI GI NO: 15217708 NR Description: expressed protein [Arabidopsis thaliana]
  misc_feature (1)..(71): NCBI GI NO: 25148676 NR Description: Transporter (48.1 kD) [Caenorhabditis elegans]
  misc_feature (1)..(71): NCBI GI NO: 39587911 NR Description: Hypothetical protein CBG13530
MLFGTIVGSLADKQGRKRACITYILSCITKHSPQYRILMIGRVLGGIATSLLFSAFESWLVAEHNKGELTDVHETQAKMSVLAEAPGMQGDRAQSMLRLCCWGSFGRDLDKEKESRAKSSVLVLGLMIRTCCLNAEHAHCSAFYQYRRPQMGWIEQPRLRVWLTVRPAPNPADNSGFELEPCVIWCNG

SEQ ID NO: 16028 - protein, 169 aa, Triticum aestivum
  peptide (1)..(169): Ceres Seq. ID no. 13663077
SPPRSLLSSPMPPPPSPRSPLPPPLLPRTSGLPPPPSSSILPHSSSRQTISRHLGPMLAAGSGWRRSRAAGALRVLPLQPVRVRQGRHRPPLHRRLWLLHALRHHRRVARRQAGKEEGVHHLHPQLHHEALAAVQDSDDRPCAWRHCNIAALLGIRVVARGGAQQGRVD

SEQ ID NO: 16029 - DNA, 1575 bp, Triticum aestivum
  misc_feature (1)..(1575): Ceres Seq. ID no. 13496409
actagtactagtccgggatagtgcggctagggtttcttcgtcccacacacaccccctctcccccaacctgctccgtccccatcccctcgccgccgccgccgccgccgccgtctgagccctagactcgcgcgaatcctccccgggccgagcgatggcgatgcagaagtccggcgggagagactggtagcgagtagggcagttccccggtcaccccacacacaaatcccggcgagcgagcgcagagtgacctgactttttctgccatccatggcgaccgtgaaccccttcgacctcctcggcgacgacgagggcgacgaccccacgcagctcctggccaaggcggccgccctggcgcagaaggccgaggccaagaaggccgccgcgccgcccgccgccggcaagggcggcgcgcggacggtcgccaatctgcccaccaagccgcctccgcctggtcaggctgccaatgagtctcgtggtggtggtccactctcccgtggaggatatggtcgcggtgaacgtggctcaggcagaggtggccgaggagggtacggtcagaatcgcgactacgccagtgaagacacaaatggctacaggggaggttatggtgccagaactggaggtgaggaaggcgcccaggatagagagagggcccctcggcaaccctaccaggggggaggccgtcgtggtgggtatcgtgaaggcgagtttggtgatgattctgagaggccacctcgaaggaactatgagcgccaaagcggcacaggccgtgggtatgagataaaacgcgagggtgctggccgtgggaactggggaactacctctgatgaaattgttgcccaggaaactgaggccctgaagcaggatgagaaggcccctgcacctgagaagcagggcgcaccagaggatgcaccacaggcagatgagaacaaggccaccaaagatggcgctgcagttgtggaagaagaaaaggaagaggataatgagatgactcttgatgaatttgagaaagtaatggaggagaagaggaaagcacttgctgctttgaagaagtctgaagagaggaaggttgaaattgataaggatctgcaggctatgcaactactttccaccaagaaaggaaatgatgaagttttcatcaaactgggtgctgataaggaggctttgaagaagaaagagaatgctgaacgtgaagagcgtgctaagaagtctgtgagcatcaacgagttcctgaagcctgctgaaggagaaaggttctatggcggccgtggccgtggcggcaggggccgtggagaccgcggaggcttcagaggcggatttggtggtgggggttatcacggcccaccgcccgcaccggcaattcaggaccagaaccagttcccaaccctcggtgggaagtgagattgctgtaccatctcaagtgccacctttaccaatatcatcgacgctgtcaagtttagattttcctatcaccatatatttctgcacggatcctatattgaaacaaataactctgctgcatgtggaccattcatccctgtgtctgtcatgactttgtaaatccgatggttgtcgctt

SEQ ID NO: 16030 - protein, 376 aa, Triticum aestivum
  peptide (1)..(376): Ceres Seq. ID no. 15222989
  misc_feature (137)..(318): Pfam Name: Pfam Description:  Hyaluronan / mRNA binding family
  misc_feature (1)..(376): NCBI GI NO: 34910712 NR Description: putative nuclear RNA binding protein A
  misc_feature (1)..(376): NCBI GI NO: 39725276 NR Description: salt tolerance protein 1 [Beta vulgaris]
  misc_feature (1)..(376): NCBI GI NO: 7488863 NR Description: probable transcription factor - fava bean
  misc_feature (1)..(376): NCBI GI NO: 6492266 NR Description: nuclear RNA binding protein A [Spinacia oleracea]
  misc_feature (1)..(374): NCBI GI NO: 39725278 NR Description: salt tolerance protein 2 [Beta vulgaris]
  misc_feature (1)..(376): NCBI GI NO: 15235894 NR Description: nuclear RNA binding protein [Arabidopsis thaliana]
  misc_feature (1)..(374): NCBI GI NO: 15238039 NR Description: nuclear RNA binding protein, putative
  misc_feature (1)..(374): NCBI GI NO: 21553991 NR Description: nuclear RNA binding protein A-like protein
  misc_feature (1)..(376): NCBI GI NO: 21537052 NR Description: nuclear antigen homolog [Arabidopsis thaliana]
  misc_feature (32)..(376): NCBI GI NO: 34912396 NR Description: putative putative nuclear RNA binding protein A
MATVNPFDLLGDDEGDDPTQLLAKAAALAQKAEAKKAAAPPAAGKGGARTVANLPTKPPPPGQAANESRGGGPLSRGGYGRGERGSGRGGRGGYGQNRDYASEDTNGYRGGYGARTGGEEGAQDRERAPRQPYQGGGRRGGYREGEFGDDSERPPRRNYERQSGTGRGYEIKREGAGRGNWGTTSDEIVAQETEALKQDEKAPAPEKQGAPEDAPQADENKATKDGAAVVEEEKEEDNEMTLDEFEKVMEEKRKALAALKKSEERKVEIDKDLQAMQLLSTKKGNDEVFIKLGADKEALKKKENAEREERAKKSVSINEFLKPAEGERFYGGRGRGGRGRGDRGGFRGGFGGGGYHGPPPAPAIQDQNQFPTLGGK

SEQ ID NO: 16031 - DNA, 1701 bp, Triticum aestivum
  misc_feature (1)..(1701): Ceres Seq. ID no. 14301599
atataaaagcccctgtctccgtctccggttagcaggagagagagagagaggagagaggacgggtggaggccaagaacgcagcacgactgcacagcaccagctgccgaccgaccgcgggcggagctgaccccccgacccgatcagatccctcgccgcccgccccctcagatctccccgcgcgcgcccctcccagatccagctccgagcacttggattttcaacaaagaggtcctgccggcggtggtccgcgtctggaagctcgtcggctgctgcttcttgcttccagtgctctgtggcgaaggcgaccggcggagatggggctggctggggagaagttccagctggggacggtgggggcgctcagcctctccgtcgtctcctcggtctccattgtcatctgcaacaaggcgctcatgagcgccctcggcttcatcttcgccaccacgttgacaagctggcatctcttggtgacattctgttcactccatgtggcattatgcatgaagctctttgagcacaaaccttttgacgcgaggaccgtcatggggttcggagtgctcaacggcatctcgattgggcttctcaatctgagtctgggtttcaactctgttggtttctatcagatgacaaagctggccattattccctgcactgttatattggagactcttttcttcaggaagaagttcagtcgctacatccagctctcccttagtgtgctcctttttggtgttggagttgcaactgtgactgatctgcagctcaatgctatgggatctgtgctgtctttactggcaatcgtcacaacctgtattgctcaaattatgaccaatacaattcaaaagaagttcaaagtatcttcaactcagctgctgtaccaatcatgcccataccaagcattgaccctgttcattgttggtccattcctcgatgggtttctgactaacaaaaatgtctttgcttttgcatacacacctcaagttctgttcttcatcgtgctgtcgtgtctgatatcagtctcggtgaacttcagcactttccttgtgattgggaagacatctcctgtaacttaccaagtccttggccatctaaagacatgcttggttcttgccttcggctatgtcttgctgcatgatccgtttagctggagaaatatacttggaatcctgattgcagtggttgggatgggactatattcatacttctgcacccgtgaagctccaaagcccactgaagcctctccacaagtcactcaggtgaaagaaggtgaatcagaccctttgatcgcagactccttgaacgccgccgagaacggggccgctgcagccaccgacgagcctctgaaggtccccatgtggagctccaagtacgcacgggcatgaacgctcctgccccgacctctgaaggtgcccatgtggagctccaagcgctcgcgggcatgaacgccgcttcggaccttggttcatggtattatatacataattattcagtttagtaggcagatagtagggctggaaggaagccaggccagccctgagtgtaatgaacgttccttgttccatttttgggcctttttttctttccccccttttttttccttctgttttggcttaccatgcatgcctgtggtgctgttgtaaaagtggatctcacaccaaatgactccaaatggcagatctacctttgttgaagctaagatac

SEQ ID NO: 16032 - protein, 355 aa, Triticum aestivum
  peptide (1)..(355): Ceres Seq. ID no. 14301600
  misc_feature (163)..(296): Pfam Name: Pfam Description:  Integral membrane protein DUF6
  misc_feature (1)..(355): NCBI GI NO: 34896140 NR Description: P0701D05.25
  misc_feature (1)..(355): NCBI GI NO: 13699188 NR Description: putative glucose-6-phosphate/phosphate-tranlocat or
  misc_feature (5)..(350): NCBI GI NO: 22329373 NR Description: transporter-related [Arabidopsis thaliana]
  misc_feature (6)..(350): NCBI GI NO: 27311731 NR Description: putative integral membrane protein
  misc_feature (6)..(324): NCBI GI NO: 30683853 NR Description: transporter-related [Arabidopsis thaliana]
  misc_feature (5)..(342): NCBI GI NO: 13384378 NR Description: putative phosphate translocator
  misc_feature (104)..(350): NCBI GI NO: 25406945 NR Description: hypothetical protein
  misc_feature (104)..(342): NCBI GI NO: 37535412 NR Description: putative glucose-6-phosphate/phosphate-translocator
  misc_feature (5)..(82): NCBI GI NO: 37535412 NR Description: putative glucose-6-phosphate/phosphate-translocator
  misc_feature (6)..(310): NCBI GI NO: 18411172 NR Description: transporter-related [Arabidopsis thaliana]
MGLAGEKFQLGTVGALSLSVVSSVSIVICNKALMSALGFIFATTLTSWHLLVTFCSLHVALCMKLFEHKPFDARTVMGFGVLNGISIGLLNLSLGFNSVGFYQMTKLAIIPCTVILETLFFRKKFSRYIQLSLSVLLFGVGVATVTDLQLNAMGSVLSLLAIVTTCIAQIMTNTIQKKFKVSSTQLLYQSCPYQALTLFIVGPFLDGFLTNKNVFAFAYTPQVLFFIVLSCLISVSVNFSTFLVIGKTSPVTYQVLGHLKTCLVLAFGYVLLHDPFSWRNILGILIAVVGMGLYSYFCTREAPKPTEASPQVTQVKEGESDPLIADSLNAAENGAAAATDEPLKVPMWSSKYARA

SEQ ID NO: 16033 - protein, 322 aa, Triticum aestivum
  peptide (1)..(322): Ceres Seq. ID no. 14301601
  misc_feature (130)..(263): Pfam Name: Pfam Description:  Integral membrane protein DUF6
  misc_feature (1)..(322): NCBI GI NO: 34896140 NR Description: P0701D05.25
  misc_feature (1)..(322): NCBI GI NO: 13699188 NR Description: putative glucose-6-phosphate/phosphate-tranlocat or
  misc_feature (1)..(317): NCBI GI NO: 22329373 NR Description: transporter-related [Arabidopsis thaliana]
  misc_feature (1)..(317): NCBI GI NO: 27311731 NR Description: putative integral membrane protein
  misc_feature (1)..(291): NCBI GI NO: 30683853 NR Description: transporter-related [Arabidopsis thaliana]
  misc_feature (1)..(309): NCBI GI NO: 13384378 NR Description: putative phosphate translocator
  misc_feature (71)..(317): NCBI GI NO: 25406945 NR Description: hypothetical protein
  misc_feature (71)..(309): NCBI GI NO: 37535412 NR Description: putative glucose-6-phosphate/phosphate-translocator
  misc_feature (1)..(49): NCBI GI NO: 37535412 NR Description: putative glucose-6-phosphate/phosphate-translocator
  misc_feature (1)..(277): NCBI GI NO: 18411172 NR Description: transporter-related [Arabidopsis thaliana]
MSALGFIFATTLTSWHLLVTFCSLHVALCMKLFEHKPFDARTVMGFGVLNGISIGLLNLSLGFNSVGFYQMTKLAIIPCTVILETLFFRKKFSRYIQLSLSVLLFGVGVATVTDLQLNAMGSVLSLLAIVTTCIAQIMTNTIQKKFKVSSTQLLYQSCPYQALTLFIVGPFLDGFLTNKNVFAFAYTPQVLFFIVLSCLISVSVNFSTFLVIGKTSPVTYQVLGHLKTCLVLAFGYVLLHDPFSWRNILGILIAVVGMGLYSYFCTREAPKPTEASPQVTQVKEGESDPLIADSLNAAENGAAAATDEPLKVPMWSSKYARA

SEQ ID NO: 16034 - protein, 293 aa, Triticum aestivum
  peptide (1)..(293): Ceres Seq. ID no. 14301602
  misc_feature (101)..(234): Pfam Name: Pfam Description:  Integral membrane protein DUF6
  misc_feature (1)..(293): NCBI GI NO: 34896140 NR Description: P0701D05.25
  misc_feature (1)..(293): NCBI GI NO: 13699188 NR Description: putative glucose-6-phosphate/phosphate-tranlocat or
  misc_feature (1)..(288): NCBI GI NO: 22329373 NR Description: transporter-related [Arabidopsis thaliana]
  misc_feature (1)..(288): NCBI GI NO: 27311731 NR Description: putative integral membrane protein
  misc_feature (1)..(262): NCBI GI NO: 30683853 NR Description: transporter-related [Arabidopsis thaliana]
  misc_feature (1)..(280): NCBI GI NO: 13384378 NR Description: putative phosphate translocator
  misc_feature (42)..(288): NCBI GI NO: 25406945 NR Description: hypothetical protein
  misc_feature (42)..(280): NCBI GI NO: 37535412 NR Description: putative glucose-6-phosphate/phosphate-translocator
  misc_feature (1)..(20): NCBI GI NO: 37535412 NR Description: putative glucose-6-phosphate/phosphate-translocator
  misc_feature (1)..(248): NCBI GI NO: 18411172 NR Description: transporter-related [Arabidopsis thaliana]
MKLFEHKPFDARTVMGFGVLNGISIGLLNLSLGFNSVGFYQMTKLAIIPCTVILETLFFRKKFSRYIQLSLSVLLFGVGVATVTDLQLNAMGSVLSLLAIVTTCIAQIMTNTIQKKFKVSSTQLLYQSCPYQALTLFIVGPFLDGFLTNKNVFAFAYTPQVLFFIVLSCLISVSVNFSTFLVIGKTSPVTYQVLGHLKTCLVLAFGYVLLHDPFSWRNILGILIAVVGMGLYSYFCTREAPKPTEASPQVTQVKEGESDPLIADSLNAAENGAAAATDEPLKVPMWSSKYARA

SEQ ID NO: 16035 - DNA, 1219 bp, Triticum aestivum
  misc_feature (1)..(1219): Ceres Seq. ID no. 13656382
gaaaacccgttcgttccgcagaaattcaaaatccaaatcccacccccacccccacctcccctcgccggcggcgaccgaccgaccgaccgatcgatccatggcgccggccgacgtcaaggacgcgtcccctcctccccgccccccgcctccccccgccgggccggcgctccccggcggcgcggaggagtacgtgcgcggctccatcgaggccgccctcggcctccccgtgccggaccgctctatccgcgccaagctcgcggcctacgaggacctgcgccgccgcctccaggaccgcgtcttcgcgctcgaggaggacctccacgccgccgcccgccgcatcgacctcctcaagaacgagtcggcgatgaacgcggaggggatccggcgctgcgtggaggagaaggaggccgtggcggccgcgcgcgatcagctcgccgcccacgccgccaggctcgagaaggagtgcgggctctacgagcgcgacctcgagcgcgccatggagtcctgcgacgagctcgccagggagagcgacgacctgcgcaaccgcctccgtgacgcccccgaccttactgaacaagtccaagcgctgcagagggacaaggagatactcaagaccaacctgaacaaagcagaggaggaggttaagttgctgtttgaggagaacagagccctcgacgaagcaaacaagaggctgctgtgcttgctggagaaggagcagaagcatcggtccgaaagaaagcactccgccagtaattccaccaagaaacgcaagtcgtcgagcctgaaggacacgagcccggtcagcctggccatcgatttcaacagtgcggacgcgtcgaggcagcccctgttgcccttgcagccaaactctccggactgcagggtgcataagaagtgaagctggccgtcccggcattctcctctggatggcttaaactgaagtgaactgaacaactaccccttagctaggcatcgtcgcttgctgcttgcctgatcgatctgactaacttgctgggttaatttggttggttcttgtcggtagaacctcctcggtcatatgtagttcttcttccgcttgtgttggcagctgcctgtgtctatcatatcatgatcctttcatgacaaaattagtagtattatcttagtagttttgtgtctggtgatgggcgtgtaaggctctgattcgacgcttattgtggccagttcgtcgtgcctctgc

SEQ ID NO: 16036 - protein, 298 aa, Triticum aestivum
  peptide (1)..(298): Ceres Seq. ID no. 13656383
  misc_feature (89)..(263): Pfam Name: Pfam Description:  Myosin tail
  misc_feature (61)..(256): NCBI GI NO: 15223854 NR Description: hypothetical protein [Arabidopsis thaliana]
  misc_feature (61)..(198): NCBI GI NO: 15233676 NR Description: expressed protein [Arabidopsis thaliana]
  misc_feature (78)..(296): NCBI GI NO: 15233676 NR Description: expressed protein [Arabidopsis thaliana]
  misc_feature (88)..(277): NCBI GI NO: 15223854 NR Description: hypothetical protein [Arabidopsis thaliana]
KTRSFRRNSKSKSHPHPHLPSPAATDRPTDRSMAPADVKDASPPPRPPPPPAGPALPGGAEEYVRGSIEAALGLPVPDRSIRAKLAAYEDLRRRLQDRVFALEEDLHAAARRIDLLKNESAMNAEGIRRCVEEKEAVAAARDQLAAHAARLEKECGLYERDLERAMESCDELARESDDLRNRLRDAPDLTEQVQALQRDKEILKTNLNKAEEEVKLLFEENRALDEANKRLLCLLEKEQKHRSERKHSASNSTKKRKSSSLKDTSPVSLAIDFNSADASRQPLLPLQPNSPDCRVHKK

SEQ ID NO: 16037 - protein, 266 aa, Triticum aestivum
  peptide (1)..(266): Ceres Seq. ID no. 13656384
  misc_feature (57)..(231): Pfam Name: Pfam Description:  Myosin tail
  misc_feature (29)..(224): NCBI GI NO: 15223854 NR Description: hypothetical protein [Arabidopsis thaliana]
  misc_feature (29)..(166): NCBI GI NO: 15233676 NR Description: expressed protein [Arabidopsis thaliana]
  misc_feature (46)..(264): NCBI GI NO: 15233676 NR Description: expressed protein [Arabidopsis thaliana]
  misc_feature (56)..(245): NCBI GI NO: 15223854 NR Description: hypothetical protein [Arabidopsis thaliana]
MAPADVKDASPPPRPPPPPAGPALPGGAEEYVRGSIEAALGLPVPDRSIRAKLAAYEDLRRRLQDRVFALEEDLHAAARRIDLLKNESAMNAEGIRRCVEEKEAVAAARDQLAAHAARLEKECGLYERDLERAMESCDELARESDDLRNRLRDAPDLTEQVQALQRDKEILKTNLNKAEEEVKLLFEENRALDEANKRLLCLLEKEQKHRSERKHSASNSTKKRKSSSLKDTSPVSLAIDFNSADASRQPLLPLQPNSPDCRVHKK

SEQ ID NO: 16038 - protein, 184 aa, Triticum aestivum
  peptide (1)..(184): Ceres Seq. ID no. 13656385
  misc_feature (15)..(184): NCBI GI NO: 25453418 NR Description: proline-rich proteoglycan 2 [Rattus norvegicus]
  misc_feature (12)..(184): NCBI GI NO: 18025526 NR Description: LF3 [cercopithicine herpesvirus 15]
  misc_feature (12)..(184): NCBI GI NO: 18025526 NR Description: LF3 [cercopithicine herpesvirus 15]
  misc_feature (12)..(184): NCBI GI NO: 18025526 NR Description: LF3 [cercopithicine herpesvirus 15]
  misc_feature (12)..(184): NCBI GI NO: 18025526 NR Description: LF3 [cercopithicine herpesvirus 15]
  misc_feature (12)..(184): NCBI GI NO: 18025526 NR Description: LF3 [cercopithicine herpesvirus 15]
  misc_feature (12)..(184): NCBI GI NO: 18025526 NR Description: LF3 [cercopithicine herpesvirus 15]
  misc_feature (12)..(184): NCBI GI NO: 18025526 NR Description: LF3 [cercopithicine herpesvirus 15]
  misc_feature (12)..(184): NCBI GI NO: 18025526 NR Description: LF3 [cercopithicine herpesvirus 15]
  misc_feature (12)..(184): NCBI GI NO: 18025526 NR Description: LF3 [cercopithicine herpesvirus 15]
ENPFVPQKFKIQIPPPPPPPLAGGDRPTDRSIHGAGRRQGRVPSSPPPASPRRAGAPRRRGGVRARLHRGRPRPPRAGPLYPRQARGLRGPAPPPPGPRLRARGGPPRRRPPHRPPQERVGDERGGDPALRGGEGGRGGRARSARRPRRQAREGVRALRARPRARHGVLRRARQGERRPAQPPP

SEQ ID NO: 16039 - DNA, 1199 bp, Triticum aestivum
  misc_feature (1)..(1199): Ceres Seq. ID no. 13656441
attttttattagttctggacgaagcagtggctgtgtacgagtcgagcacgtcacgcacgcggccaggctgtgctgggagcttcgtccccctccactcccgtcagctccccgggcctgccccgccccgcccccactccgccgccgactgcgagagaagcctgtcatgtcaaacattgggaaatcaactaatattctatggcatgactgcccaattggacaaactgagcgacagaaattgctggggcaaaaaggatgtgtcatatggatcacaggactcagcggttcagggaaaagtaccgttgcctgtgcactgagtcgggaattacactacagaggccaccacacgtatgtccttgatggtgacaacctcagacatggcctcaatcgagatctaagcttcaaggcagaagaccgtacagaaaatatacgaagagttggtgaagtggcaaagctttttgcagatgctggtaccatatgcattgctagtttgatatctccatacaggagagaccgtgatgcatgccgagctctacttccagattctagatttattgaagtatttatggatttgccactagaattatgtgaagctcgtgatcctaaagggttatacaagcttgcacgcacaggaaagattaaagggttcaccggagttgatgatccatacgaatcaccagtgaatagtgagatagtaattaagatggaaggtggggaatgcccttcaccgaaagcaatggcccagcaagttctatcctaccttgagaagaatggatatttgcaggcttagcacacatactccagatccagaagattgatcttattcttctgtgtccataactcatggacacaggtacaatccatttggtccatccggaataaaaggtgctgttatcgaagcaacaagctgcctttttcacgaggaaagggacgcagatcgatgatcagtttgattgttcggcattgctcctctcctgtgtgttgtgctattttagctgtagtttatacttactcatttcggctgaaatggtgtgctgtgctgtgtttatctctactcctaatggacgacttggtgaatagtcttcgcgtttttaaaaaaaaaaaaaaaaaaaaaaaaaaaaaaaaaaaaaaaaaaaaaaaaaaaaaagaaaaaaaaaaaaaaaaaggtttatcaataccgtcaacctcaagggggggcccgg

SEQ ID NO: 16040 - protein, 261 aa, Triticum aestivum
  peptide (1)..(261): Ceres Seq. ID no. 13656442
  misc_feature (83)..(238): Pfam Name: Pfam Description:  Adenylylsulphate kinase
  misc_feature (55)..(260): NCBI GI NO: 15228666 NR Description: adenylylsulfate kinase -related
  misc_feature (55)..(259): NCBI GI NO: 34393551 NR Description: putative adenosine-5'-phosphosulfate kinase
  misc_feature (56)..(261): NCBI GI NO: 7387809 NR Description: Adenylylsulfate kinase, chloroplast precursor
  misc_feature (56)..(259): NCBI GI NO: 6563285 NR Description: adenosine-5'-phosphosulfate kinase [Zea mays]
  misc_feature (55)..(261): NCBI GI NO: 15225999 NR Description: adenosine phosphosulfate kinase -related
  misc_feature (55)..(261): NCBI GI NO: 21553403 NR Description: putative adenosine phosphosulfate kinase
  misc_feature (60)..(260): NCBI GI NO: 15236087 NR Description: adenosine-5-phosphosulfate-kinase
  misc_feature (59)..(261): NCBI GI NO: 9757873 NR Description: adenylylsulfate kinase-like protein
  misc_feature (59)..(261): NCBI GI NO: 18425199 NR Description: adenylylsulfate kinase-related protein
  misc_feature (59)..(261): NCBI GI NO: 21537248 NR Description: adenylylsulfate kinase-like protein
FFISSGRSSGCVRVEHVTHAARLCWELRPPPLPSAPRACPAPPPLRRRLREKPVMSNIGKSTNILWHDCPIGQTERQKLLGQKGCVIWITGLSGSGKSTVACALSRELHYRGHHTYVLDGDNLRHGLNRDLSFKAEDRTENIRRVGEVAKLFADAGTICIASLISPYRRDRDACRALLPDSRFIEVFMDLPLELCEARDPKGLYKLARTGKIKGFTGVDDPYESPVNSEIVIKMEGGECPSPKAMAQQVLSYLEKNGYLQA

SEQ ID NO: 16041 - protein, 207 aa, Triticum aestivum
  peptide (1)..(207): Ceres Seq. ID no. 13656443
  misc_feature (29)..(184): Pfam Name: Pfam Description:  Adenylylsulphate kinase
  misc_feature (1)..(206): NCBI GI NO: 15228666 NR Description: adenylylsulfate kinase -related
  misc_feature (1)..(205): NCBI GI NO: 34393551 NR Description: putative adenosine-5'-phosphosulfate kinase
  misc_feature (2)..(207): NCBI GI NO: 7387809 NR Description: Adenylylsulfate kinase, chloroplast precursor
  misc_feature (2)..(205): NCBI GI NO: 6563285 NR Description: adenosine-5'-phosphosulfate kinase [Zea mays]
  misc_feature (1)..(207): NCBI GI NO: 15225999 NR Description: adenosine phosphosulfate kinase -related
  misc_feature (1)..(207): NCBI GI NO: 21553403 NR Description: putative adenosine phosphosulfate kinase
  misc_feature (6)..(206): NCBI GI NO: 15236087 NR Description: adenosine-5-phosphosulfate-kinase
  misc_feature (5)..(207): NCBI GI NO: 9757873 NR Description: adenylylsulfate kinase-like protein
  misc_feature (5)..(207): NCBI GI NO: 18425199 NR Description: adenylylsulfate kinase-related protein
  misc_feature (5)..(207): NCBI GI NO: 21537248 NR Description: adenylylsulfate kinase-like protein
MSNIGKSTNILWHDCPIGQTERQKLLGQKGCVIWITGLSGSGKSTVACALSRELHYRGHHTYVLDGDNLRHGLNRDLSFKAEDRTENIRRVGEVAKLFADAGTICIASLISPYRRDRDACRALLPDSRFIEVFMDLPLELCEARDPKGLYKLARTGKIKGFTGVDDPYESPVNSEIVIKMEGGECPSPKAMAQQVLSYLEKNGYLQA

SEQ ID NO: 16042 - DNA, 702 bp, Triticum aestivum
  misc_feature (1)..(702): Ceres Seq. ID no. 12619044
aattctatcttcccatccatcttgcggctcgtgccatggcagatcggccgggaagctcgttgccggtcgttcctcgtccggcccggctccggagcggccaagcgtcctactcgtcccgccggcgcgtccatccatccaacgcccagctcctcgtctacctagccctcgccgtcaccttggccgccctcctggtcctcaccggcgtcacgctcaccgtcgcgtcagtcgtgctcgtcgtcctcgtcgtcctcgccccgctcttgctcctcaccagccctctctgggcgccggtggcagtggtggccatcgtctcggggggcgccttgctgtttggctgtagcctcacggtgttcgcgctgagagcgagcacgtgggcgcaccggcgcctgacggggcggcacccggtgggcgcgcgtcgggtgggctacgcccgtgggcgtggccggttcgccggcgcgggtggccacgcgacgggctaccacgggcagggacaagggtacgatcggatgaaggacgccgtgcccggggcctagctggcggcgaacaagcttctccttccgcgcattccgtttggtttggatacgttttacacgctgtgttttagttggaactggttcgttggcgaggtatatactgtgctgatacacgttttcatgtgtgttttgaatgcatttcttgatcctgcgggaatcaactctgctc

SEQ ID NO: 16043 - protein, 176 aa, Triticum aestivum
  peptide (1)..(176): Ceres Seq. ID no. 12619045
  misc_feature (45)..(166): Pfam Name: Pfam Description:  Oleosin
  misc_feature (34)..(176): NCBI GI NO: 15229674 NR Description: oleosin; protein id: At3g18570.1
  misc_feature (44)..(164): NCBI GI NO: 15225211 NR Description: oleosin; protein id: At2g25890.1
  misc_feature (44)..(164): NCBI GI NO: 27754701 NR Description: putative oleosin protein [Arabidopsis thaliana]
  misc_feature (30)..(146): NCBI GI NO: 1362168 NR Description: oleosin 2 - barley
  misc_feature (33)..(144): NCBI GI NO: 5381321 NR Description: 15 kDa oleosin [Sesamum indicum]
  misc_feature (44)..(144): NCBI GI NO: 21311555 NR Description: 15.8 kDa oleosin [Theobroma cacao]
  misc_feature (32)..(146): NCBI GI NO: 38346165 NR Description: OSJNBa0079A21.12
  misc_feature (32)..(146): NCBI GI NO: 3334280 NR Description: OLEOSIN 16 KD (OSE701)
  misc_feature (29)..(146): NCBI GI NO: 82705 NR Description: lipid body-associated major protein L3 - maize
  misc_feature (45)..(171): NCBI GI NO: 129083 NR Description: Oleosin Bn-V (BnV)
FYLPIHLAARAMADRPGSSLPVVPRPARLRSGQASYSSRRRVHPSNAQLLVYLALAVTLAALLVLTGVTLTVASVVLVVLVVLAPLLLLTSPLWAPVAVVAIVSGGALLFGCSLTVFALRASTWAHRRLTGRHPVGARRVGYARGRGRFAGAGGHATGYHGQGQGYDRMKDAVPGA

SEQ ID NO: 16044 - protein, 165 aa, Triticum aestivum
  peptide (1)..(165): Ceres Seq. ID no. 12619046
  misc_feature (34)..(155): Pfam Name: Pfam Description:  Oleosin
  misc_feature (23)..(165): NCBI GI NO: 15229674 NR Description: oleosin; protein id: At3g18570.1
  misc_feature (33)..(153): NCBI GI NO: 15225211 NR Description: oleosin; protein id: At2g25890.1
  misc_feature (33)..(153): NCBI GI NO: 27754701 NR Description: putative oleosin protein [Arabidopsis thaliana]
  misc_feature (19)..(135): NCBI GI NO: 1362168 NR Description: oleosin 2 - barley
  misc_feature (22)..(133): NCBI GI NO: 5381321 NR Description: 15 kDa oleosin [Sesamum indicum]
  misc_feature (33)..(133): NCBI GI NO: 21311555 NR Description: 15.8 kDa oleosin [Theobroma cacao]
  misc_feature (21)..(135): NCBI GI NO: 38346165 NR Description: OSJNBa0079A21.12
  misc_feature (21)..(135): NCBI GI NO: 3334280 NR Description: OLEOSIN 16 KD (OSE701)
  misc_feature (18)..(135): NCBI GI NO: 82705 NR Description: lipid body-associated major protein L3 - maize
  misc_feature (34)..(160): NCBI GI NO: 129083 NR Description: Oleosin Bn-V (BnV)
MADRPGSSLPVVPRPARLRSGQASYSSRRRVHPSNAQLLVYLALAVTLAALLVLTGVTLTVASVVLVVLVVLAPLLLLTSPLWAPVAVVAIVSGGALLFGCSLTVFALRASTWAHRRLTGRHPVGARRVGYARGRGRFAGAGGHATGYHGQGQGYDRMKDAVPGA

SEQ ID NO: 16045 - protein, 112 aa, Triticum aestivum
  peptide (1)..(112): Ceres Seq. ID no. 12619047
  misc_feature (23)..(112): NCBI GI NO: 34906214 NR Description: P0666G04.13
  misc_feature (13)..(112): NCBI GI NO: 23104064 NR Description: hypothetical protein [Azotobacter vinelandii]
ILSSHPSCGSCHGRSAGKLVAGRSSSGPAPERPSVLLVPPARPSIQRPAPRLPSPRRHLGRPPGPHRRHAHRRVSRARRPRRPRPALAPHQPSLGAGGSGGHRLGGRLAVWL

SEQ ID NO: 16046 - DNA, 790 bp, Triticum aestivum
  misc_feature (1)..(790): Ceres Seq. ID no. 12619917
acccagcaacaacacagagcacttggttcccagcttgcctaggttgaagttgacagagcgagcgaaagtagaggagagactcgcagcctcgcaccagcaagctagcttcgcccgccatggccttccgcgacgcggcccgcaagccgctcctgtggctcctcccggccacgctcatcctggcgaccggcggcggcgagcgcgacgccgcccggcggcggctctacgcccccaccctgctggccgcgtggctggtcctcggcgtcgtcacggcggtgctggccgccaacggagggaggatcatgcgcttcgcccgctggaagaggctgctgctccgcggggggctgctgctcgccctcggcctcaacgccttctgcatcttcctcgccctcgacgccgtcgccgaccggctcctgggcgagcagggccccgtctccttcgccgtggctcgcgtcgtgtgcgccctcaccgccgccgccgcgcacctcgacttcggatgggtcgccgtccacggggagtagagcagcgagtcgttacttgttagccgaccggccggcggagactgattagtagtatgtggtcgagtgacttatttttgatgcgtattgttctagtagcaggcattgtgcgcaaattgttaggctgtgtcttcaaagttgatgtccggccttctgccggacacagatcaacatgcatgtagtgtgagaagtgagtatttatgtgtttaagctagtatttttacactgtgtttaagttaagctaaggatttggttaacccccggttggtggcctg

SEQ ID NO: 16047 - protein, 179 aa, Triticum aestivum
  peptide (1)..(179): Ceres Seq. ID no. 12619918
  misc_feature (37)..(174): Pfam Name: Pfam Description:  HlyD family secretion protein
PSNNTEHLVPSLPRLKLTERAKVEERLAASHQQASFARHGLPRRGPQAAPVAPPGHAHPGDRRRRARRRPAAALRPHPAGRVAGPRRRHGGAGRQRREDHALRPLEEAAAPRGAAARPRPQRLLHLPRPRRRRRPAPGRAGPRLLRRGSRRVRPHRRRRAPRLRMGRRPRGVEQRVVTC

SEQ ID NO: 16048 - protein, 133 aa, Triticum aestivum
  peptide (1)..(133): Ceres Seq. ID no. 12619919
MAFRDAARKPLLWLLPATLILATGGGERDAARRRLYAPTLLAAWLVLGVVTAVLAANGGRIMRFARWKRLLLRGGLLLALGLNAFCIFLALDAVADRLLGEQGPVSFAVARVVCALTAAAAHLDFGWVAVHGE

SEQ ID NO: 16049 - DNA, 797 bp, Triticum aestivum
  misc_feature (1)..(797): Ceres Seq. ID no. 15225138
tccgcttgtatttctatttccccgtcccttccttccttctagacaccaatccttcttcctcacccgactgcccaacttccggagcaagcgaattgcatcatgcccgcagtgatgaaagctctcgccgccgcctcgccggtctcggcgccgccatcgccccgtcggagggtcgcaggctcgtcaggcgcgccgtgccaaagcctgcagtcctccttccgcggcatctccctgcggtgctgtcccaggaaaccggcccaccgctcgccgccgctacgcagctctcgggcggcggcgcaggtggtggcgatgaagccggcgatccagttcatccagggcacggacgagcagacgatcccggacgtgcggctgaccaagtcccgcgacggcaccaacggggtggccatcttcgagttcgaccagccgtcggtgttcgactcgtcggcggagctcggggacatcacggggttctacatgatcgacgaggagggcgtgctgcagacggcggacgtgagcgccaagttcgtcaacgggaagccggccagggtggaggccaagtacgtgatgcgcacggccggggactgggaccgcttcatgaggttcatggagaggtactcgcaggccaacggcctccagttcgtcaagaactaagtcacatctcctcgatgggccttgtgtgttgcccatgttcagttcagtataactgtcgagctggtaacgaaggtgaatgattgtactgaggtgtcatgtgtatctcttatgtaactttgacattgtgtgaaattttgtatacaccagcc

SEQ ID NO: 16050 - protein, 241 aa, Triticum aestivum
  peptide (1)..(241): Ceres Seq. ID no. 15225139
RLYFYFPVPSFLLDTNPSSSPDCPTSGASELHHARSDESSRRRLAGLGAAIAPSEGRRLVRRAVPKPAVLLPRHLPAVLSQETGPPLAAATQLSGGGAGGGDEAGDPVHPGHGRADDPGRAADQVPRRHQRGGHLRVRPAVGVRLVGGARGHHGVLHDRRGGRAADGGRERQVRQREAGQGGGQVRDAHGRGLGPLHEVHGEVLAGQRPPVRQELSHISSMGLVCCPCSVQYNCRAGNEGE

SEQ ID NO: 16051 - protein, 182 aa, Triticum aestivum
  peptide (1)..(182): Ceres Seq. ID no. 15225140
  misc_feature (68)..(181): Pfam Name: Pfam Description:  Photosystem II reaction centre W protein, PsbW
  misc_feature (66)..(181): NCBI GI NO: 34907246 NR Description: photosystem II protein W-like protein
  misc_feature (20)..(181): NCBI GI NO: 7488014 NR Description: photosystem II protein W homolog T5F17
  misc_feature (20)..(181): NCBI GI NO: 18417239 NR Description: photosystem II protein W - like
  misc_feature (85)..(181): NCBI GI NO: 19880501 NR Description: saline responsive OSSRII protein [Oryza sativa]
  misc_feature (70)..(181): NCBI GI NO: 11467474 NR Description: photosystem II protein W [Odontella sinensis]
  misc_feature (74)..(181): NCBI GI NO: 11467617 NR Description: photosystem II protein W [Guillardia theta]
  misc_feature (74)..(181): NCBI GI NO: 11465813 NR Description: photosystem II protein W [Porphyra purpurea]
  misc_feature (74)..(181): NCBI GI NO: 11467376 NR Description: photosystem II protein W [Cyanophora paradoxa]
  misc_feature (73)..(182): NCBI GI NO: 30468121 NR Description: photosystem II protein W [Cyanidioschyzon merolae]
  misc_feature (74)..(182): NCBI GI NO: 22298036 NR Description: photosystem II reaction center W protein
MPAVMKALAAASPVSAPPSPRRRVAGSSGAPCQSLQSSFRGISLRCCPRKPAHRSPPLRSSRAAAQVVAMKPAIQFIQGTDEQTIPDVRLTKSRDGTNGVAIFEFDQPSVFDSSAELGDITGFYMIDEEGVLQTADVSAKFVNGKPARVEAKYVMRTAGDWDRFMRFMERYSQANGLQFVKN

SEQ ID NO: 16052 - protein, 178 aa, Triticum aestivum
  peptide (1)..(178): Ceres Seq. ID no. 15225141
  misc_feature (64)..(177): Pfam Name: Pfam Description:  Photosystem II reaction centre W protein, PsbW
  misc_feature (62)..(177): NCBI GI NO: 34907246 NR Description: photosystem II protein W-like protein
  misc_feature (16)..(177): NCBI GI NO: 7488014 NR Description: photosystem II protein W homolog T5F17
  misc_feature (16)..(177): NCBI GI NO: 18417239 NR Description: photosystem II protein W - like
  misc_feature (81)..(177): NCBI GI NO: 19880501 NR Description: saline responsive OSSRII protein [Oryza sativa]
  misc_feature (66)..(177): NCBI GI NO: 11467474 NR Description: photosystem II protein W [Odontella sinensis]
  misc_feature (70)..(177): NCBI GI NO: 11467617 NR Description: photosystem II protein W [Guillardia theta]
  misc_feature (70)..(177): NCBI GI NO: 11465813 NR Description: photosystem II protein W [Porphyra purpurea]
  misc_feature (70)..(177): NCBI GI NO: 11467376 NR Description: photosystem II protein W [Cyanophora paradoxa]
  misc_feature (69)..(178): NCBI GI NO: 30468121 NR Description: photosystem II protein W [Cyanidioschyzon merolae]
  misc_feature (70)..(178): NCBI GI NO: 22298036 NR Description: photosystem II reaction center W protein
MKALAAASPVSAPPSPRRRVAGSSGAPCQSLQSSFRGISLRCCPRKPAHRSPPLRSSRAAAQVVAMKPAIQFIQGTDEQTIPDVRLTKSRDGTNGVAIFEFDQPSVFDSSAELGDITGFYMIDEEGVLQTADVSAKFVNGKPARVEAKYVMRTAGDWDRFMRFMERYSQANGLQFVKN

SEQ ID NO: 16053 - DNA, 949 bp, Triticum aestivum
  misc_feature (1)..(949): Ceres Seq. ID no. 12618747
accggcccaaaagcagagcgcaagtgcgcaccaccggccgagcgagctgagtcgattcgagcagcaggatgggcggcggcggcggcagcagcggcagcccgacggcgagcagcagcagcgacgatgacggagacgcctcgtggagggcggccatcgactctgtagctgtagggggcttcggctacccgtcgtccaacggcgcggcgaaggccgcctctggcggcggcggcggcgtcgaggaggacagcaacgggctggagcagccgccgcaggatgagaagaaggcgcaaacgcctgggctcaagctgtaccagatcaagataaataccatgtgcaactcaagagaccaaagattcttcctgggccagaggtcgacgagaaatcaaagaagttcagacatatgcttcagtctgttgttgttgatggtaacgacgtacttgtttccgcgaaagaagcatcccaaatatcattggctagaatggaagctagagaaactgcagcaaagaccaaagccaagagggaggaagaaagggtgaaccagctgaagaaggtcaggggagagaaatggcttccttccattgctagtaaaatgaagaaagaaaaatcttgggagcaatggcaggaaaaaaagctcaagagcaatggcagtaatggtggatcatttcagctgggccgcatatgctaatcttttaggccatctatgggggcacccttttccggacgccacaagcccacaattgctttgataacttctattttgccatttatccatttgacgatgatggtcgacaagaggattgaattggatgaaaagatagaatgttggactgacgattttgttctaatctagagaacgtagcttatcagtaccttctcaatttttgtagcaaaattatgttatattccaggattgatacgcttgagcagtctctgcctcgcaactggggcc

SEQ ID NO: 16054 - protein, 155 aa, Triticum aestivum
  peptide (1)..(155): Ceres Seq. ID no. 12618748
MGGGGGSSGSPTASSSSDDDGDASWRAAIDSVAVGGFGYPSSNGAAKAASGGGGGVEEDSNGLEQPPQDEKKAQTPGLKLYQIKINTMCNSRDQRFFLGQRSTRNQRSSDICFSLLLLMVTTYLFPRKKHPKYHWLEWKLEKLQQRPKPRGRKKG

SEQ ID NO: 16055 - protein, 94 aa, Triticum aestivum
  peptide (1)..(94): Ceres Seq. ID no. 12618749
  misc_feature (1)..(67): NCBI GI NO: 21593080 NR Description: unknown [Arabidopsis thaliana]
  misc_feature (1)..(67): NCBI GI NO: 15229629 NR Description: putative protein; protein id: At3g49890
MLQSVVVDGNDVLVSAKEASQISLARMEARETAAKTKAKREEERVNQLKKVRGEKWLPSIASKMKKEKSWEQWQEKKLKSNGSNGGSFQLGRIC

SEQ ID NO: 16056 - DNA, 1198 bp, Triticum aestivum
  misc_feature (1)..(1198): Ceres Seq. ID no. 13656486
aaaaaaaaaaaccaaaggccagacccagaccagaccgctcacgccgcaccgcacgcgctgcacgggcacccaacacaagcccttctccgatcgtgctcgctcgccgccggtactagtctagtagagcagcggggaggagctccgagatgagggcgccgcggaggccgatggcggtggtgctcagctgggtgcggaggcagccgcccaaggtcaaggccttcctcgccgtcgtcgcgggcatgaccgcgctcgtcttcatccgcttcatcgtccacgaccacgacaacctcttcgtcgccgccgaggccgcgcacgcgctcggcatcgccgtgctcatctacaagctcaccaaggagaagacctgcgctggactttcactcaagtctcaggatttgacagcattgttcctggccgttaggttgtattgcagctttgttatggagtatgacatccatacaatactggattcagctacactagtagctactctttttgtcatttacatgattcggttcagactgaggtcaacttatatgctggacaaggacaattttgcattgtactacgtggttgtaccatgttgtgtgctggcatttattgctcatccttcaacatcacatatcatgatcaataggatctgctgggccttctgtgtttacttggaagctgtttcagtgctgccccagttgcgcttgatgcagaatacaaagattgttgaaccattcacagctcattatgtgtttgcgttgggtgtggcaaggttccttagctgtgcacactgggtccttcaggtcttggatactcgtggcagattattgactgctctgggctatggcttttggccatcgatggtgctcctctctgaaatcgtccagacgttcatccttgcagatttctgctactactatgtgaagagtcttgctggcggacaactagtgctgcgacttccttctggggtggtgtaaaatctggtgcacaactcatttgttcggtgctgtgtcttactgttgaacagtggctctgcttctggcgcccaaccttctctcttctcatgtgggatggattcaagagtcttgtttgccttttctttttccagttataaactgtttggtgaaaattgtaccggagactgttggtcgtgaagcttaggctgttgagaatactatctatagctgactatttatccagactagttttc

SEQ ID NO: 16057 - protein, 272 aa, Triticum aestivum
  peptide (1)..(272): Ceres Seq. ID no. 13656487
  misc_feature (47)..(258): Pfam Name: Pfam Description:  ER lumen protein retaining receptor
  misc_feature (1)..(272): NCBI GI NO: 15222871 NR Description: ER lumen protein retaining receptor -related
  misc_feature (1)..(272): NCBI GI NO: 9369358 NR Description: F10A5.5 [Arabidopsis thaliana]
  misc_feature (1)..(272): NCBI GI NO: 15223724 NR Description: ER lumen protein-retaining receptor
  misc_feature (1)..(272): NCBI GI NO: 18420309 NR Description: expressed protein [Arabidopsis thaliana]
  misc_feature (5)..(272): NCBI GI NO: 13430654 NR Description: putative ER lumen protein retaining receptor
  misc_feature (5)..(272): NCBI GI NO: 18399619 NR Description: ER lumen protein retaining receptor -related
  misc_feature (5)..(272): NCBI GI NO: 21537286 NR Description: putative ER lumen protein retaining receptor
  misc_feature (1)..(257): NCBI GI NO: 25518365 NR Description: hypothetical protein T20H2
  misc_feature (5)..(256): NCBI GI NO: 25412019 NR Description: probable ER lumen protein retaining receptor
  misc_feature (10)..(268): NCBI GI NO: 15230808 NR Description: ER lumen protein retaining receptor -related
MRAPRRPMAVVLSWVRRQPPKVKAFLAVVAGMTALVFIRFIVHDHDNLFVAAEAAHALGIAVLIYKLTKEKTCAGLSLKSQDLTALFLAVRLYCSFVMEYDIHTILDSATLVATLFVIYMIRFRLRSTYMLDKDNFALYYVVVPCCVLAFIAHPSTSHIMINRICWAFCVYLEAVSVLPQLRLMQNTKIVEPFTAHYVFALGVARFLSCAHWVLQVLDTRGRLLTALGYGFWPSMVLLSEIVQTFILADFCYYYVKSLAGGQLVLRLPSGVV

SEQ ID NO: 16058 - protein, 265 aa, Triticum aestivum
  peptide (1)..(265): Ceres Seq. ID no. 13656488
  misc_feature (40)..(251): Pfam Name: Pfam Description:  ER lumen protein retaining receptor
  misc_feature (1)..(265): NCBI GI NO: 15222871 NR Description: ER lumen protein retaining receptor -related
  misc_feature (1)..(265): NCBI GI NO: 9369358 NR Description: F10A5.5 [Arabidopsis thaliana]
  misc_feature (1)..(265): NCBI GI NO: 15223724 NR Description: ER lumen protein-retaining receptor
  misc_feature (1)..(265): NCBI GI NO: 18420309 NR Description: expressed protein [Arabidopsis thaliana]
  misc_feature (1)..(265): NCBI GI NO: 13430654 NR Description: putative ER lumen protein retaining receptor
  misc_feature (1)..(265): NCBI GI NO: 18399619 NR Description: ER lumen protein retaining receptor -related
  misc_feature (1)..(265): NCBI GI NO: 21537286 NR Description: putative ER lumen protein retaining receptor
  misc_feature (1)..(250): NCBI GI NO: 25518365 NR Description: hypothetical protein T20H2
  misc_feature (1)..(249): NCBI GI NO: 25412019 NR Description: probable ER lumen protein retaining receptor
  misc_feature (3)..(261): NCBI GI NO: 15230808 NR Description: ER lumen protein retaining receptor -related
MAVVLSWVRRQPPKVKAFLAVVAGMTALVFIRFIVHDHDNLFVAAEAAHALGIAVLIYKLTKEKTCAGLSLKSQDLTALFLAVRLYCSFVMEYDIHTILDSATLVATLFVIYMIRFRLRSTYMLDKDNFALYYVVVPCCVLAFIAHPSTSHIMINRICWAFCVYLEAVSVLPQLRLMQNTKIVEPFTAHYVFALGVARFLSCAHWVLQVLDTRGRLLTALGYGFWPSMVLLSEIVQTFILADFCYYYVKSLAGGQLVLRLPSGVV

SEQ ID NO: 16059 - protein, 241 aa, Triticum aestivum
  peptide (1)..(241): Ceres Seq. ID no. 13656489
  misc_feature (16)..(227): Pfam Name: Pfam Description:  ER lumen protein retaining receptor
  misc_feature (1)..(241): NCBI GI NO: 15222871 NR Description: ER lumen protein retaining receptor -related
  misc_feature (1)..(241): NCBI GI NO: 9369358 NR Description: F10A5.5 [Arabidopsis thaliana]
  misc_feature (1)..(241): NCBI GI NO: 15223724 NR Description: ER lumen protein-retaining receptor
  misc_feature (1)..(241): NCBI GI NO: 18420309 NR Description: expressed protein [Arabidopsis thaliana]
  misc_feature (1)..(241): NCBI GI NO: 13430654 NR Description: putative ER lumen protein retaining receptor
  misc_feature (1)..(241): NCBI GI NO: 18399619 NR Description: ER lumen protein retaining receptor -related
  misc_feature (1)..(241): NCBI GI NO: 21537286 NR Description: putative ER lumen protein retaining receptor
  misc_feature (1)..(226): NCBI GI NO: 25518365 NR Description: hypothetical protein T20H2
  misc_feature (1)..(225): NCBI GI NO: 25412019 NR Description: probable ER lumen protein retaining receptor
  misc_feature (1)..(237): NCBI GI NO: 15230808 NR Description: ER lumen protein retaining receptor -related
MTALVFIRFIVHDHDNLFVAAEAAHALGIAVLIYKLTKEKTCAGLSLKSQDLTALFLAVRLYCSFVMEYDIHTILDSATLVATLFVIYMIRFRLRSTYMLDKDNFALYYVVVPCCVLAFIAHPSTSHIMINRICWAFCVYLEAVSVLPQLRLMQNTKIVEPFTAHYVFALGVARFLSCAHWVLQVLDTRGRLLTALGYGFWPSMVLLSEIVQTFILADFCYYYVKSLAGGQLVLRLPSGVV

SEQ ID NO: 16060 - DNA, 2072 bp, Triticum aestivum
  misc_feature (1)..(2072): Ceres Seq. ID no. 13656490
gctggttaggttgtctcgcgttgagggctttgccgacgcaacacgcacccaaaaatcctaatcctcatcgccgccggcgaccatggtgtcgcagcacgacatcctcctcgccgcgggcctcatatccgaccacttcggccccctcgtagcgaaggtgtgcgactgcctcctccgccacggggcgctgcagctgacggagattgtgcgccgtctcaagctcccgcaggggcaagtgaagaactctctcctcgtcctcatccagcacaactgcgttcaggccttctcatcgcccagaggcgataggaccatcacgctctacttggccatcttcgacaatgtcctgcatcggctgcgcttctcaaagttcatctctattatccgcgcggacattccagagtcagaagctcttattgagggattgcttcagaatggtaggctaacatttgaccaacttgtgggacgcacaatctctaaagtgccagaaggcaccatccgaccagcaagggaagaaatacgaatgaacttcaacagacttgtgtatgcacgttatgtggaacgttgcccaaaagctgaaccctatttcaatccacaggaagatgaacaatctacaggtgcaaggagaagagttccaaaaactgccgaggaggttctttcacttgagcagaaagttgtcaatactgcaaccctttctgatccagaaaggttttctgagatcccatacagcatggaggatgcatcaaaaacgaatgattgtcctcataacgctgttgcgggtgctaagcggaaacacggagcctttgaggtagatgaagagctcaactcaacaattgcagagaatgaagtactttggcgggtaaattttgagaaatttatattttgtctaaagaagaagttttgtgcagaccgaaagaagccaaagctgaaggttggcacacatcctatctgggagtcattttttgaagctaacttacctgacaaagatacaaactctgtgacatcatcaataaatggtattttggagaaactaggacaaaaggaaggaggtgcggcaatgtcaattggtgacataaaaccagtcctgctggatttacagtgtactacttccgatggggaagaatttacttttgatttacgcaaaatggttgaagcatgtagaaatgaggagatagagtcgcttgtgaaaaagaaatacgggcaagaagcttttacaatctttaggctattggtcacacaaggttgtgcagttgagacagatcaaattattgacacaacaattctggacaagcagattgttcattcaactttgtacaaactatggaacgacggctacatagatacagagaaaatcgcttccgcagcaggaacagggtacgcacagttttttgtatggagagccaaaaatacatttcgtgagcagttcatcgataatctctaccatgctgctttgaacttgcgccagatggtgaattacattgctgaacttctactcgagggttcgaaggacgaaacaaagctgcggaacagaaagaacattttgatcctggccctcactagacatgatgactctctcatgctgttccatgatttttgagaatacaggctatccattcggttcgtctggccaaatgccactcgtaccggcaggcaggcaggccaccgatgattggaagcggataatcacaataattcgcaagttgcgggggcgcagatgctgcgccacttggagcggctaccattatctatctatcaatccgcgcgcgagaggtagaggtcgcaagcgcgtcgtcatgcacgtatgaccatggacttttgcgagccgtatcgcacccatgtgcgcacacacatgcatgaagcaaccctacaactaatgcgcgcgcatacggccaggtcaactgctgcagttagctggagacaaataacgattctttctttccggaagttgtagatgaaagctaaatcaaaccctgaactttgaatcccggaaattgacactctgaacttgtaatcccggtctattttggaccctatacctgtttggcacatcgggaatacaacaatcccggttgggattt

SEQ ID NO: 16061 - protein, 502 aa, Triticum aestivum
  peptide (1)..(502): Ceres Seq. ID no. 15220581
  misc_feature (10)..(502): Pfam Name: Pfam Description:  RNA polymerase III subunit RPC82
  misc_feature (349)..(470): NCBI GI NO: 34911154 NR Description: putative RNA polymerase III subunit
  misc_feature (1)..(120): NCBI GI NO: 34911154 NR Description: putative RNA polymerase III subunit
  misc_feature (37)..(412): NCBI GI NO: 34911154 NR Description: putative RNA polymerase III subunit
  misc_feature (2)..(502): NCBI GI NO: 18408755 NR Description: RNA polymerase III subunit - like protein
  misc_feature (2)..(502): NCBI GI NO: 21553700 NR Description: RNA polymerase III subunit-like protein
  misc_feature (2)..(502): NCBI GI NO: 11358814 NR Description: RNA polymerase III subunit-like protein -Arabidopsis thaliana
  misc_feature (1)..(440): NCBI GI NO: 28278013 NR Description: Similar to RIKEN cDNA 4933407E01 gene
  misc_feature (2)..(161): NCBI GI NO: 20070909 NR Description: 4933407E01Rik protein [Mus musculus]
  misc_feature (2)..(161): NCBI GI NO: 13325210 NR Description: Unknown (protein for MGC:3538) [Homo sapiens]
  misc_feature (2)..(161): NCBI GI NO: 4753153 NR Description: RNA polymerase III subunit [Homo sapiens]
MVSQHDILLAAGLISDHFGPLVAKVCDCLLRHGALQLTEIVRRLKLPQGQVKNSLLVLIQHNCVQAFSSPRGDRTITLYLAIFDNVLHRLRFSKFISIIRADIPESEALIEGLLQNGRLTFDQLVGRTISKVPEGTIRPAREEIRMNFNRLVYARYVERCPKAEPYFNPQEDEQSTGARRRVPKTAEEVLSLEQKVVNTATLSDPERFSEIPYSMEDASKTNDCPHNAVAGAKRKHGAFEVDEELNSTIAENEVLWRVNFEKFIFCLKKKFCADRKKPKLKVGTHPIWESFFEANLPDKDTNSVTSSINGILEKLGQKEGGAAMSIGDIKPVLLDLQCTTSDGEEFTFDLRKMVEACRNEEIESLVKKKYGQEAFTIFRLLVTQGCAVETDQIIDTTILDKQIVHSTLYKLWNDGYIDTEKIASAAGTGYAQFFVWRAKNTFREQFIDNLYHAALNLRQMVNYIAELLLEGSKDETKLRNRKNILILALTRHDDSLMLFHDF

SEQ ID NO: 16062 - protein, 357 aa, Triticum aestivum
  peptide (1)..(357): Ceres Seq. ID no. 15220582
  misc_feature (1)..(357): Pfam Name: Pfam Description:  RNA polymerase III subunit RPC82
  misc_feature (204)..(325): NCBI GI NO: 34911154 NR Description: putative RNA polymerase III subunit
  misc_feature (1)..(267): NCBI GI NO: 34911154 NR Description: putative RNA polymerase III subunit
  misc_feature (1)..(357): NCBI GI NO: 18408755 NR Description: RNA polymerase III subunit - like protein
  misc_feature (1)..(357): NCBI GI NO: 21553700 NR Description: RNA polymerase III subunit-like protein
  misc_feature (1)..(357): NCBI GI NO: 11358814 NR Description: RNA polymerase III subunit-like protein -Arabidopsis thaliana
  misc_feature (1)..(295): NCBI GI NO: 28278013 NR Description: Similar to RIKEN cDNA 4933407E01 gene
  misc_feature (1)..(16): NCBI GI NO: 20070909 NR Description: 4933407E01Rik protein [Mus musculus]
  misc_feature (1)..(16): NCBI GI NO: 13325210 NR Description: Unknown (protein for MGC:3538) [Homo sapiens]
  misc_feature (1)..(16): NCBI GI NO: 4753153 NR Description: RNA polymerase III subunit [Homo sapiens]
  misc_feature (1)..(16): NCBI GI NO: 21359969 NR Description: polymerase (RNA) III (DNA directed) (62kD)
MNFNRLVYARYVERCPKAEPYFNPQEDEQSTGARRRVPKTAEEVLSLEQKVVNTATLSDPERFSEIPYSMEDASKTNDCPHNAVAGAKRKHGAFEVDEELNSTIAENEVLWRVNFEKFIFCLKKKFCADRKKPKLKVGTHPIWESFFEANLPDKDTNSVTSSINGILEKLGQKEGGAAMSIGDIKPVLLDLQCTTSDGEEFTFDLRKMVEACRNEEIESLVKKKYGQEAFTIFRLLVTQGCAVETDQIIDTTILDKQIVHSTLYKLWNDGYIDTEKIASAAGTGYAQFFVWRAKNTFREQFIDNLYHAALNLRQMVNYIAELLLEGSKDETKLRNRKNILILALTRHDDSLMLFHDF

SEQ ID NO: 16063 - protein, 288 aa, Triticum aestivum
  peptide (1)..(288): Ceres Seq. ID no. 15220583
  misc_feature (1)..(288): Pfam Name: Pfam Description:  RNA polymerase III subunit RPC82
  misc_feature (135)..(256): NCBI GI NO: 34911154 NR Description: putative RNA polymerase III subunit
  misc_feature (1)..(198): NCBI GI NO: 34911154 NR Description: putative RNA polymerase III subunit
  misc_feature (1)..(288): NCBI GI NO: 18408755 NR Description: RNA polymerase III subunit - like protein
  misc_feature (1)..(288): NCBI GI NO: 21553700 NR Description: RNA polymerase III subunit-like protein
  misc_feature (1)..(288): NCBI GI NO: 11358814 NR Description: RNA polymerase III subunit-like protein -Arabidopsis thaliana
  misc_feature (1)..(226): NCBI GI NO: 28278013 NR Description: Similar to RIKEN cDNA 4933407E01 gene
MEDASKTNDCPHNAVAGAKRKHGAFEVDEELNSTIAENEVLWRVNFEKFIFCLKKKFCADRKKPKLKVGTHPIWESFFEANLPDKDTNSVTSSINGILEKLGQKEGGAAMSIGDIKPVLLDLQCTTSDGEEFTFDLRKMVEACRNEEIESLVKKKYGQEAFTIFRLLVTQGCAVETDQIIDTTILDKQIVHSTLYKLWNDGYIDTEKIASAAGTGYAQFFVWRAKNTFREQFIDNLYHAALNLRQMVNYIAELLLEGSKDETKLRNRKNILILALTRHDDSLMLFHDF

SEQ ID NO: 16064 - DNA, 1408 bp, Triticum aestivum
  misc_feature (1)..(1408): Ceres Seq. ID no. 13663031
gaacatcctaatcgaaaaagattggcgttcaaacagtccagttccagcccgactcgggccgcacccatgtctcgtctcatcccccggcggctccaccgcgccgtctccgccggcggcgcgacctcctcgagcccctcaaatctccgcagcagcgacgccaccaccgccgccacctcaaatgcgatcgtcagcctcgtcgcggcaggcggcgacggcggcagcctggaggcggacctggaccgcctcggcccgcccctctccgacgccgccgtgtcggcggcgctccgcgcgctcacggaccgcggcgtccccgcgttccgcttcttcgcatggctctcccggcacaggggcgtccccccgagcgcccgcgcccacaacctgctcgtccagaacgccggcaggctggccgactaccccaccatggcccgcgccctcgacctagtgtcggcgcgacggctcccccttaccgagcaggcgttcttgttcctggaggccgccgcgaggtcgtcctcatctgcgagcagcgtggatgacgcggtgagggcgactctgacggttttggatggtgccggtggcccgtgccgcgcgtccggcgtgttctcgctggtcaaggcgttggcctcgatcggcgagttcgacgcggccgtctgggtgatcgaggagacggccaggagagcgagctactacaacgtcctcttggctgccaagtgcaaggctggtgacttccggggcgcccgcgaggtgttcgacggaatgaggaaggggagctgcggcccaaatgccaactcctggaactacctcctcgggtgcctgctgaagaatggcagggccaccgaagcatgcgacctcgttgagaccatggagaggtcgggacacgacgacatcccaaactcactgtcgtacgagatcctcacataccatgcctgcaaggcggggaagatggattcggcaaggcagattctcgatcagttgttctcagaaaatctgacgccgaggattacaatccacacagccttcatcaaagggtacttctatactgggagaatcaaagatgcttgcgattatgtgagggctatgagcaccagggattcacactccaccaacaggaactacagcctgctcgccaagctgttgcacaggtcggggaggatcgtcgaggctggaagtgtcctgtatgagttgatggagaagggcctcaggcctgaccattctgcttatgttacagtgtccaaaggtttgcacaagatgggaaggggagatctgtgtgctgaattgaagtccttgtttcagaatttcattgtacagtcaggtttggaacactgatttacgtttgagctcttgttgagtcatctacttgagtgaaacttgcttgtccacataagatatttaggtgccatttatgccttcc

SEQ ID NO: 16065 - protein, 440 aa, Triticum aestivum
  peptide (1)..(440): Ceres Seq. ID no. 13663032
  misc_feature (262)..(295): Pfam Name: Pfam Description:  PPR repeat
  misc_feature (14)..(436): NCBI GI NO: 34902210 NR Description: Putative callose synthase
  misc_feature (13)..(428): NCBI GI NO: 34896658 NR Description: putative membrane-associated salt-inducible protein
  misc_feature (118)..(400): NCBI GI NO: 15225665 NR Description: pentatricopeptide (PPR) repeat-containing protein
  misc_feature (200)..(440): NCBI GI NO: 15235288 NR Description: pentatricopeptide (PPR) repeat-containing protein
  misc_feature (201)..(431): NCBI GI NO: 15238505 NR Description: pentatricopeptide (PPR) repeat-containing protein
  misc_feature (75)..(411): NCBI GI NO: 15223926 NR Description: pentatricopeptide (PPR) repeat-containing protein
  misc_feature (202)..(420): NCBI GI NO: 15218325 NR Description: pentatricopeptide (PPR) repeat-containing protein
  misc_feature (49)..(440): NCBI GI NO: 34906814 NR Description: similar to membrane-associated salt-inducibleprotein
  misc_feature (105)..(418): NCBI GI NO: 15232243 NR Description: pentatricopeptide (PPR) repeat-containing protein
  misc_feature (191)..(440): NCBI GI NO: 37535752 NR Description: hypothetical protein
EHPNRKRLAFKQSSSSPTRAAPMSRLIPRRLHRAVSAGGATSSSPSNLRSSDATTAATSNAIVSLVAAGGDGGSLEADLDRLGPPLSDAAVSAALRALTDRGVPAFRFFAWLSRHRGVPPSARAHNLLVQNAGRLADYPTMARALDLVSARRLPLTEQAFLFLEAAARSSSSASSVDDAVRATLTVLDGAGGPCRASGVFSLVKALASIGEFDAAVWVIEETARRASYYNVLLAAKCKAGDFRGAREVFDGMRKGSCGPNANSWNYLLGCLLKNGRATEACDLVETMERSGHDDIPNSLSYEILTYHACKAGKMDSARQILDQLFSENLTPRITIHTAFIKGYFYTGRIKDACDYVRAMSTRDSHSTNRNYSLLAKLLHRSGRIVEAGSVLYELMEKGLRPDHSAYVTVSKGLHKMGRGDLCAELKSLFQNFIVQSGLEH

SEQ ID NO: 16066 - protein, 418 aa, Triticum aestivum
  peptide (1)..(418): Ceres Seq. ID no. 13663033
  misc_feature (240)..(273): Pfam Name: Pfam Description:  PPR repeat
  misc_feature (1)..(414): NCBI GI NO: 34902210 NR Description: Putative callose synthase
  misc_feature (1)..(406): NCBI GI NO: 34896658 NR Description: putative membrane-associated salt-inducible protein
  misc_feature (96)..(378): NCBI GI NO: 15225665 NR Description: pentatricopeptide (PPR) repeat-containing protein
  misc_feature (178)..(418): NCBI GI NO: 15235288 NR Description: pentatricopeptide (PPR) repeat-containing protein
  misc_feature (179)..(409): NCBI GI NO: 15238505 NR Description: pentatricopeptide (PPR) repeat-containing protein
  misc_feature (53)..(389): NCBI GI NO: 15223926 NR Description: pentatricopeptide (PPR) repeat-containing protein
  misc_feature (180)..(398): NCBI GI NO: 15218325 NR Description: pentatricopeptide (PPR) repeat-containing protein
  misc_feature (27)..(418): NCBI GI NO: 34906814 NR Description: similar to membrane-associated salt-inducibleprotein
  misc_feature (83)..(396): NCBI GI NO: 15232243 NR Description: pentatricopeptide (PPR) repeat-containing protein
  misc_feature (169)..(418): NCBI GI NO: 37535752 NR Description: hypothetical protein
MSRLIPRRLHRAVSAGGATSSSPSNLRSSDATTAATSNAIVSLVAAGGDGGSLEADLDRLGPPLSDAAVSAALRALTDRGVPAFRFFAWLSRHRGVPPSARAHNLLVQNAGRLADYPTMARALDLVSARRLPLTEQAFLFLEAAARSSSSASSVDDAVRATLTVLDGAGGPCRASGVFSLVKALASIGEFDAAVWVIEETARRASYYNVLLAAKCKAGDFRGAREVFDGMRKGSCGPNANSWNYLLGCLLKNGRATEACDLVETMERSGHDDIPNSLSYEILTYHACKAGKMDSARQILDQLFSENLTPRITIHTAFIKGYFYTGRIKDACDYVRAMSTRDSHSTNRNYSLLAKLLHRSGRIVEAGSVLYELMEKGLRPDHSAYVTVSKGLHKMGRGDLCAELKSLFQNFIVQSGLEH

SEQ ID NO: 16067 - protein, 300 aa, Triticum aestivum
  peptide (1)..(300): Ceres Seq. ID no. 13663034
  misc_feature (122)..(155): Pfam Name: Pfam Description:  PPR repeat
  misc_feature (1)..(296): NCBI GI NO: 34902210 NR Description: Putative callose synthase
  misc_feature (1)..(288): NCBI GI NO: 34896658 NR Description: putative membrane-associated salt-inducible protein
  misc_feature (1)..(260): NCBI GI NO: 15225665 NR Description: pentatricopeptide (PPR) repeat-containing protein
  misc_feature (60)..(300): NCBI GI NO: 15235288 NR Description: pentatricopeptide (PPR) repeat-containing protein
  misc_feature (61)..(291): NCBI GI NO: 15238505 NR Description: pentatricopeptide (PPR) repeat-containing protein
  misc_feature (1)..(271): NCBI GI NO: 15223926 NR Description: pentatricopeptide (PPR) repeat-containing protein
  misc_feature (62)..(280): NCBI GI NO: 15218325 NR Description: pentatricopeptide (PPR) repeat-containing protein
  misc_feature (1)..(300): NCBI GI NO: 34906814 NR Description: similar to membrane-associated salt-inducibleprotein
  misc_feature (1)..(278): NCBI GI NO: 15232243 NR Description: pentatricopeptide (PPR) repeat-containing protein
  misc_feature (51)..(300): NCBI GI NO: 37535752 NR Description: hypothetical protein
MARALDLVSARRLPLTEQAFLFLEAAARSSSSASSVDDAVRATLTVLDGAGGPCRASGVFSLVKALASIGEFDAAVWVIEETARRASYYNVLLAAKCKAGDFRGAREVFDGMRKGSCGPNANSWNYLLGCLLKNGRATEACDLVETMERSGHDDIPNSLSYEILTYHACKAGKMDSARQILDQLFSENLTPRITIHTAFIKGYFYTGRIKDACDYVRAMSTRDSHSTNRNYSLLAKLLHRSGRIVEAGSVLYELMEKGLRPDHSAYVTVSKGLHKMGRGDLCAELKSLFQNFIVQSGLEH

SEQ ID NO: 16068 - DNA, 1497 bp, Triticum aestivum
  misc_feature (1)..(1497): Ceres Seq. ID no. 13656501
cacccccacccgcatcctcctccctccccccaagctgcaattcacctccgaattcggtcgcccatggcaccgcggctgctctgatcctacccacctaccccctccccctcccctcccctcccctcccagctgctctcccttcccctctcgtttgaaaatggcaatgctggtggatcctccgaatggcatgggaaaccaagggaagcactattactcaatgtggcaaaccttgtttgagattgacaccaagtatgtgcctatcaaacccataggccgaggagcttatggaatagtttgctcatccataaaccgtgagacaaacgagaaagtagcgataaagaagatacataatgtattcgacaaccgtgtggatgcactaaggaccttgcgggagctgaaactcctccggcatctccgccatgagaatgttatttctttgaaggatataatgatgcctgtacaaaggaggagctttaaggatgtgtacttggtttatgagctcatggatacagacctgcatcagataatcaaatcgcctcaggggctttccaacgaccactgccaatattttctttttcagttgcttcgaggactgaaatacctccattcagcagagatactccacagagacctaaaacctgggaacctactggtgaatgcaaactgtgatctgaagatatgcgattttggtcttgcacgtacaaacagtagtaaaggccagtttatgactgaatatgtcgtcacccgctggtatagggctcctgagttgctgctttgctgcgacaactacggcacttccattgatgtttggtctgttggctgcatctttgctgagctacttggccgcaagcctattttccccgggacagagtgcctaaatcagctaaaactgatagtcaatgttcttggcacgatgagcgagtctgacctggagttcatcgacaacccaaaggcccgcagatatatcaagaccctcccctacactcctggtgttccacttgcaagtatgtacccacatgcacaccctctggccatcgatctattacagaagatgctcatcttcgaccctaccaaaagggtcagtgttacccaggcccttgagcacccttacatgtctcctctgtatgacccaagtgcaaaccctcccgcgcaagtgcccatcgatctcgacatagatgagaacatcagctcagagatgatcagggaaatgatgtggcaggagatgcttcactaccaccctgaagccgccacggcagtaaacatgtgacgacgatcttgcagtgccctgggaagaacccggcaggctcactccttttttcctcgaaaagactactgcgattatcgcacctattaagtaaccacgacgtgcagtgtggagaggtatctccgtgtaaatatgcagtgcgataagaaccgcatatggatagttcttgttatggaccactttggtgtatgtatactgttgtgttgttgtataagctcatgaaagaactgttg

SEQ ID NO: 16069 - protein, 421 aa, Triticum aestivum
  peptide (1)..(421): Ceres Seq. ID no. 13656502
  misc_feature (84)..(371): Pfam Name: Pfam Description:  Protein kinase domain
  misc_feature (53)..(420): NCBI GI NO: 7341300 NR Description: MAP kinase MAPK2 [Oryza sativa]
  misc_feature (53)..(421): NCBI GI NO: 11869994 NR Description: MAP kinase 2 [Oryza sativa]
  misc_feature (53)..(421): NCBI GI NO: 24412848 NR Description: putative mitogen-activated protein kinase, msrmk3
  misc_feature (53)..(421): NCBI GI NO: 6491800 NR Description: MAPK4 protein [Oryza sativa]
  misc_feature (53)..(418): NCBI GI NO: 2499614 NR Description: MITOGEN-ACTIVATED PROTEIN KINASE HOMOLOG NTF3
  misc_feature (53)..(417): NCBI GI NO: 15218451 NR Description: mitogen-activated protein kinase
  misc_feature (53)..(419): NCBI GI NO: 2499612 NR Description: MITOGEN-ACTIVATED PROTEIN KINASE HOMOLOG 1 (PMEK1)
  misc_feature (53)..(420): NCBI GI NO: 18406388 NR Description: mitogen-activated protein kinase
  misc_feature (53)..(420): NCBI GI NO: 533281 NR Description: ATMPK2 [Arabidopsis thaliana]
  misc_feature (53)..(417): NCBI GI NO: 533280 NR Description: ATMPK1 [Arabidopsis thaliana]
TPTRILLPPPKLQFTSEFGRPWHRGCSDPTHLPPPPPLPSPPSCSPFPSRLKMAMLVDPPNGMGNQGKHYYSMWQTLFEIDTKYVPIKPIGRGAYGIVCSSINRETNEKVAIKKIHNVFDNRVDALRTLRELKLLRHLRHENVISLKDIMMPVQRRSFKDVYLVYELMDTDLHQIIKSPQGLSNDHCQYFLFQLLRGLKYLHSAEILHRDLKPGNLLVNANCDLKICDFGLARTNSSKGQFMTEYVVTRWYRAPELLLCCDNYGTSIDVWSVGCIFAELLGRKPIFPGTECLNQLKLIVNVLGTMSESDLEFIDNPKARRYIKTLPYTPGVPLASMYPHAHPLAIDLLQKMLIFDPTKRVSVTQALEHPYMSPLYDPSANPPAQVPIDLDIDENISSEMIREMMWQEMLHYHPEAATAVNM

SEQ ID NO: 16070 - protein, 369 aa, Triticum aestivum
  peptide (1)..(369): Ceres Seq. ID no. 13656503
  misc_feature (32)..(319): Pfam Name: Pfam Description:  Protein kinase domain
  misc_feature (1)..(368): NCBI GI NO: 7341300 NR Description: MAP kinase MAPK2 [Oryza sativa]
  misc_feature (1)..(369): NCBI GI NO: 11869994 NR Description: MAP kinase 2 [Oryza sativa]
  misc_feature (1)..(369): NCBI GI NO: 24412848 NR Description: putative mitogen-activated protein kinase, msrmk3
  misc_feature (1)..(369): NCBI GI NO: 6491800 NR Description: MAPK4 protein [Oryza sativa]
  misc_feature (1)..(366): NCBI GI NO: 2499614 NR Description: MITOGEN-ACTIVATED PROTEIN KINASE HOMOLOG NTF3
  misc_feature (1)..(365): NCBI GI NO: 15218451 NR Description: mitogen-activated protein kinase
  misc_feature (1)..(367): NCBI GI NO: 2499612 NR Description: MITOGEN-ACTIVATED PROTEIN KINASE HOMOLOG 1 (PMEK1)
  misc_feature (1)..(368): NCBI GI NO: 18406388 NR Description: mitogen-activated protein kinase
  misc_feature (1)..(368): NCBI GI NO: 533281 NR Description: ATMPK2 [Arabidopsis thaliana]
  misc_feature (1)..(365): NCBI GI NO: 533280 NR Description: ATMPK1 [Arabidopsis thaliana]
MAMLVDPPNGMGNQGKHYYSMWQTLFEIDTKYVPIKPIGRGAYGIVCSSINRETNEKVAIKKIHNVFDNRVDALRTLRELKLLRHLRHENVISLKDIMMPVQRRSFKDVYLVYELMDTDLHQIIKSPQGLSNDHCQYFLFQLLRGLKYLHSAEILHRDLKPGNLLVNANCDLKICDFGLARTNSSKGQFMTEYVVTRWYRAPELLLCCDNYGTSIDVWSVGCIFAELLGRKPIFPGTECLNQLKLIVNVLGTMSESDLEFIDNPKARRYIKTLPYTPGVPLASMYPHAHPLAIDLLQKMLIFDPTKRVSVTQALEHPYMSPLYDPSANPPAQVPIDLDIDENISSEMIREMMWQEMLHYHPEAATAVNM

SEQ ID NO: 16071 - protein, 367 aa, Triticum aestivum
  peptide (1)..(367): Ceres Seq. ID no. 13656504
  misc_feature (30)..(317): Pfam Name: Pfam Description:  Protein kinase domain
  misc_feature (1)..(366): NCBI GI NO: 7341300 NR Description: MAP kinase MAPK2 [Oryza sativa]
  misc_feature (1)..(367): NCBI GI NO: 11869994 NR Description: MAP kinase 2 [Oryza sativa]
  misc_feature (1)..(367): NCBI GI NO: 24412848 NR Description: putative mitogen-activated protein kinase, msrmk3
  misc_feature (1)..(367): NCBI GI NO: 6491800 NR Description: MAPK4 protein [Oryza sativa]
  misc_feature (1)..(364): NCBI GI NO: 2499614 NR Description: MITOGEN-ACTIVATED PROTEIN KINASE HOMOLOG NTF3
  misc_feature (1)..(363): NCBI GI NO: 15218451 NR Description: mitogen-activated protein kinase
  misc_feature (1)..(365): NCBI GI NO: 2499612 NR Description: MITOGEN-ACTIVATED PROTEIN KINASE HOMOLOG 1 (PMEK1)
  misc_feature (1)..(366): NCBI GI NO: 18406388 NR Description: mitogen-activated protein kinase
  misc_feature (1)..(366): NCBI GI NO: 533281 NR Description: ATMPK2 [Arabidopsis thaliana]
  misc_feature (1)..(363): NCBI GI NO: 533280 NR Description: ATMPK1 [Arabidopsis thaliana]
MLVDPPNGMGNQGKHYYSMWQTLFEIDTKYVPIKPIGRGAYGIVCSSINRETNEKVAIKKIHNVFDNRVDALRTLRELKLLRHLRHENVISLKDIMMPVQRRSFKDVYLVYELMDTDLHQIIKSPQGLSNDHCQYFLFQLLRGLKYLHSAEILHRDLKPGNLLVNANCDLKICDFGLARTNSSKGQFMTEYVVTRWYRAPELLLCCDNYGTSIDVWSVGCIFAELLGRKPIFPGTECLNQLKLIVNVLGTMSESDLEFIDNPKARRYIKTLPYTPGVPLASMYPHAHPLAIDLLQKMLIFDPTKRVSVTQALEHPYMSPLYDPSANPPAQVPIDLDIDENISSEMIREMMWQEMLHYHPEAATAVNM

SEQ ID NO: 16072 - DNA, 1518 bp, Triticum aestivum
  misc_feature (1)..(1518): Ceres Seq. ID no. 13656752
agaacatcctaatcgaaaagtaccatctgggctggggaggggaaggagcagaggggatgagcggcggcggcggcggcggagtgctgggcgccggctcgtcgtaccagagcttcgtccgcaccgcgctggaacagacccgcctccgcaccgccctcacgccccacccctcgcaggaaaagttcaggctcatacgagccaacgacgatgctgctgttttggacgctctctcattcagcacccccaagatcagactgcttcgcagcttgacggttgagaagaaaaactcggttcaggttcttgactttgctgctttctctgaacctgaatatgatcttcctatattttgcgccaacgcttttacgactcctgcacagagtatcgttgtcttggacctcaatccgctatacgatataactgaagacaaggattacaaagataaatactacaggaatttgatgcctcttatacacaagtatagtgaggtgcttggatcttatccttcaccccaaatatattaccccagtcttcttctattagctttatacatagagtgctatctttatttagagaaaatgcagcttctgccatggggtggcaagattacgagcgaatctctgagattcttctctccaatcgtgatctggactatatttgagcccactgaacgtaaccatcatgttctgtattcagctttgatggattactataaggtttggcttcagttaacggatcaagcaactgaagaaaatgacacaacgaaagttgttcgtaacagagaagcgcaacatagatatctcacatggagggctgaaaaggatcctgggtttccacttctgaagaagttgattggtgaaagccatgccaaggatttggtgactgagttcctgttcgaaggagtgcattctcttggaactaaatctttcctggactattttcgcgagtacgcatgtgacgacgggacagtaaacaagaagaggagtatgatcgggaaatctttcgaagataggccttgggatgctacgggagaattcattggtggcaaggatgcaggatgagatcttttgatgcaggatgatatcttttgcagtaggatccacatgggcattcttagggttttgctgagctcctagcgattcacggcactcttgcttctcaggtttcattttaacgttcttcgttacacgctgtccgggctaatttgcatccatgtaatttcatctgagttctctgtgtagcttagaaaacatgtgtaatatttgattgaccctgataagtttttatggcaagtttagcgacgcgagaatggcaactttagttgtcaagcaagtcaacttcttttcggatggtacgttttagttttttttcgggtttgtttttttcaatttggatagcaactttaattgtaaaaaaaatatcagggccggagtgcttcgtgctacacgtgtggcacttatcatttgggtatattaaattgagtgcattatcaataataccttgcagtgatattatacactggcc

SEQ ID NO: 16073 - protein, 350 aa, Triticum aestivum
  peptide (1)..(350): Ceres Seq. ID no. 13656753
  misc_feature (37)..(161): Pfam Name: Pfam Description:  Ferredoxin-dependent bilin reductase
  misc_feature (20)..(161): NCBI GI NO: 19386814 NR Description: B1147A04.9
  misc_feature (288)..(349): NCBI GI NO: 19386814 NR Description: B1147A04.9
  misc_feature (234)..(272): NCBI GI NO: 19386814 NR Description: B1147A04.9
  misc_feature (186)..(345): NCBI GI NO: 22330928 NR Description: auxin-regulated protein [Arabidopsis thaliana]
  misc_feature (33)..(160): NCBI GI NO: 22330928 NR Description: auxin-regulated protein [Arabidopsis thaliana]
  misc_feature (186)..(345): NCBI GI NO: 21618130 NR Description: unknown [Arabidopsis thaliana]
  misc_feature (186)..(345): NCBI GI NO: 30680787 NR Description: auxin-regulated protein [Arabidopsis thaliana]
  misc_feature (33)..(160): NCBI GI NO: 21618130 NR Description: unknown [Arabidopsis thaliana]
  misc_feature (33)..(160): NCBI GI NO: 30680787 NR Description: auxin-regulated protein [Arabidopsis thaliana]
  misc_feature (186)..(272): NCBI GI NO: 5923680 NR Description: hypothetical protein [Arabidopsis thaliana]
NILIEKYHLGWGGEGAEGMSGGGGGGVLGAGSSYQSFVRTALEQTRLRTALTPHPSQEKFRLIRANDDAAVLDALSFSTPKIRLLRSLTVEKKNSVQVLDFAAFSEPEYDLPIFCANAFTTPAQSIVVLDLNPLYDITEDKDYKDKYYRNLMPLIHKYSEVLGSYPSPQIYYPSLLLLALYIECYLYLEKMQLLPWGGKITSESLRFFSPIVIWTIFEPTERNHHVLYSALMDYYKVWLQLTDQATEENDTTKVVRNREAQHRYLTWRAEKDPGFPLLKKLIGESHAKDLVTEFLFEGVHSLGTKSFLDYFREYACDDGTVNKKRSMIGKSFEDRPWDATGEFIGGKDAG

SEQ ID NO: 16074 - protein, 332 aa, Triticum aestivum
  peptide (1)..(332): Ceres Seq. ID no. 13656754
  misc_feature (19)..(143): Pfam Name: Pfam Description:  Ferredoxin-dependent bilin reductase
  misc_feature (2)..(143): NCBI GI NO: 19386814 NR Description: B1147A04.9
  misc_feature (270)..(331): NCBI GI NO: 19386814 NR Description: B1147A04.9
  misc_feature (216)..(254): NCBI GI NO: 19386814 NR Description: B1147A04.9
  misc_feature (168)..(327): NCBI GI NO: 22330928 NR Description: auxin-regulated protein [Arabidopsis thaliana]
  misc_feature (15)..(142): NCBI GI NO: 22330928 NR Description: auxin-regulated protein [Arabidopsis thaliana]
  misc_feature (168)..(327): NCBI GI NO: 21618130 NR Description: unknown [Arabidopsis thaliana]
  misc_feature (168)..(327): NCBI GI NO: 30680787 NR Description: auxin-regulated protein [Arabidopsis thaliana]
  misc_feature (15)..(142): NCBI GI NO: 21618130 NR Description: unknown [Arabidopsis thaliana]
  misc_feature (15)..(142): NCBI GI NO: 30680787 NR Description: auxin-regulated protein [Arabidopsis thaliana]
  misc_feature (168)..(254): NCBI GI NO: 5923680 NR Description: hypothetical protein [Arabidopsis thaliana]
MSGGGGGGVLGAGSSYQSFVRTALEQTRLRTALTPHPSQEKFRLIRANDDAAVLDALSFSTPKIRLLRSLTVEKKNSVQVLDFAAFSEPEYDLPIFCANAFTTPAQSIVVLDLNPLYDITEDKDYKDKYYRNLMPLIHKYSEVLGSYPSPQIYYPSLLLLALYIECYLYLEKMQLLPWGGKITSESLRFFSPIVIWTIFEPTERNHHVLYSALMDYYKVWLQLTDQATEENDTTKVVRNREAQHRYLTWRAEKDPGFPLLKKLIGESHAKDLVTEFLFEGVHSLGTKSFLDYFREYACDDGTVNKKRSMIGKSFEDRPWDATGEFIGGKDAG

SEQ ID NO: 16075 - protein, 199 aa, Triticum aestivum
  peptide (1)..(199): Ceres Seq. ID no. 13656755
  misc_feature (137)..(198): NCBI GI NO: 19386814 NR Description: B1147A04.9
  misc_feature (83)..(121): NCBI GI NO: 19386814 NR Description: B1147A04.9
  misc_feature (35)..(194): NCBI GI NO: 22330928 NR Description: auxin-regulated protein [Arabidopsis thaliana]
  misc_feature (35)..(194): NCBI GI NO: 21618130 NR Description: unknown [Arabidopsis thaliana]
  misc_feature (35)..(194): NCBI GI NO: 30680787 NR Description: auxin-regulated protein [Arabidopsis thaliana]
  misc_feature (35)..(121): NCBI GI NO: 5923680 NR Description: hypothetical protein [Arabidopsis thaliana]
  misc_feature (137)..(194): NCBI GI NO: 5923680 NR Description: hypothetical protein [Arabidopsis thaliana]
  misc_feature (1)..(25): NCBI GI NO: 23127198 NR Description: hypothetical protein [Nostoc punctiforme]
  misc_feature (41)..(146): NCBI GI NO: 23127198 NR Description: hypothetical protein [Nostoc punctiforme]
  misc_feature (1)..(15): NCBI GI NO: 37520830 NR Description: phycoerythrobilin:ferredoxin oxidoreductase
MPLIHKYSEVLGSYPSPQIYYPSLLLLALYIECYLYLEKMQLLPWGGKITSESLRFFSPIVIWTIFEPTERNHHVLYSALMDYYKVWLQLTDQATEENDTTKVVRNREAQHRYLTWRAEKDPGFPLLKKLIGESHAKDLVTEFLFEGVHSLGTKSFLDYFREYACDDGTVNKKRSMIGKSFEDRPWDATGEFIGGKDAG

SEQ ID NO: 16076 - DNA, 1572 bp, Triticum aestivum
  misc_feature (1)..(1572): Ceres Seq. ID no. 13656546
agattcccaactggcatgtccctgatcccgcgcgctgctccggcggcgagcatggcgttcgccggacgggaccccgctgtcatctccctcctcaagatgctaccgctgctcgtgctcctcaccttctcctccgccgcggcgcccccggcggcggcgtcaccctccgccgtgcacaacaacaactgggccgtgctcgtctgtacctctcgcttctggtttaattatagacatatggccaacacgctgtctttgtacaggactgttaagagattgggaatacctgacgagaggataatacttatgttggctgatgatatggcttgtaatcctcggaacaattatcctgcccaagtgttcaacaatgagaaccaccagcttaatctttatggtgacaatgttgaggttgattaccgaggttatgaggttacagttgaaaactttttgcgagttttgactggaagacatgagagcgctgtaccaagatcaaagcgtctcttaagtgatgaaggaagccatattcttttgtacatgactggacatggcggggatgaatttttgaagttccaagataacgaagaacttcagagccatgatttagcagatgcagtaaagcaaatgaaggagaagcatagatttaaagagttgttgataatggtagatacctgccaggctgctactcttttttcacagcttcaatcacccggtgttttggcgattggtagcagcatgaagggggaaaactcttactctcaccatctcgactcagacattggtgtttctgttgtggatagatttaccttccatacacttgctttctttgagaagctgaacatgtatagcaatgcttcattgaacagtcttttcaactcatacgacccttctatgctgctgtctactgcatattatcgaatggatctttacaagcgtgcattaaacgaggtcccagtgacaaatttctttggatcagtcatgaagactatccacactgattcagcctacacaggctttctagctgcacatgacgcggaactccccctttctgcaggaaataatatacttgatcatgtcatgtcacagaatgaggctagtgcaagaagatcgaacatagaagagatgaatgaggcacaattaatgtcccatggatggacagaggtcctgctagagcagctggaagacaaaaattctgatgttgttgtgatgtatggtctgggaactatgggcatattgctggcaatttgaacctggctatcaatgtaggaactctgaagtgtgctcttaacacatcatcttcttgcagaaaaacttagtcatactaactttcacaggatgggaccaagaagaatgaaaagaagagagatactttggcggtcaacgttctgtatttcctttttacctaatcatagcatccattcagtttggaacaaattgttgtatgtagttttcgcatggtaccctctactttttggatacgtagctcgatatgtttcgtagtcatttttatgcatctgtgctcctgcatcacatattgtacctgtcagattatttcattgctacttgaaaatatttccatgt

SEQ ID NO: 16077 - protein, 412 aa, Triticum aestivum
  peptide (1)..(412): Ceres Seq. ID no. 15219828
  misc_feature (32)..(336): Pfam Name: Pfam Description:  Peptidase C13 family
  misc_feature (31)..(412): NCBI GI NO: 18390936 NR Description: GPI-anchor transamidase (U32517) -related
  misc_feature (31)..(412): NCBI GI NO: 21537105 NR Description: putative GPI-anchor transamidase
  misc_feature (31)..(336): NCBI GI NO: 7485988 NR Description: hypothetical protein F22O13
  misc_feature (50)..(336): NCBI GI NO: 9802563 NR Description: F22O13.24 [Arabidopsis thaliana]
  misc_feature (34)..(371): NCBI GI NO: 6320538 NR Description: Protein involved in the attachment ofglycosylphosphatidylinositol
  misc_feature (33)..(331): NCBI GI NO: 1518259 NR Description: gpi8 [Homo sapiens]
  misc_feature (33)..(331): NCBI GI NO: 23199983 NR Description: phosphatidylinositol glycan, class K precursor
  misc_feature (52)..(330): NCBI GI NO: 7511896 NR Description: hypothetical protein 133E12
  misc_feature (52)..(330): NCBI GI NO: 24639234 NR Description: CG4406-PA [Drosophila melanogaster]
  misc_feature (33)..(331): NCBI GI NO: 20071719 NR Description: Similar to phosphatidylinositol glycan, class K
RFPTGMSLIPRAAPAASMAFAGRDPAVISLLKMLPLLVLLTFSSAAAPPAAASPSAVHNNNWAVLVCTSRFWFNYRHMANTLSLYRTVKRLGIPDERIILMLADDMACNPRNNYPAQVFNNENHQLNLYGDNVEVDYRGYEVTVENFLRVLTGRHESAVPRSKRLLSDEGSHILLYMTGHGGDEFLKFQDNEELQSHDLADAVKQMKEKHRFKELLIMVDTCQAATLFSQLQSPGVLAIGSSMKGENSYSHHLDSDIGVSVVDRFTFHTLAFFEKLNMYSNASLNSLFNSYDPSMLLSTAYYRMDLYKRALNEVPVTNFFGSVMKTIHTDSAYTGFLAAHDAELPLSAGNNILDHVMSQNEASARRSNIEEMNEAQLMSHGWTEVLLEQLEDKNSDVVVMYGLGTMGILLAI

SEQ ID NO: 16078 - protein, 407 aa, Triticum aestivum
  peptide (1)..(407): Ceres Seq. ID no. 15219829
  misc_feature (27)..(331): Pfam Name: Pfam Description:  Peptidase C13 family
  misc_feature (26)..(407): NCBI GI NO: 18390936 NR Description: GPI-anchor transamidase (U32517) -related
  misc_feature (26)..(407): NCBI GI NO: 21537105 NR Description: putative GPI-anchor transamidase
  misc_feature (26)..(331): NCBI GI NO: 7485988 NR Description: hypothetical protein F22O13
  misc_feature (45)..(331): NCBI GI NO: 9802563 NR Description: F22O13.24 [Arabidopsis thaliana]
  misc_feature (29)..(366): NCBI GI NO: 6320538 NR Description: Protein involved in the attachment ofglycosylphosphatidylinositol
  misc_feature (28)..(326): NCBI GI NO: 1518259 NR Description: gpi8 [Homo sapiens]
  misc_feature (28)..(326): NCBI GI NO: 23199983 NR Description: phosphatidylinositol glycan, class K precursor
  misc_feature (47)..(325): NCBI GI NO: 7511896 NR Description: hypothetical protein 133E12
  misc_feature (47)..(325): NCBI GI NO: 24639234 NR Description: CG4406-PA [Drosophila melanogaster]
  misc_feature (28)..(326): NCBI GI NO: 20071719 NR Description: Similar to phosphatidylinositol glycan, class K
MSLIPRAAPAASMAFAGRDPAVISLLKMLPLLVLLTFSSAAAPPAAASPSAVHNNNWAVLVCTSRFWFNYRHMANTLSLYRTVKRLGIPDERIILMLADDMACNPRNNYPAQVFNNENHQLNLYGDNVEVDYRGYEVTVENFLRVLTGRHESAVPRSKRLLSDEGSHILLYMTGHGGDEFLKFQDNEELQSHDLADAVKQMKEKHRFKELLIMVDTCQAATLFSQLQSPGVLAIGSSMKGENSYSHHLDSDIGVSVVDRFTFHTLAFFEKLNMYSNASLNSLFNSYDPSMLLSTAYYRMDLYKRALNEVPVTNFFGSVMKTIHTDSAYTGFLAAHDAELPLSAGNNILDHVMSQNEASARRSNIEEMNEAQLMSHGWTEVLLEQLEDKNSDVVVMYGLGTMGILLAI

SEQ ID NO: 16079 - protein, 395 aa, Triticum aestivum
  peptide (1)..(395): Ceres Seq. ID no. 15219830
  misc_feature (15)..(319): Pfam Name: Pfam Description:  Peptidase C13 family
  misc_feature (14)..(395): NCBI GI NO: 18390936 NR Description: GPI-anchor transamidase (U32517) -related
  misc_feature (14)..(395): NCBI GI NO: 21537105 NR Description: putative GPI-anchor transamidase
  misc_feature (14)..(319): NCBI GI NO: 7485988 NR Description: hypothetical protein F22O13
  misc_feature (33)..(319): NCBI GI NO: 9802563 NR Description: F22O13.24 [Arabidopsis thaliana]
  misc_feature (17)..(354): NCBI GI NO: 6320538 NR Description: Protein involved in the attachment ofglycosylphosphatidylinositol
  misc_feature (16)..(314): NCBI GI NO: 1518259 NR Description: gpi8 [Homo sapiens]
  misc_feature (16)..(314): NCBI GI NO: 23199983 NR Description: phosphatidylinositol glycan, class K precursor
  misc_feature (35)..(313): NCBI GI NO: 7511896 NR Description: hypothetical protein 133E12
  misc_feature (35)..(313): NCBI GI NO: 24639234 NR Description: CG4406-PA [Drosophila melanogaster]
  misc_feature (16)..(314): NCBI GI NO: 20071719 NR Description: Similar to phosphatidylinositol glycan, class K
MAFAGRDPAVISLLKMLPLLVLLTFSSAAAPPAAASPSAVHNNNWAVLVCTSRFWFNYRHMANTLSLYRTVKRLGIPDERIILMLADDMACNPRNNYPAQVFNNENHQLNLYGDNVEVDYRGYEVTVENFLRVLTGRHESAVPRSKRLLSDEGSHILLYMTGHGGDEFLKFQDNEELQSHDLADAVKQMKEKHRFKELLIMVDTCQAATLFSQLQSPGVLAIGSSMKGENSYSHHLDSDIGVSVVDRFTFHTLAFFEKLNMYSNASLNSLFNSYDPSMLLSTAYYRMDLYKRALNEVPVTNFFGSVMKTIHTDSAYTGFLAAHDAELPLSAGNNILDHVMSQNEASARRSNIEEMNEAQLMSHGWTEVLLEQLEDKNSDVVVMYGLGTMGILLAI

SEQ ID NO: 16080 - DNA, 781 bp, Triticum aestivum
  misc_feature (1)..(781): Ceres Seq. ID no. 12619783
ccattcacactcctcctcccgcaccataccatcaatcaaggtgctcgagggacataggatcagaagaaagacgggaggatggatcggtacgaggtggtgagggacatcgggtccgggaacttcggggtggcgaagctggtgcgggacacgcccacggtatacgcacgtacagctcgatcgcaatggcgtcgctcgtcgccgtccagccggtcgccgtgcggggcctggccggcagctccatctccggccgcaagctcgccgtccggcccgcctccgccgccgtctcccgctccacccgcagggctcgcggggcggcggtggtggccaagtacggggagaagagcgtctacttcgacctggacgacatcgccaacacgacggggcagtgggacctgtacggcagcgacgcggcgtcgccctacaacggcctgcagagcaagttcttcaacaccttcgccgcgcccttcaccaagcgagggctgctgctcaaggtcctgctgctcggcggcggctccctgctcgcctacgtcagcgccaccgcctcccccgacctgctccccatcaagaaggggccccagctgccccccaccccggggccacgtggcaagatctaagtagatctgcaatcaaggccttcttcctcctctcgcctcgtgcttgtgtaccatggatctgatggattcccccctatggccctatctatgtcctctgttgatacttgatctttgtactacttcgtatcagtaattggaaagatgctgcttgcatgatgcatgcaatt

SEQ ID NO: 16081 - protein, 203 aa, Triticum aestivum
  peptide (1)..(203): Ceres Seq. ID no. 12619784
  misc_feature (63)..(203): Pfam Name: Pfam Description:  Photosystem I reaction centre subunit VI
  misc_feature (61)..(203): NCBI GI NO: 131196 NR Description: Photosystem I reaction center subunit VI
  misc_feature (61)..(203): NCBI GI NO: 3885894 NR Description: photosystem-1 H subunit GOS5 [Oryza sativa]
  misc_feature (61)..(203): NCBI GI NO: 17380533 NR Description: Photosystem I reaction center subunit VI
  misc_feature (61)..(203): NCBI GI NO: 72679 NR Description: photosystem I protein psaH precursor - rice
  misc_feature (61)..(203): NCBI GI NO: 3914465 NR Description: Photosystem I reaction center subunit VI
  misc_feature (60)..(203): NCBI GI NO: 7443139 NR Description: photosystem I protein psaH precursor
  misc_feature (60)..(203): NCBI GI NO: 7443138 NR Description: photosystem I protein psaH precursor
  misc_feature (60)..(203): NCBI GI NO: 131199 NR Description: Photosystem I reaction center subunit VI
  misc_feature (60)..(203): NCBI GI NO: 33520419 NR Description: photosystem I psaH protein [Trifolium pratense]
  misc_feature (60)..(203): NCBI GI NO: 7443140 NR Description: photosystem I psaH precursor - wood tobacco
IHTPPPAPYHQSRCSRDIGSEERREDGSVRGGEGHRVRELRGGEAGAGHAHGIRTYSSIAMASLVAVQPVAVRGLAGSSISGRKLAVRPASAAVSRSTRRARGAAVVAKYGEKSVYFDLDDIANTTGQWDLYGSDAASPYNGLQSKFFNTFAAPFTKRGLLLKVLLLGGGSLLAYVSATASPDLLPIKKGPQLPPTPGPRGKI

SEQ ID NO: 16082 - protein, 179 aa, Triticum aestivum
  peptide (1)..(179): Ceres Seq. ID no. 12619785
  misc_feature (123)..(174): Pfam Name: Pfam Description:  Extensin-like region
  misc_feature (22)..(179): NCBI GI NO: 23017082 NR Description: hypothetical protein [Thermobifida fusca]
  misc_feature (1)..(179): NCBI GI NO: 39580893 NR Description: Hypothetical protein CBG21491
  misc_feature (40)..(170): NCBI GI NO: 20138131 NR Description: Vegetative cell wall protein gp1 precursor
  misc_feature (29)..(168): NCBI GI NO: 7248459 NR Description: arabinogalactan protein [Zea mays]
  misc_feature (25)..(179): NCBI GI NO: 11359723 NR Description: proteophosphoglycan, membrane-associated
  misc_feature (40)..(179): NCBI GI NO: 12018149 NR Description: gamete-specific hydroxyproline-rich glyco protein a2
  misc_feature (40)..(171): NCBI GI NO: 20138131 NR Description: Vegetative cell wall protein gp1 precursor
  misc_feature (41)..(170): NCBI GI NO: 20138131 NR Description: Vegetative cell wall protein gp1 precursor
  misc_feature (40)..(171): NCBI GI NO: 20138131 NR Description: Vegetative cell wall protein gp1 precursor
  misc_feature (24)..(171): NCBI GI NO: 2429362 NR Description: proline rich protein [Santalum album]
MDRYEVVRDIGSGNFGVAKLVRDTPTVYARTARSQWRRSSPSSRSPCGAWPAAPSPAASSPSGPPPPPSPAPPAGLAGRRWWPSTGRRASTSTWTTSPTRRGSGTCTAATRRRPTTACRASSSTPSPRPSPSEGCCSRSCCSAAAPCSPTSAPPPPPTCSPSRRGPSCPPPRGHVARSK

SEQ ID NO: 16083 - protein, 143 aa, Triticum aestivum
  peptide (1)..(143): Ceres Seq. ID no. 12619786
  misc_feature (3)..(143): Pfam Name: Pfam Description:  Photosystem I reaction centre subunit VI
  misc_feature (1)..(143): NCBI GI NO: 131196 NR Description: Photosystem I reaction center subunit VI
  misc_feature (1)..(143): NCBI GI NO: 3885894 NR Description: photosystem-1 H subunit GOS5 [Oryza sativa]
  misc_feature (1)..(143): NCBI GI NO: 17380533 NR Description: Photosystem I reaction center subunit VI
  misc_feature (1)..(143): NCBI GI NO: 72679 NR Description: photosystem I protein psaH precursor - rice
  misc_feature (1)..(143): NCBI GI NO: 3914465 NR Description: Photosystem I reaction center subunit VI
  misc_feature (1)..(143): NCBI GI NO: 7443139 NR Description: photosystem I protein psaH precursor
  misc_feature (1)..(143): NCBI GI NO: 7443138 NR Description: photosystem I protein psaH precursor
  misc_feature (1)..(143): NCBI GI NO: 131199 NR Description: Photosystem I reaction center subunit VI
  misc_feature (1)..(143): NCBI GI NO: 33520419 NR Description: photosystem I psaH protein [Trifolium pratense]
  misc_feature (1)..(143): NCBI GI NO: 7443140 NR Description: photosystem I psaH precursor - wood tobacco
MASLVAVQPVAVRGLAGSSISGRKLAVRPASAAVSRSTRRARGAAVVAKYGEKSVYFDLDDIANTTGQWDLYGSDAASPYNGLQSKFFNTFAAPFTKRGLLLKVLLLGGGSLLAYVSATASPDLLPIKKGPQLPPTPGPRGKI

SEQ ID NO: 16084 - DNA, 1791 bp, Triticum aestivum
  misc_feature (1)..(1791): Ceres Seq. ID no. 15176091
accgatagaccgataaactagcagccgtcccgtcatcaaccttgcaagttagaaaccagccccgtctccaaattaatggacgtcacggcatgggcatgggcctccttcctggccgtcgtcctcgtcgtcctaaccattctccgccgtggccgtggctcgcagccgcaggggaacaggcttccaccaggaccgaagccgtggcccgtgatcggcaacctcaatctcatcggcgcgctgccgcaccgctccatccacgagctgtccaagcagtacggcccgttgatgcagctccggttcgggtccttccccgtcgtggtgggctcctcggccgagatggccaggttcttcctcaagacccacgacacggtgttcgccgaccggccaaggaccgccgccggcaagcacaccacctacaactactccgacgtcctgtgggcgccctacaacgcccacttccgccgcgcgcgcaggctcttcgccaccgagctgttcagcgcggcgcggctcgagtcctacaagcacatccgccacgaggaggtgagcgcgctgctgcgcgacctggccgcggccgctcacggggcatctggccgtgccgtgccgctcaggggacacctctttgcggcgaccaacggcatcatctcgcgggtggtgctgggcaagaagtacgcggagaaggaggcaggaggctcggcagccatggcgctggaggatttgtcgggcttaattgaggagtttttccttctcaacggcgtgatcaacgtcggcgatttcattccgtggttcgactggctggacctgcaagggtacgtccggaggatgaagaagtacagcaagaagatggaccgctttctcgagcatgtcctggaggaacacgaggagcgccggcgtgtcaagggggagcagttcgtggcgagggacatggtggacgtgctgctgcagctcgccgacaatcctaaccggcttgaccgagacaccgtcaaggctctcactcaggaacttatcgtcgggggttcagatacctccagtgtaaccatggagtgggcgatgtcggaggttctcaggaaccctgaggtcttgggcaaggccaccaaggagctcgaccgtgtggtcggccgtgacaggatggtcatggagaaggacatcccagacctcccttacatagaggccatcgtgaaggaggcgatgcgcatgcacccggtgtcgcccatgttggcgccccacctcgcacgcgaggacgcgtccgtcgacggccacgacatccccgccggcacgctcgtcctcgtcaacgtgtgggccatcggccgtgacccgacctattgggacgcgccggaggagttccgaccagagaggtttatggggagcaagatcgacgtgaaggggcaggacatggagctgctaccgttcggggccggccgccggatgtgccccgggtatagcctgggactgaaggtggtgcagttgatcgtcgccaatcttctgcatggcttcacgtgggggctccctgacggcacaacgatggagcaactcaacatggaggagatatatgggctcaccactgcgcgcaagttcccgttagaggcagtggtggagcctaagctccaagaacacgtcttctcgtagcgccgccgccgcaaaaatgctagactcacgcatcattacggaggttctagtcattgtggtatacgacttctagtccaagtcagttttatacccctaccctaagtcggtttgtaccctcttatatactcttgtatgccgcatcaaatcatcaataagcaacagttttattct

SEQ ID NO: 16085 - protein, 514 aa, Triticum aestivum
  peptide (1)..(514): Ceres Seq. ID no. 15176092
  misc_feature (36)..(500): Pfam Name: Pfam Description:  Cytochrome P450
  misc_feature (8)..(514): NCBI GI NO: 18377404 NR Description: cytochrome P450 monooxygenase CYP92A1
  misc_feature (10)..(514): NCBI GI NO: 14423327 NR Description: elicitor-inducible cytochrome P450
  misc_feature (10)..(514): NCBI GI NO: 7430636 NR Description: probable cytochrome P450
  misc_feature (8)..(502): NCBI GI NO: 7430637 NR Description: cytochrome P450 - common tobacco
  misc_feature (1)..(497): NCBI GI NO: 12004682 NR Description: cytochrome P450 [Pisum sativum]
  misc_feature (35)..(513): NCBI GI NO: 27151498 NR Description: Flavonoid 3'-monooxygenase
  misc_feature (7)..(514): NCBI GI NO: 18148451 NR Description: flavonoid 3'-hydroxylase [Glycine max]
  misc_feature (35)..(514): NCBI GI NO: 37694931 NR Description: flavonoid 3'-hydroxylase [Ipomoea purpurea]
  misc_feature (14)..(514): NCBI GI NO: 12231880 NR Description: putative flavonoid 3'-hydroxylase
  misc_feature (12)..(513): NCBI GI NO: 15241483 NR Description: cytochrome P450 75A5 / flavonoid 3'-monooxygenase /flavonoid 3'-hydroxylase
MDVTAWAWASFLAVVLVVLTILRRGRGSQPQGNRLPPGPKPWPVIGNLNLIGALPHRSIHELSKQYGPLMQLRFGSFPVVVGSSAEMARFFLKTHDTVFADRPRTAAGKHTTYNYSDVLWAPYNAHFRRARRLFATELFSAARLESYKHIRHEEVSALLRDLAAAAHGASGRAVPLRGHLFAATNGIISRVVLGKKYAEKEAGGSAAMALEDLSGLIEEFFLLNGVINVGDFIPWFDWLDLQGYVRRMKKYSKKMDRFLEHVLEEHEERRRVKGEQFVARDMVDVLLQLADNPNRLDRDTVKALTQELIVGGSDTSSVTMEWAMSEVLRNPEVLGKATKELDRVVGRDRMVMEKDIPDLPYIEAIVKEAMRMHPVSPMLAPHLAREDASVDGHDIPAGTLVLVNVWAIGRDPTYWDAPEEFRPERFMGSKIDVKGQDMELLPFGAGRRMCPGYSLGLKVVQLIVANLLHGFTWGLPDGTTMEQLNMEEIYGLTTARKFPLEAVVEPKLQEHVFS

SEQ ID NO: 16086 - protein, 445 aa, Triticum aestivum
  peptide (1)..(445): Ceres Seq. ID no. 15176093
  misc_feature (1)..(431): Pfam Name: Pfam Description:  Cytochrome P450
  misc_feature (1)..(445): NCBI GI NO: 18377404 NR Description: cytochrome P450 monooxygenase CYP92A1
  misc_feature (1)..(445): NCBI GI NO: 14423327 NR Description: elicitor-inducible cytochrome P450
  misc_feature (1)..(445): NCBI GI NO: 7430636 NR Description: probable cytochrome P450
  misc_feature (1)..(433): NCBI GI NO: 7430637 NR Description: cytochrome P450 - common tobacco
  misc_feature (1)..(428): NCBI GI NO: 12004682 NR Description: cytochrome P450 [Pisum sativum]
  misc_feature (1)..(444): NCBI GI NO: 27151498 NR Description: Flavonoid 3'-monooxygenase
  misc_feature (1)..(445): NCBI GI NO: 18148451 NR Description: flavonoid 3'-hydroxylase [Glycine max]
  misc_feature (1)..(445): NCBI GI NO: 37694931 NR Description: flavonoid 3'-hydroxylase [Ipomoea purpurea]
  misc_feature (1)..(445): NCBI GI NO: 12231880 NR Description: putative flavonoid 3'-hydroxylase
  misc_feature (1)..(444): NCBI GI NO: 15241483 NR Description: cytochrome P450 75A5 / flavonoid 3'-monooxygenase /flavonoid 3'-hydroxylase
MQLRFGSFPVVVGSSAEMARFFLKTHDTVFADRPRTAAGKHTTYNYSDVLWAPYNAHFRRARRLFATELFSAARLESYKHIRHEEVSALLRDLAAAAHGASGRAVPLRGHLFAATNGIISRVVLGKKYAEKEAGGSAAMALEDLSGLIEEFFLLNGVINVGDFIPWFDWLDLQGYVRRMKKYSKKMDRFLEHVLEEHEERRRVKGEQFVARDMVDVLLQLADNPNRLDRDTVKALTQELIVGGSDTSSVTMEWAMSEVLRNPEVLGKATKELDRVVGRDRMVMEKDIPDLPYIEAIVKEAMRMHPVSPMLAPHLAREDASVDGHDIPAGTLVLVNVWAIGRDPTYWDAPEEFRPERFMGSKIDVKGQDMELLPFGAGRRMCPGYSLGLKVVQLIVANLLHGFTWGLPDGTTMEQLNMEEIYGLTTARKFPLEAVVEPKLQEHVFS

SEQ ID NO: 16087 - protein, 428 aa, Triticum aestivum
  peptide (1)..(428): Ceres Seq. ID no. 15176094
  misc_feature (1)..(414): Pfam Name: Pfam Description:  Cytochrome P450
  misc_feature (1)..(428): NCBI GI NO: 18377404 NR Description: cytochrome P450 monooxygenase CYP92A1
  misc_feature (1)..(428): NCBI GI NO: 14423327 NR Description: elicitor-inducible cytochrome P450
  misc_feature (1)..(428): NCBI GI NO: 7430636 NR Description: probable cytochrome P450
  misc_feature (1)..(416): NCBI GI NO: 7430637 NR Description: cytochrome P450 - common tobacco
  misc_feature (1)..(411): NCBI GI NO: 12004682 NR Description: cytochrome P450 [Pisum sativum]
  misc_feature (1)..(427): NCBI GI NO: 27151498 NR Description: Flavonoid 3'-monooxygenase
  misc_feature (1)..(428): NCBI GI NO: 18148451 NR Description: flavonoid 3'-hydroxylase [Glycine max]
  misc_feature (1)..(428): NCBI GI NO: 37694931 NR Description: flavonoid 3'-hydroxylase [Ipomoea purpurea]
  misc_feature (1)..(428): NCBI GI NO: 12231880 NR Description: putative flavonoid 3'-hydroxylase
  misc_feature (1)..(427): NCBI GI NO: 15241483 NR Description: cytochrome P450 75A5 / flavonoid 3'-monooxygenase /flavonoid 3'-hydroxylase
MARFFLKTHDTVFADRPRTAAGKHTTYNYSDVLWAPYNAHFRRARRLFATELFSAARLESYKHIRHEEVSALLRDLAAAAHGASGRAVPLRGHLFAATNGIISRVVLGKKYAEKEAGGSAAMALEDLSGLIEEFFLLNGVINVGDFIPWFDWLDLQGYVRRMKKYSKKMDRFLEHVLEEHEERRRVKGEQFVARDMVDVLLQLADNPNRLDRDTVKALTQELIVGGSDTSSVTMEWAMSEVLRNPEVLGKATKELDRVVGRDRMVMEKDIPDLPYIEAIVKEAMRMHPVSPMLAPHLAREDASVDGHDIPAGTLVLVNVWAIGRDPTYWDAPEEFRPERFMGSKIDVKGQDMELLPFGAGRRMCPGYSLGLKVVQLIVANLLHGFTWGLPDGTTMEQLNMEEIYGLTTARKFPLEAVVEPKLQEHVFS

SEQ ID NO: 16088 - DNA, 1820 bp, Triticum aestivum
  misc_feature (1)..(1820): Ceres Seq. ID no. 14307991
atatctttttcatccacttgtctccaagcaagaaagaggccacggccggataagactcaccaagcttagctaagcaacttcaacaatggagggggcgggaacagcactactgtggagccaggtgggctcgccgctggcatccttcccggcgatgctgttcacggtggcggccatggcggccggcgcattcgcagtgtacttctacgcgccgtcatggcgcctgcgcagtgtgccgggccccctcgcttacggcctcgtcggccacctgccgctgctggacaagcatggctcccaggcgttcggcgtcctcgcaaagaaatacgggcccatctacaggttctacatgggcaggcagccgctggtggtggtcgccgacccggagctgtgcagggaggccggcatcaagaagttcaagagcatcgtcgacaggagcgtgccggtcaccatcgctagctcgcccatccactacaagagcctcctcttcaccaagggctcgacatggcaggcgatgcggaacgtgatcatctccatctaccagccatcgcacctggcgagcctcatcccggccatccagccctacatcgagcaggcgggcaacctgttctgccccggcgaggagatcaccttctctgacatctccatcaggctcttcaccgacgtcatcggccaggccgcctttggcgtcgacttcgggctcaccaaggacgccgccgacgacgccgagaagatcatccacgacgcgccccgcgacttcatccagaagcacctgtacgccaccacgtccctcaagatggacctgtcgggctcgctgtccatgctcgtcggcacgttcctgccggcgctccagaagccgctgcggcagctgatgctgcgcgtgccgggctccatggaccggcggatggacgagaccaacacggcgctcagcggcgagctcgacaccatcgtggcggagcgggcggctcaggcggaccggggccagaagaacttcctctccgtgctgctcaacggcatcgacaccagcgacgccatgaggaagctcttcacgccggactacgtcagcgcgctcacgtacgagcacttgctcgcgggctccggcaccatgtccttcacgctgtcgagcctggtgtacctcgtgtcggcgcacccggaggtggaggggaagctgctccaggagatcgacgcgttcgggcccaaggacgtggtgcccgacgccgacgacctccgcaccaagttcccctacctggagcaggtcgtcaaggagaccatgcgatactttcccggctccccggtggtctcgagggaggcgaccgccgacgtcgagatcggaggctatttcctgcccaaggggacgtgggtgtggctggcgacggcggtgctggggagggacccggagcagttcccggagcccgaagcgttccggccggagcgcttcgacccggagagcgagcagtgcaagcggagacacccctacgcgtacatccccttcggcatcggcccgcgggcgtgcccggggcagaagttcgcgttccagcagctcaagctcaccgtcatccacctctaccgccgctacgtcttcaggcactcgaccagcatggagtccccactgcagctgcagttctccatcgtcaccaacttcaagaacggtgtcaagctccaggtcgttcaaaggaagaactaatatgagtgtatgacagtaagtttgtgaccgactatttatgtactagtagcagtacatgcttgctccgttcaacgtgtgcgaaatcacatttttgaaagtgtgtaatcgatttgttcaattcaataaaagttgcggttttgac

SEQ ID NO: 16089 - protein, 530 aa, Triticum aestivum
  peptide (1)..(530): Ceres Seq. ID no. 14307992
  misc_feature (10)..(528): NCBI GI NO: 30683024 NR Description: thromboxane-A synthase
  misc_feature (38)..(508): NCBI GI NO: 34911506 NR Description: cytochrome P450-like protein
  misc_feature (87)..(528): NCBI GI NO: 30683028 NR Description: thromboxane-A synthase
  misc_feature (13)..(296): NCBI GI NO: 34911498 NR Description: cytochrome P450-like protein
  misc_feature (388)..(528): NCBI GI NO: 34911498 NR Description: cytochrome P450-like protein
  misc_feature (142)..(528): NCBI GI NO: 15810030 NR Description: At2g26170/T19L18.2 [Arabidopsis thaliana]
  misc_feature (210)..(528): NCBI GI NO: 34911504 NR Description: cytochrome P450-like protein
  misc_feature (198)..(394): NCBI GI NO: 34911498 NR Description: cytochrome P450-like protein
  misc_feature (13)..(298): NCBI GI NO: 34911504 NR Description: cytochrome P450-like protein
  misc_feature (315)..(528): NCBI GI NO: 1351234 NR Description: Thromboxane-A synthase (TXA synthase) (TXS)
MEGAGTALLWSQVGSPLASFPAMLFTVAAMAAGAFAVYFYAPSWRLRSVPGPLAYGLVGHLPLLDKHGSQAFGVLAKKYGPIYRFYMGRQPLVVVADPELCREAGIKKFKSIVDRSVPVTIASSPIHYKSLLFTKGSTWQAMRNVIISIYQPSHLASLIPAIQPYIEQAGNLFCPGEEITFSDISIRLFTDVIGQAAFGVDFGLTKDAADDAEKIIHDAPRDFIQKHLYATTSLKMDLSGSLSMLVGTFLPALQKPLRQLMLRVPGSMDRRMDETNTALSGELDTIVAERAAQADRGQKNFLSVLLNGIDTSDAMRKLFTPDYVSALTYEHLLAGSGTMSFTLSSLVYLVSAHPEVEGKLLQEIDAFGPKDVVPDADDLRTKFPYLEQVVKETMRYFPGSPVVSREATADVEIGGYFLPKGTWVWLATAVLGRDPEQFPEPEAFRPERFDPESEQCKRRHPYAYIPFGIGPRACPGQKFAFQQLKLTVIHLYRRYVFRHSTSMESPLQLQFSIVTNFKNGVKLQVVQRKN

SEQ ID NO: 16090 - protein, 508 aa, Triticum aestivum
  peptide (1)..(508): Ceres Seq. ID no. 14307993
  misc_feature (1)..(506): NCBI GI NO: 30683024 NR Description: thromboxane-A synthase
  misc_feature (16)..(486): NCBI GI NO: 34911506 NR Description: cytochrome P450-like protein
  misc_feature (65)..(506): NCBI GI NO: 30683028 NR Description: thromboxane-A synthase
  misc_feature (1)..(274): NCBI GI NO: 34911498 NR Description: cytochrome P450-like protein
  misc_feature (366)..(506): NCBI GI NO: 34911498 NR Description: cytochrome P450-like protein
  misc_feature (120)..(506): NCBI GI NO: 15810030 NR Description: At2g26170/T19L18.2 [Arabidopsis thaliana]
  misc_feature (188)..(506): NCBI GI NO: 34911504 NR Description: cytochrome P450-like protein
  misc_feature (176)..(372): NCBI GI NO: 34911498 NR Description: cytochrome P450-like protein
  misc_feature (1)..(276): NCBI GI NO: 34911504 NR Description: cytochrome P450-like protein
  misc_feature (293)..(506): NCBI GI NO: 1351234 NR Description: Thromboxane-A synthase (TXA synthase) (TXS)
MLFTVAAMAAGAFAVYFYAPSWRLRSVPGPLAYGLVGHLPLLDKHGSQAFGVLAKKYGPIYRFYMGRQPLVVVADPELCREAGIKKFKSIVDRSVPVTIASSPIHYKSLLFTKGSTWQAMRNVIISIYQPSHLASLIPAIQPYIEQAGNLFCPGEEITFSDISIRLFTDVIGQAAFGVDFGLTKDAADDAEKIIHDAPRDFIQKHLYATTSLKMDLSGSLSMLVGTFLPALQKPLRQLMLRVPGSMDRRMDETNTALSGELDTIVAERAAQADRGQKNFLSVLLNGIDTSDAMRKLFTPDYVSALTYEHLLAGSGTMSFTLSSLVYLVSAHPEVEGKLLQEIDAFGPKDVVPDADDLRTKFPYLEQVVKETMRYFPGSPVVSREATADVEIGGYFLPKGTWVWLATAVLGRDPEQFPEPEAFRPERFDPESEQCKRRHPYAYIPFGIGPRACPGQKFAFQQLKLTVIHLYRRYVFRHSTSMESPLQLQFSIVTNFKNGVKLQVVQRKN

SEQ ID NO: 16091 - protein, 501 aa, Triticum aestivum
  peptide (1)..(501): Ceres Seq. ID no. 14307994
  misc_feature (1)..(499): NCBI GI NO: 30683024 NR Description: thromboxane-A synthase
  misc_feature (9)..(479): NCBI GI NO: 34911506 NR Description: cytochrome P450-like protein
  misc_feature (58)..(499): NCBI GI NO: 30683028 NR Description: thromboxane-A synthase
  misc_feature (1)..(267): NCBI GI NO: 34911498 NR Description: cytochrome P450-like protein
  misc_feature (359)..(499): NCBI GI NO: 34911498 NR Description: cytochrome P450-like protein
  misc_feature (113)..(499): NCBI GI NO: 15810030 NR Description: At2g26170/T19L18.2 [Arabidopsis thaliana]
  misc_feature (181)..(499): NCBI GI NO: 34911504 NR Description: cytochrome P450-like protein
  misc_feature (169)..(365): NCBI GI NO: 34911498 NR Description: cytochrome P450-like protein
  misc_feature (1)..(269): NCBI GI NO: 34911504 NR Description: cytochrome P450-like protein
  misc_feature (286)..(499): NCBI GI NO: 1351234 NR Description: Thromboxane-A synthase (TXA synthase) (TXS)
MAAGAFAVYFYAPSWRLRSVPGPLAYGLVGHLPLLDKHGSQAFGVLAKKYGPIYRFYMGRQPLVVVADPELCREAGIKKFKSIVDRSVPVTIASSPIHYKSLLFTKGSTWQAMRNVIISIYQPSHLASLIPAIQPYIEQAGNLFCPGEEITFSDISIRLFTDVIGQAAFGVDFGLTKDAADDAEKIIHDAPRDFIQKHLYATTSLKMDLSGSLSMLVGTFLPALQKPLRQLMLRVPGSMDRRMDETNTALSGELDTIVAERAAQADRGQKNFLSVLLNGIDTSDAMRKLFTPDYVSALTYEHLLAGSGTMSFTLSSLVYLVSAHPEVEGKLLQEIDAFGPKDVVPDADDLRTKFPYLEQVVKETMRYFPGSPVVSREATADVEIGGYFLPKGTWVWLATAVLGRDPEQFPEPEAFRPERFDPESEQCKRRHPYAYIPFGIGPRACPGQKFAFQQLKLTVIHLYRRYVFRHSTSMESPLQLQFSIVTNFKNGVKLQVVQRKN

SEQ ID NO: 16092 - DNA, 1775 bp, Triticum aestivum
  misc_feature (1)..(1775): Ceres Seq. ID no. 14307980
atatcgaacgcaacaatgcacctcgtcgccatggatatccctctcccgttgctcctctccaccttggccgttgccgtgaccatatgctatgtcctcttcttccgtgctgacaaggggcgcgcgccgctgccgcccgggccgaggggctggccggtgctggggaacctcccgcagctcggcggcaagacgcaccagaccatgcacgagatgtccaaggtgtacgggcccgtgctccggctccggttcggcagctccgtcgtggtggtggccgggtcggccgccgtggccgagcagttcctccgcacccacgacgccaagttcagcagccggccgcccaactccggcggcgagcacatggcgtacaactaccaggacgtggtgttcgcgccctacggcccccggtggcgcgcgatgaggaaggtgtgcgccgtgaacctcttctcggcccgcgcgctcgacgacctccgcgggttccgcgagcgggaggccgcgctcatggtgaggtccctcgctgatgccgctgctaccggcggggtggtggcggtcggcaaggcggcgaacgtgtgcacgaccaacgctctctcgcgggcggcggtggggctccgggtgttcgccgcggccggcgccgagcttggcgccaaggagttcaaggagatcgtgctggaggtgatggaggtgggcggcgtgctcaacgtcggggacttcgtgccggctctccggtggctcgacccgcagggtgttgttgccaggttgaagaaactgcaccgccggttcgacgacatgatgaacgggatcatcgccgagagaagggccggaggtagcacggccggcgaggagaaggaaggtaaggacctgctcggcttgctgctcgccatggtgcaggaagacaagtccctcaccggcggcgaggaggacaggatcacggacacggacgtcaaggcgctcatactgaacttgttcgtggcgggcacggagacgacgtcgacgatagtggagtgggcggtggcggagctgatccggcacccggacatgctgaagcgggcgcaggaggagatggacgccgtcgtgggccgggacaggctcgtctcggagtccgacctgccgcgcctcacgttcctgaacgcggtcatcaaggagaccttccggctgcacccgtcgacgccgctctcgctgccgcggatggcctccgaggagtgcgaggtcgccggctaccgcatccccaagggcacggagctgctggtcaacgtgtggggcatcgcccgcgacccggccctgtggcccgacccgctcgagttccggcccgcccggttcctcccgggagggacccacgccgacgtcgacgtcaaggggggcgacttcgggctgatcccgttcggggccggccggcggatctgcgcgggcctcagctggggcctgcgggtggtcaccgtgacggcggccacgctcgtgcactcgttcgactgggagctgccggcgggccagacgcccgacaagctcaacatggaggaggccttctctctgctgctgcagcgggccgtgccgctgatggcccacccggtgcccaggctgctcccgtcggcgtacgaaattgcataaacaaagacagagggaagcgcgccactgatttgtcgtgatgatctatggaggagaagctccagttgtgctatgtattgttgtcgatgggggtgtgcctcatcgttttcaactaaaatagttccacatgtaacttctgtactgtttttagatatagcatggaaaataacattttatgtatc

SEQ ID NO: 16093 - protein, 531 aa, Triticum aestivum
  peptide (1)..(531): Ceres Seq. ID no. 14307981
  misc_feature (6)..(531): NCBI GI NO: 37532594 NR Description: putative cytochrome 450
  misc_feature (11)..(530): NCBI GI NO: 37532650 NR Description: putative flavonoid 3'-hydroxylase
  misc_feature (15)..(529): NCBI GI NO: 12231880 NR Description: putative flavonoid 3'-hydroxylase
  misc_feature (11)..(528): NCBI GI NO: 27151498 NR Description: Flavonoid 3'-monooxygenase
  misc_feature (17)..(529): NCBI GI NO: 14278925 NR Description: flavonoid 3'-hydroxylase [Perilla frutescens]
  misc_feature (14)..(531): NCBI GI NO: 18148451 NR Description: flavonoid 3'-hydroxylase [Glycine max]
  misc_feature (18)..(530): NCBI GI NO: 12231886 NR Description: flavonoid 3'-hydroxylase [Matthiola incana]
  misc_feature (17)..(528): NCBI GI NO: 15241483 NR Description: cytochrome P450 75A5 / flavonoid 3'-monooxygenase /flavonoid 3'-hydroxylase
  misc_feature (12)..(526): NCBI GI NO: 12231914 NR Description: flavonoid 3'-hydroxylase [Pelargonium x hortorum]
  misc_feature (14)..(528): NCBI GI NO: 19910935 NR Description: flavonoid 3'-hydroxylase [Torenia hybrida]
ISNATMHLVAMDIPLPLLLSTLAVAVTICYVLFFRADKGRAPLPPGPRGWPVLGNLPQLGGKTHQTMHEMSKVYGPVLRLRFGSSVVVVAGSAAVAEQFLRTHDAKFSSRPPNSGGEHMAYNYQDVVFAPYGPRWRAMRKVCAVNLFSARALDDLRGFREREAALMVRSLADAAATGGVVAVGKAANVCTTNALSRAAVGLRVFAAAGAELGAKEFKEIVLEVMEVGGVLNVGDFVPALRWLDPQGVVARLKKLHRRFDDMMNGIIAERRAGGSTAGEEKEGKDLLGLLLAMVQEDKSLTGGEEDRITDTDVKALILNLFVAGTETTSTIVEWAVAELIRHPDMLKRAQEEMDAVVGRDRLVSESDLPRLTFLNAVIKETFRLHPSTPLSLPRMASEECEVAGYRIPKGTELLVNVWGIARDPALWPDPLEFRPARFLPGGTHADVDVKGGDFGLIPFGAGRRICAGLSWGLRVVTVTAATLVHSFDWELPAGQTPDKLNMEEAFSLLLQRAVPLMAHPVPRLLPSAYEIA

SEQ ID NO: 16094 - protein, 526 aa, Triticum aestivum
  peptide (1)..(526): Ceres Seq. ID no. 14307982
  misc_feature (1)..(526): NCBI GI NO: 37532594 NR Description: putative cytochrome 450
  misc_feature (6)..(525): NCBI GI NO: 37532650 NR Description: putative flavonoid 3'-hydroxylase
  misc_feature (10)..(524): NCBI GI NO: 12231880 NR Description: putative flavonoid 3'-hydroxylase
  misc_feature (6)..(523): NCBI GI NO: 27151498 NR Description: Flavonoid 3'-monooxygenase
  misc_feature (12)..(524): NCBI GI NO: 14278925 NR Description: flavonoid 3'-hydroxylase [Perilla frutescens]
  misc_feature (9)..(526): NCBI GI NO: 18148451 NR Description: flavonoid 3'-hydroxylase [Glycine max]
  misc_feature (13)..(525): NCBI GI NO: 12231886 NR Description: flavonoid 3'-hydroxylase [Matthiola incana]
  misc_feature (12)..(523): NCBI GI NO: 15241483 NR Description: cytochrome P450 75A5 / flavonoid 3'-monooxygenase /flavonoid 3'-hydroxylase
  misc_feature (7)..(521): NCBI GI NO: 12231914 NR Description: flavonoid 3'-hydroxylase [Pelargonium x hortorum]
  misc_feature (9)..(523): NCBI GI NO: 19910935 NR Description: flavonoid 3'-hydroxylase [Torenia hybrida]
MHLVAMDIPLPLLLSTLAVAVTICYVLFFRADKGRAPLPPGPRGWPVLGNLPQLGGKTHQTMHEMSKVYGPVLRLRFGSSVVVVAGSAAVAEQFLRTHDAKFSSRPPNSGGEHMAYNYQDVVFAPYGPRWRAMRKVCAVNLFSARALDDLRGFREREAALMVRSLADAAATGGVVAVGKAANVCTTNALSRAAVGLRVFAAAGAELGAKEFKEIVLEVMEVGGVLNVGDFVPALRWLDPQGVVARLKKLHRRFDDMMNGIIAERRAGGSTAGEEKEGKDLLGLLLAMVQEDKSLTGGEEDRITDTDVKALILNLFVAGTETTSTIVEWAVAELIRHPDMLKRAQEEMDAVVGRDRLVSESDLPRLTFLNAVIKETFRLHPSTPLSLPRMASEECEVAGYRIPKGTELLVNVWGIARDPALWPDPLEFRPARFLPGGTHADVDVKGGDFGLIPFGAGRRICAGLSWGLRVVTVTAATLVHSFDWELPAGQTPDKLNMEEAFSLLLQRAVPLMAHPVPRLLPSAYEIA

SEQ ID NO: 16095 - protein, 521 aa, Triticum aestivum
  peptide (1)..(521): Ceres Seq. ID no. 14307983
  misc_feature (1)..(521): NCBI GI NO: 37532594 NR Description: putative cytochrome 450
  misc_feature (1)..(520): NCBI GI NO: 37532650 NR Description: putative flavonoid 3'-hydroxylase
  misc_feature (5)..(519): NCBI GI NO: 12231880 NR Description: putative flavonoid 3'-hydroxylase
  misc_feature (1)..(518): NCBI GI NO: 27151498 NR Description: Flavonoid 3'-monooxygenase
  misc_feature (7)..(519): NCBI GI NO: 14278925 NR Description: flavonoid 3'-hydroxylase [Perilla frutescens]
  misc_feature (4)..(521): NCBI GI NO: 18148451 NR Description: flavonoid 3'-hydroxylase [Glycine max]
  misc_feature (8)..(520): NCBI GI NO: 12231886 NR Description: flavonoid 3'-hydroxylase [Matthiola incana]
  misc_feature (7)..(518): NCBI GI NO: 15241483 NR Description: cytochrome P450 75A5 / flavonoid 3'-monooxygenase /flavonoid 3'-hydroxylase
  misc_feature (2)..(516): NCBI GI NO: 12231914 NR Description: flavonoid 3'-hydroxylase [Pelargonium x hortorum]
  misc_feature (4)..(518): NCBI GI NO: 19910935 NR Description: flavonoid 3'-hydroxylase [Torenia hybrida]
MDIPLPLLLSTLAVAVTICYVLFFRADKGRAPLPPGPRGWPVLGNLPQLGGKTHQTMHEMSKVYGPVLRLRFGSSVVVVAGSAAVAEQFLRTHDAKFSSRPPNSGGEHMAYNYQDVVFAPYGPRWRAMRKVCAVNLFSARALDDLRGFREREAALMVRSLADAAATGGVVAVGKAANVCTTNALSRAAVGLRVFAAAGAELGAKEFKEIVLEVMEVGGVLNVGDFVPALRWLDPQGVVARLKKLHRRFDDMMNGIIAERRAGGSTAGEEKEGKDLLGLLLAMVQEDKSLTGGEEDRITDTDVKALILNLFVAGTETTSTIVEWAVAELIRHPDMLKRAQEEMDAVVGRDRLVSESDLPRLTFLNAVIKETFRLHPSTPLSLPRMASEECEVAGYRIPKGTELLVNVWGIARDPALWPDPLEFRPARFLPGGTHADVDVKGGDFGLIPFGAGRRICAGLSWGLRVVTVTAATLVHSFDWELPAGQTPDKLNMEEAFSLLLQRAVPLMAHPVPRLLPSAYEIA

SEQ ID NO: 16096 - DNA, 1789 bp, Triticum aestivum
  misc_feature (1)..(1789): Ceres Seq. ID no. 14303169
atcgacgatccatcccgtgtgcggccgcccacaccagtttcctcgtccccacaagcagcggcacggctaaaaacggggggacgcttccctttcatctcgcgactataaaaaagaacgggcggccctgcctaaagccccctctcctcgccttctccgccctccgctccattcgtttcgatctatttcggcttcttcctctccaagctacagccccggccatggcggcgacgatccagtccgtgaaggcccgccagatcttcgacagccgcggcaaccccaccgtcgaggttgatgtgtgctgctcagatggaaccttcgccagggccgctgttcccagcggtgcatcaactggtgtttatgaagctttggaactgagagacggtggatctgactacttgggaaagggtgtttccaaggctgttgacaatgtgaacttgattatcgcaccagctttgattggcaaggaccctacagctcaaactgagctcgacaactttatggttcagcagcttgatggaaccaaaaacgaatggggttggtgcaagcagaagcttggtgctaatgcaatcctggctgtgtcactagctatttgcaaagctggagccagcatcaagaagattccgctgtaccagcacattgccaaccttgctggcaacaagcaattggttttgcctgttcctgcattcaatgtcatcaatggtggatcccatgctggaaacaagcttgctatgcaggagttcatgatccttcctactggagctgcctcattcaaggaggcaatgaagatgggcgttgaagtgtaccacaacttgaagtctgttatcaagaagaagtacgggcaagatgccaccaatgttggagatgaaggtggttttgctcctaacattcaggagaataaggagggccttgagctcttgaagactgcaattgaaaaggctggatacaccggcaaggttgtcattggaatggatgttgctgcttcagagttctacaatgacaaggacaaaacatatgacctcaacttcaaggaagagaacaacgatggttcccagaagatatctggagatagcctgaagaatgtatacaagtcattcgtgagtgagtaccccattgtgtcgattgaggacccatttgaccaggatgactgggtgcactatgctaagatgactgaagaatgtggagagcaagttcagattgttggtgatgaccttctagtcaccaacccaaccagagttgcgaaggcaatcaaggagaagtcatgcaatgctcttctgctgaaggttaaccaaattggatccgtcactgaaagtatcgaggccgtgaagatgtcgaaacatgctggctggggtgtgatgaccagtcacaggagtggtgagactgaggacacattcattgctgatttggctgttggtttgtccacgggtcagatcaagactggggctccctgccgctcagagcggcttgccaagtacaaccagcttctgaggatcgaggaagagctgggcgctgccgctgtgtatgccggcctcaagttccgcgcaccggtggagccatactagatgggacctgcatccgagacatgatcactctgcacttgtttttgtgaaagtgggcgtgtcttaacttgtggaatgaactatggttgaagctcttaggactagtcgagcaataatgtaccgcatgttgctgtgaacgggacggatatgtacctacgtgctccaaacttgctccaattttggtctttgtggtgagcgagcaagcacgcctgattaccttttggatctctagc

SEQ ID NO: 16097 - protein, 518 aa, Triticum aestivum
  peptide (1)..(518): Ceres Seq. ID no. 14303170
  misc_feature (220)..(515): Pfam Name: Pfam Description:  Enolase, C-terminal TIM barrel domain
  misc_feature (73)..(518): NCBI GI NO: 33113259 NR Description: enolase [Oryza sativa (japonica cultivar-group)]
  misc_feature (73)..(518): NCBI GI NO: 3023713 NR Description: Enolase
  misc_feature (73)..(518): NCBI GI NO: 1169528 NR Description: Enolase 2
  misc_feature (73)..(473): NCBI GI NO: 37531422 NR Description: putative enolase
  misc_feature (493)..(518): NCBI GI NO: 37531422 NR Description: putative enolase
  misc_feature (73)..(518): NCBI GI NO: 119355 NR Description: Enolase 1
  misc_feature (75)..(518): NCBI GI NO: 119354 NR Description: Enolase
  misc_feature (73)..(518): NCBI GI NO: 1169534 NR Description: Enolase
  misc_feature (75)..(518): NCBI GI NO: 15227987 NR Description: enolase (2-phospho-D-glycerate hydroylase)
  misc_feature (76)..(518): NCBI GI NO: 7436883 NR Description: phosphopyruvate hydratase (EC 4
RRSIPCAAAHTSFLVPTSSGTAKNGGTLPFHLATIKKNGRPCLKPPLLAFSALRSIRFDLFRLLPLQATAPAMAATIQSVKARQIFDSRGNPTVEVDVCCSDGTFARAAVPSGASTGVYEALELRDGGSDYLGKGVSKAVDNVNLIIAPALIGKDPTAQTELDNFMVQQLDGTKNEWGWCKQKLGANAILAVSLAICKAGASIKKIPLYQHIANLAGNKQLVLPVPAFNVINGGSHAGNKLAMQEFMILPTGAASFKEAMKMGVEVYHNLKSVIKKKYGQDATNVGDEGGFAPNIQENKEGLELLKTAIEKAGYTGKVVIGMDVAASEFYNDKDKTYDLNFKEENNDGSQKISGDSLKNVYKSFVSEYPIVSIEDPFDQDDWVHYAKMTEECGEQVQIVGDDLLVTNPTRVAKAIKEKSCNALLLKVNQIGSVTESIEAVKMSKHAGWGVMTSHRSGETEDTFIADLAVGLSTGQIKTGAPCRSERLAKYNQLLRIEEELGAAAVYAGLKFRAPVEPY

SEQ ID NO: 16098 - protein, 446 aa, Triticum aestivum
  peptide (1)..(446): Ceres Seq. ID no. 14303171
  misc_feature (148)..(443): Pfam Name: Pfam Description:  Enolase, C-terminal TIM barrel domain
  misc_feature (1)..(446): NCBI GI NO: 33113259 NR Description: enolase [Oryza sativa (japonica cultivar-group)]
  misc_feature (1)..(446): NCBI GI NO: 3023713 NR Description: Enolase
  misc_feature (1)..(446): NCBI GI NO: 1169528 NR Description: Enolase 2
  misc_feature (1)..(401): NCBI GI NO: 37531422 NR Description: putative enolase
  misc_feature (421)..(446): NCBI GI NO: 37531422 NR Description: putative enolase
  misc_feature (1)..(446): NCBI GI NO: 119355 NR Description: Enolase 1
  misc_feature (3)..(446): NCBI GI NO: 119354 NR Description: Enolase
  misc_feature (1)..(446): NCBI GI NO: 1169534 NR Description: Enolase
  misc_feature (3)..(446): NCBI GI NO: 15227987 NR Description: enolase (2-phospho-D-glycerate hydroylase)
  misc_feature (4)..(446): NCBI GI NO: 7436883 NR Description: phosphopyruvate hydratase (EC 4
MAATIQSVKARQIFDSRGNPTVEVDVCCSDGTFARAAVPSGASTGVYEALELRDGGSDYLGKGVSKAVDNVNLIIAPALIGKDPTAQTELDNFMVQQLDGTKNEWGWCKQKLGANAILAVSLAICKAGASIKKIPLYQHIANLAGNKQLVLPVPAFNVINGGSHAGNKLAMQEFMILPTGAASFKEAMKMGVEVYHNLKSVIKKKYGQDATNVGDEGGFAPNIQENKEGLELLKTAIEKAGYTGKVVIGMDVAASEFYNDKDKTYDLNFKEENNDGSQKISGDSLKNVYKSFVSEYPIVSIEDPFDQDDWVHYAKMTEECGEQVQIVGDDLLVTNPTRVAKAIKEKSCNALLLKVNQIGSVTESIEAVKMSKHAGWGVMTSHRSGETEDTFIADLAVGLSTGQIKTGAPCRSERLAKYNQLLRIEEELGAAAVYAGLKFRAPVEPY

SEQ ID NO: 16099 - protein, 353 aa, Triticum aestivum
  peptide (1)..(353): Ceres Seq. ID no. 14303172
  misc_feature (55)..(350): Pfam Name: Pfam Description:  Enolase, C-terminal TIM barrel domain
  misc_feature (1)..(353): NCBI GI NO: 33113259 NR Description: enolase [Oryza sativa (japonica cultivar-group)]
  misc_feature (1)..(353): NCBI GI NO: 3023713 NR Description: Enolase
  misc_feature (1)..(353): NCBI GI NO: 1169528 NR Description: Enolase 2
  misc_feature (1)..(308): NCBI GI NO: 37531422 NR Description: putative enolase
  misc_feature (328)..(353): NCBI GI NO: 37531422 NR Description: putative enolase
  misc_feature (1)..(353): NCBI GI NO: 119355 NR Description: Enolase 1
  misc_feature (1)..(353): NCBI GI NO: 119354 NR Description: Enolase
  misc_feature (1)..(353): NCBI GI NO: 1169534 NR Description: Enolase
  misc_feature (1)..(353): NCBI GI NO: 15227987 NR Description: enolase (2-phospho-D-glycerate hydroylase)
  misc_feature (1)..(353): NCBI GI NO: 7436883 NR Description: phosphopyruvate hydratase (EC 4
MVQQLDGTKNEWGWCKQKLGANAILAVSLAICKAGASIKKIPLYQHIANLAGNKQLVLPVPAFNVINGGSHAGNKLAMQEFMILPTGAASFKEAMKMGVEVYHNLKSVIKKKYGQDATNVGDEGGFAPNIQENKEGLELLKTAIEKAGYTGKVVIGMDVAASEFYNDKDKTYDLNFKEENNDGSQKISGDSLKNVYKSFVSEYPIVSIEDPFDQDDWVHYAKMTEECGEQVQIVGDDLLVTNPTRVAKAIKEKSCNALLLKVNQIGSVTESIEAVKMSKHAGWGVMTSHRSGETEDTFIADLAVGLSTGQIKTGAPCRSERLAKYNQLLRIEEELGAAAVYAGLKFRAPVEPY

SEQ ID NO: 16100 - DNA, 1026 bp, Triticum aestivum
  misc_feature (1)..(1026): Ceres Seq. ID no. 13656452
cctagaacatactaatcgaaaaatgcacagtcacctcgtaagcaagcagctgctacagcctcaacaatcaaaccttgattcgacatggcgaagtcgcccatggcgatcttggctctcgggctagcagcactagtcctatccggcgccgggctggtggccgcgcagaactgcggctgccagccgaacgagtgctgcagcaagtacggttattgcgggaccgatgccagctactgcggacaagattgtcggtcgggcccgtgcacggcgagcggcggcgggagcggcgatcccgtggagagcgtcgtcaccgacgcgttctttgacgggatcaagtcccaggccgccgacgggtgccccgggaagagcttttacacgcgccagtttttcctggacggcgcccaggcgaaccccgacttcggcaaaggcagcaccagcgacgacggcaagagggagatagccgccttcttcgcccacttcacccacgagaccggacacatgtgctccatcgaggagaacgaaggggcgagcaaggattactgcgacgagacgaacacgcaatggccgtgtaccccggggaaggcgtactacgggcgcgggccgctgcagctgtcgtggaactacaactacggggcggccggggagagcaccgggttcgacgggctcaacagcccggagacggtggcgcaggaccaggcgctaacgttcaaggcggcgttctggttctggatgaccaacgtgcaccaggccgtgcccagtgggttcggcgcgacgaccagggcaatcaacggtgacgtggagtgcgacggcaagaagccagacttggtgagcgcgcgggcgggctactacacggactactgccagcagttcggcgtcgacccagggaacaacctcacttgctaggtgcttggttctgaattgatcgacgcgcaaaaacctttctggcgatgctcctactgctctacctccctgtgtattctgggatatctatatatcctgtatacgtaataaatttacatctctgtattc

SEQ ID NO: 16101 - protein, 271 aa, Triticum aestivum
  peptide (1)..(271): Ceres Seq. ID no. 13656453
  misc_feature (73)..(271): Pfam Name: Pfam Description:  Chitinase class I
  misc_feature (1)..(271): NCBI GI NO: 4741848 NR Description: chitinase IV precursor [Triticum aestivum]
  misc_feature (62)..(271): NCBI GI NO: 4741842 NR Description: chitinase II precursor [Triticum aestivum]
  misc_feature (1)..(25): NCBI GI NO: 4741842 NR Description: chitinase II precursor [Triticum aestivum]
  misc_feature (6)..(271): NCBI GI NO: 30793457 NR Description: chitinase [Oryza sativa (japonica cultivar-group)]
  misc_feature (6)..(271): NCBI GI NO: 38345417 NR Description: OSJNBb0091E11.8
  misc_feature (1)..(271): NCBI GI NO: 283037 NR Description: chitinase (EC 3.2.1.14) A - maize
  misc_feature (1)..(271): NCBI GI NO: 116329 NR Description: ENDOCHITINASE A PRECURSOR (SEED CHITINASE A)
  misc_feature (8)..(271): NCBI GI NO: 15213852 NR Description: chitinase-B [Sorghum halepense]
  misc_feature (8)..(271): NCBI GI NO: 15213848 NR Description: chitinase-B [Saccharum officinarum]
  misc_feature (8)..(271): NCBI GI NO: 116333 NR Description: ENDOCHITINASE B PRECURSOR (SEED CHITINASE B)
MAKSPMAILALGLAALVLSGAGLVAAQNCGCQPNECCSKYGYCGTDASYCGQDCRSGPCTASGGGSGDPVESVVTDAFFDGIKSQAADGCPGKSFYTRQFFLDGAQANPDFGKGSTSDDGKREIAAFFAHFTHETGHMCSIEENEGASKDYCDETNTQWPCTPGKAYYGRGPLQLSWNYNYGAAGESTGFDGLNSPETVAQDQALTFKAAFWFWMTNVHQAVPSGFGATTRAINGDVECDGKKPDLVSARAGYYTDYCQQFGVDPGNNLTC

SEQ ID NO: 16102 - protein, 266 aa, Triticum aestivum
  peptide (1)..(266): Ceres Seq. ID no. 13656454
  misc_feature (68)..(266): Pfam Name: Pfam Description:  Chitinase class I
  misc_feature (1)..(266): NCBI GI NO: 4741848 NR Description: chitinase IV precursor [Triticum aestivum]
  misc_feature (57)..(266): NCBI GI NO: 4741842 NR Description: chitinase II precursor [Triticum aestivum]
  misc_feature (1)..(20): NCBI GI NO: 4741842 NR Description: chitinase II precursor [Triticum aestivum]
  misc_feature (1)..(266): NCBI GI NO: 30793457 NR Description: chitinase [Oryza sativa (japonica cultivar-group)]
  misc_feature (1)..(266): NCBI GI NO: 38345417 NR Description: OSJNBb0091E11.8
  misc_feature (1)..(266): NCBI GI NO: 283037 NR Description: chitinase (EC 3.2.1.14) A - maize
  misc_feature (1)..(266): NCBI GI NO: 116329 NR Description: ENDOCHITINASE A PRECURSOR (SEED CHITINASE A)
  misc_feature (3)..(266): NCBI GI NO: 15213852 NR Description: chitinase-B [Sorghum halepense]
  misc_feature (3)..(266): NCBI GI NO: 15213848 NR Description: chitinase-B [Saccharum officinarum]
  misc_feature (3)..(266): NCBI GI NO: 116333 NR Description: ENDOCHITINASE B PRECURSOR (SEED CHITINASE B)
MAILALGLAALVLSGAGLVAAQNCGCQPNECCSKYGYCGTDASYCGQDCRSGPCTASGGGSGDPVESVVTDAFFDGIKSQAADGCPGKSFYTRQFFLDGAQANPDFGKGSTSDDGKREIAAFFAHFTHETGHMCSIEENEGASKDYCDETNTQWPCTPGKAYYGRGPLQLSWNYNYGAAGESTGFDGLNSPETVAQDQALTFKAAFWFWMTNVHQAVPSGFGATTRAINGDVECDGKKPDLVSARAGYYTDYCQQFGVDPGNNLTC

SEQ ID NO: 16103 - DNA, 1395 bp, Triticum aestivum
  misc_feature (1)..(1395): Ceres Seq. ID no. 13656783
gtcactctcctccctcccccgcccacagcccccacaccagaccagcgcggcagccgccatggatccaccaaccagcgctgcccaccacagccccgacgacgaggcggccgccttcttccgcgcggcgccgcccctccgcgaccgcgacgccgtcgccgccagcctcgccgccttcgtcgcccgccaccgcgcacgctccgccgccggcgccggcgcaggaggaggaggagggcccccggcggtggcgggggtggtctgcgtcacctccggcggcaccacggtgcccctggagcagcgctgcgtgcgctacatcgacaacttcagctccggccagcgcggggccgcgtccaccgagtatttcctaaaggccggttacgccgtcatcttcgtccaccgccgcgggagcaagcagccttactgcaggtttcttccggaggactcttttctcgaccttttcgagctcggcgaaggatcagagatccaagtcccagagtctcacaccacggtggtcaagacagcgatcagcagttatcgcaaggcaatcgatgaaggtctacttctgaaacttcctttcaccacaatttttgagtaccttcagttactgcagcttgtatccactgctatgaattgcttggagcgccatggaatgttttattgtgcagctgcagtgtctgacttctatgttccatgggagagtatggctaaacataaaatccagtcagcaggtggccctttgaacatgcagctcagtcaagttcctaagatgcttttcatcctcagaaaccattgggccccttctgcattttgtgtatccttcaagctcgagacggatccagacatccttatacagaaggcagaggcggctttgagaaagtatggtatgaatgtggtggtggcgaatgagctagcgaactacaaagacgtggttgtcatggtcacaagcagcgggaagacgaccgtgagcaggcggagcaaggaagatgacctggaagagcagctcattggtctcctggttaagatgcattcagatcacactaagcagtccaatccggaccaagagaaatgagctgttgtcttgatgaataaggagttgctacaagttattgtgctcattggtctcctggtttaattcacgtaccagtaagtggagtagcattctctcttgagaatcgcacgcgcgatcatctcccttatcccttatgttgtgctacaccgtctgtgatgcctgtctttatcgacgtcggcggtggtttggattggacaagtctcaccaattcaaaccccaaatctgaaatgtgtatattttgagagattcaaatttgattaatgggaatctaggctccttcgcctggactgcataatctaccataggtaggttacagcagcttcaaatgg

SEQ ID NO: 16104 - protein, 354 aa, Triticum aestivum
  peptide (1)..(354): Ceres Seq. ID no. 13656784
  misc_feature (84)..(324): Pfam Name: Pfam Description:  DNA / pantothenate metabolism flavoprotein
  misc_feature (19)..(354): NCBI GI NO: 40253297 NR Description: putative Chain A
  misc_feature (32)..(348): NCBI GI NO: 30682728 NR Description: expressed protein [Arabidopsis thaliana]
  misc_feature (183)..(349): NCBI GI NO: 15241677 NR Description: hypothetical protein [Arabidopsis thaliana]
  misc_feature (84)..(161): NCBI GI NO: 15241677 NR Description: hypothetical protein [Arabidopsis thaliana]
  misc_feature (165)..(348): NCBI GI NO: 8778623 NR Description: F5O11.7 [Arabidopsis thaliana]
  misc_feature (32)..(136): NCBI GI NO: 8778623 NR Description: F5O11.7 [Arabidopsis thaliana]
  misc_feature (84)..(345): NCBI GI NO: 34870890 NR Description: similar to RIKEN cDNA 6330579B17 gene
  misc_feature (84)..(342): NCBI GI NO: 18255582 NR Description: RIKEN cDNA 6330579B17 gene [Mus musculus]
  misc_feature (84)..(326): NCBI GI NO: 13385982 NR Description: RIKEN cDNA 6330579B17 [Mus musculus]
  misc_feature (164)..(341): NCBI GI NO: 40556035 NR Description: CNPV097 conserved hypothetical protein
SLSSLPRPQPPHQTSAAAAMDPPTSAAHHSPDDEAAAFFRAAPPLRDRDAVAASLAAFVARHRARSAAGAGAGGGGGPPAVAGVVCVTSGGTTVPLEQRCVRYIDNFSSGQRGAASTEYFLKAGYAVIFVHRRGSKQPYCRFLPEDSFLDLFELGEGSEIQVPESHTTVVKTAISSYRKAIDEGLLLKLPFTTIFEYLQLLQLVSTAMNCLERHGMFYCAAAVSDFYVPWESMAKHKIQSAGGPLNMQLSQVPKMLFILRNHWAPSAFCVSFKLETDPDILIQKAEAALRKYGMNVVVANELANYKDVVVMVTSSGKTTVSRRSKEDDLEEQLIGLLVKMHSDHTKQSNPDQEK

SEQ ID NO: 16105 - protein, 335 aa, Triticum aestivum
  peptide (1)..(335): Ceres Seq. ID no. 13656785
  misc_feature (65)..(305): Pfam Name: Pfam Description:  DNA / pantothenate metabolism flavoprotein
  misc_feature (1)..(335): NCBI GI NO: 40253297 NR Description: putative Chain A
  misc_feature (13)..(329): NCBI GI NO: 30682728 NR Description: expressed protein [Arabidopsis thaliana]
  misc_feature (164)..(330): NCBI GI NO: 15241677 NR Description: hypothetical protein [Arabidopsis thaliana]
  misc_feature (65)..(142): NCBI GI NO: 15241677 NR Description: hypothetical protein [Arabidopsis thaliana]
  misc_feature (146)..(329): NCBI GI NO: 8778623 NR Description: F5O11.7 [Arabidopsis thaliana]
  misc_feature (13)..(117): NCBI GI NO: 8778623 NR Description: F5O11.7 [Arabidopsis thaliana]
  misc_feature (65)..(326): NCBI GI NO: 34870890 NR Description: similar to RIKEN cDNA 6330579B17 gene
  misc_feature (65)..(323): NCBI GI NO: 18255582 NR Description: RIKEN cDNA 6330579B17 gene [Mus musculus]
  misc_feature (65)..(307): NCBI GI NO: 13385982 NR Description: RIKEN cDNA 6330579B17 [Mus musculus]
  misc_feature (145)..(322): NCBI GI NO: 40556035 NR Description: CNPV097 conserved hypothetical protein
MDPPTSAAHHSPDDEAAAFFRAAPPLRDRDAVAASLAAFVARHRARSAAGAGAGGGGGPPAVAGVVCVTSGGTTVPLEQRCVRYIDNFSSGQRGAASTEYFLKAGYAVIFVHRRGSKQPYCRFLPEDSFLDLFELGEGSEIQVPESHTTVVKTAISSYRKAIDEGLLLKLPFTTIFEYLQLLQLVSTAMNCLERHGMFYCAAAVSDFYVPWESMAKHKIQSAGGPLNMQLSQVPKMLFILRNHWAPSAFCVSFKLETDPDILIQKAEAALRKYGMNVVVANELANYKDVVVMVTSSGKTTVSRRSKEDDLEEQLIGLLVKMHSDHTKQSNPDQEK

SEQ ID NO: 16106 - protein, 182 aa, Triticum aestivum
  peptide (1)..(182): Ceres Seq. ID no. 13656786
  misc_feature (6)..(164): NCBI GI NO: 29247944 NR Description: GLP_26_54603_52153 [Giardia lamblia ATCC 50803]
VTLLPPPPTAPTPDQRGSRHGSTNQRCPPQPRRRGGRLLPRGAAPPRPRRRRRQPRRLRRPPPRTLRRRRRRRRRRRAPGGGGGGLRHLRRHHGAPGAALRALHRQLQLRPARGRVHRVFPKGRLRRHLRPPPREQAALLQVSSGGLFSRPFRARRRIRDPSPRVSHHGGQDSDQQLSQGNR

SEQ ID NO: 16107 - DNA, 1301 bp, Triticum aestivum
  misc_feature (1)..(1301): Ceres Seq. ID no. 13656794
attacatagaacatcctaatcgaaaatataattctatgttctgttttacatcgttgggtgcacaagttgatcatagtatcaatgttggaggtgctccatacgttttcaagatgaatggggtggtttaccatcgtattggttcgttgttgccggctggcggtgcaccaccaaagtttgcgcaactgtatatgatggattctgctgacgagttggactgtaggttgaatgtgtttgacagagaagaaactagctcacttgagcccgatcctgaaattgtttcttcattgatagacatgcttaatatgcatcaccgtctggtgcacaaatttagaattgcacgacagagtctgtgtactcctggtgtttctgatgtctcaattcgtttcttgagcagcgatggcggtgctcatggtacgcgtttctccggtcctaccacttctgaagtggctgcgcttatagttggtgatctcatggatagtgcaagcatccagccctgaaatttaatcatggaaatggaaatagttcgcaggaaaatcttatgatttatatctcaagacggccaatgcttgaaaagttagtgaaacaattgggttgaaagtacaaggatatacatattggtacgtccatcaaggtatgatgcaagcatctgtactaattggcctaccacgccaagaagatagttttagagaatcttccatcacatatgaaggggaggcagctaatagagaagatgaagcaatggagaaagcagtctcaagtggccttagaatgtatttgtgcagactataatatttctgtcaatgatcacaattactatgcccttgaagtcacaaaagaaagattgcttacaacaagagagaaagctcaaacaaaacaatggcagttcaacatggcgcgccagcaaataactatgcagcagaatgaatttgcaagacaaacaatgattctggcaaagatatgcaatagcttttttgatatactgccacttcgtatgtacccccagcgtccagaaagcagtgatcccattattacatacacaggcgcacaccctcccatcggacgtatggaagaacttgcaaaatcactttatcactttatcacaggcaccaatcctgcaggaggctacaccagaatgatctaatttactatcaactacttctagcttatctacgtaatatgtttgtgtttctatatacagttctctgtctgcagcgagttgtatgtagtttaaataatttgtttgcctcaagtgtgtaccacttttaatttgcagctttgtaaccctgcatttwcarcmttyt

SEQ ID NO: 16108 - protein, 164 aa, Triticum aestivum
  peptide (1)..(164): Ceres Seq. ID no. 15219851
  misc_feature (7)..(155): NCBI GI NO: 34914948 NR Description: helicase-like protein
  misc_feature (7)..(155): NCBI GI NO: 38424032 NR Description: helicase-like protein
  misc_feature (7)..(160): NCBI GI NO: 34904560 NR Description: putative helicase
  misc_feature (7)..(155): NCBI GI NO: 34394334 NR Description: helicase-like protein
  misc_feature (7)..(162): NCBI GI NO: 21743013 NR Description: OSJNBb0013O03.3
  misc_feature (7)..(155): NCBI GI NO: 34902784 NR Description: unnamed protein product
  misc_feature (7)..(157): NCBI GI NO: 34906276 NR Description: P0489A01.23
  misc_feature (7)..(148): NCBI GI NO: 37530422 NR Description: putative helicase
  misc_feature (1)..(136): NCBI GI NO: 38346787 NR Description: OSJNBa0095H06.12
  misc_feature (7)..(156): NCBI GI NO: 38346863 NR Description: OSJNBb0002N06.2
YIEHPNRKYNSMFCFTSLGAQVDHSINVGGAPYVFKMNGVVYHRIGSLLPAGGAPPKFAQLYMMDSADELDCRLNVFDREETSSLEPDPEIVSSLIDMLNMHHRLVHKFRIARQSLCTPGVSDVSIRFLSSDGGAHGTRFSGPTTSEVAALIVGDLMDSASIQP

SEQ ID NO: 16109 - protein, 153 aa, Triticum aestivum
  peptide (1)..(153): Ceres Seq. ID no. 15219852
  misc_feature (1)..(144): NCBI GI NO: 34914948 NR Description: helicase-like protein
  misc_feature (1)..(144): NCBI GI NO: 38424032 NR Description: helicase-like protein
  misc_feature (1)..(149): NCBI GI NO: 34904560 NR Description: putative helicase
  misc_feature (1)..(144): NCBI GI NO: 34394334 NR Description: helicase-like protein
  misc_feature (1)..(151): NCBI GI NO: 21743013 NR Description: OSJNBb0013O03.3
  misc_feature (1)..(144): NCBI GI NO: 34902784 NR Description: unnamed protein product
  misc_feature (1)..(146): NCBI GI NO: 34906276 NR Description: P0489A01.23
  misc_feature (1)..(137): NCBI GI NO: 37530422 NR Description: putative helicase
  misc_feature (1)..(125): NCBI GI NO: 38346787 NR Description: OSJNBa0095H06.12
  misc_feature (1)..(145): NCBI GI NO: 38346863 NR Description: OSJNBb0002N06.2
MFCFTSLGAQVDHSINVGGAPYVFKMNGVVYHRIGSLLPAGGAPPKFAQLYMMDSADELDCRLNVFDREETSSLEPDPEIVSSLIDMLNMHHRLVHKFRIARQSLCTPGVSDVSIRFLSSDGGAHGTRFSGPTTSEVAALIVGDLMDSASIQP

SEQ ID NO: 16110 - protein, 145 aa, Triticum aestivum
  peptide (1)..(145): Ceres Seq. ID no. 15219853
MKGRQLIEKMKQWRKQSQVALECICADYNISVNDHNYYALEVTKERLLTTREKAQTKQWQFNMARQQITMQQNEFARQTMILAKICNSFFDILPLRMYPQRPESSDPIITYTGAHPPIGRMEELAKSLYHFITGTNPAGGYTRMI

SEQ ID NO: 16111 - DNA, 1975 bp, Triticum aestivum
  misc_feature (1)..(1975): Ceres Seq. ID no. 14303141
cttttgaagccccgccctccttccacaggcccatgacgaagccaacctagctagcttgcaccacgtaccgtgtggcattatatatacgcccaccggccctccgtgccatcccggtctccatcgccatggcgacgacggggagggtgaggccttctcctctcctcgcggcgtggctggctctcggctttgcgtggcattgcgcgcttcaccatgctccggcggcggccgtgacgctgtcgacggcgtcccggtgggtcgtggacgaggccggggaccgcgtgaagctggcgtgcgtgaactggccgtcgcacctggagccgatgctggcggaggggctgggcaagcggcccgtgggcgccatcgccggggacgtggccaccatggggttcaactgcgtccggctcacctggcccacgttcctggtgaccaacgcctcctactcgtccctcaccgtcgagcagtccttccagaggctcaacctcaccgagtcgctcgccggcatcagggccaacaaccccgccgtcgtcgacctcaagctcatcgacgcgttcaaggccgtggtgagcagcctcggtgagaacaacgtcatggtgatcctggacaaccacgtgagcaagcccgggtggtgctgcgacaacgcggacggcaacgggttcttcggcgacggctacttcgagccggacgtctgggtcgacggcctcaccaagatggccaccatgttcgccggcgtcccccacgtcgtcggcatgagcctcaggaacgagctccgaggccccaggcagaactcaaacgactggtacaagtacatgcagcgcggcgcggaggcggtgcacgcggcgaacccgcgggtgctggtgatcctctcgggcctcagcttcgacaacgacctggcgttcctcaactcgcggcaggtgagcctgagcttcgcccggaaggcggcgttcgaggtgcactggtacagcttctccaacggccaggagtgggcggcggggaaccccaacgaggtgtgcgcgcggatcggggccagcgtgtcccgccgcgcgctctacctgctcgactagggctggccggtcttcctcagcgagttcggcgtcgacaaccgcggcgggaacgccaacgacaaccgctactacggctgcgccgccgccgtcgccgccgacctcgacctcgactgggcgctctggacgctgcaggggagctactacctccgccagggcgtgctggacctcgacgaggtctacggcgtgctcgaccgggcctggtccaggccacgcaacgtcaccgcgctccgcagggtccagcccctgcagcgcccgctccgagggcctggctacgcggaggcggcgccgtacacggtgctgttccacccggcgacggggctgtgcgtgctgcggcggtcgctggcgcagccactggagctgggcgcgtgcgccgggacggaggcctgggagtacgcgccgcagcaggggcggctggcgctgcgggacggcccgctgatgtgcctccacgcgcagggcgccggccggcccgtgcgcctcggcacgccttgcgacgacgacatgtcccggtggcgcctcgtgtcggactccaagctgcacgtcgccgtcaacgcatcgtcttcgtcgtcatccggctccggcgatggccgtggcatgctctgcctggacgtcggcgcggacggccagagcgtggtcaccaacccgtgccgctgcctgagcgcggacaacagctgcgacccggagagccagtggttcaagatggtgagcagcacgaggagcgtcgccgccaatagcatgctcgcggagctgcctgtgaagctcgggagctcgaagattcgctcgctttgatcggcgccagtaggaccgacatatataattgtataggtgcacgcatccgttgtactagctgcaaaggcgccgggatggacgagagaagctgctctagaaccggaataatatccttcagagttcagatg

SEQ ID NO: 16112 - protein, 311 aa, Triticum aestivum
  peptide (1)..(311): Ceres Seq. ID no. 14303142
  misc_feature (42)..(311): Pfam Name: glycosyl hydrolase family 5 Pfam Description: Cellulase
  misc_feature (12)..(311): NCBI GI NO: 38345246 NR Description: OSJNBb0011N17.7
  misc_feature (37)..(311): NCBI GI NO: 15222185 NR Description: glycosyl hydrolase family 5/cellulase
  misc_feature (10)..(311): NCBI GI NO: 38345244 NR Description: OSJNBb0011N17.5
  misc_feature (9)..(311): NCBI GI NO: 38345245 NR Description: OSJNBb0011N17.6
  misc_feature (34)..(311): NCBI GI NO: 15231514 NR Description: glycosyl hydrolase family 5/cellulase
  misc_feature (38)..(311): NCBI GI NO: 11994430 NR Description: gene_id:MTC11.2~unknown protein
  misc_feature (38)..(311): NCBI GI NO: 15231513 NR Description: glycosyl hydrolase family 5/cellulase
  misc_feature (37)..(311): NCBI GI NO: 15237972 NR Description: glycosyl hydrolase family 5/cellulase
  misc_feature (37)..(311): NCBI GI NO: 15237397 NR Description: glycosyl hydrolase family 5/cellulase
  misc_feature (37)..(311): NCBI GI NO: 40742809 NR Description: hypothetical protein AN9166.2
MATTGRVRPSPLLAAWLALGFAWHCALHHAPAAAVTLSTASRWVVDEAGDRVKLACVNWPSHLEPMLAEGLGKRPVGAIAGDVATMGFNCVRLTWPTFLVTNASYSSLTVEQSFQRLNLTESLAGIRANNPAVVDLKLIDAFKAVVSSLGENNVMVILDNHVSKPGWCCDNADGNGFFGDGYFEPDVWVDGLTKMATMFAGVPHVVGMSLRNELRGPRQNSNDWYKYMQRGAEAVHAANPRVLVILSGLSFDNDLAFLNSRQVSLSFARKAAFEVHWYSFSNGQEWAAGNPNEVCARIGASVSRRALYLLD

SEQ ID NO: 16113 - protein, 246 aa, Triticum aestivum
  peptide (1)..(246): Ceres Seq. ID no. 14303143
  misc_feature (1)..(246): Pfam Name: glycosyl hydrolase family 5 Pfam Description: Cellulase
  misc_feature (1)..(246): NCBI GI NO: 38345246 NR Description: OSJNBb0011N17.7
  misc_feature (1)..(246): NCBI GI NO: 15222185 NR Description: glycosyl hydrolase family 5/cellulase
  misc_feature (1)..(246): NCBI GI NO: 38345244 NR Description: OSJNBb0011N17.5
  misc_feature (1)..(246): NCBI GI NO: 38345245 NR Description: OSJNBb0011N17.6
  misc_feature (1)..(246): NCBI GI NO: 15231514 NR Description: glycosyl hydrolase family 5/cellulase
  misc_feature (1)..(246): NCBI GI NO: 11994430 NR Description: gene_id:MTC11.2~unknown protein
  misc_feature (1)..(246): NCBI GI NO: 15231513 NR Description: glycosyl hydrolase family 5/cellulase
  misc_feature (1)..(246): NCBI GI NO: 15237972 NR Description: glycosyl hydrolase family 5/cellulase
  misc_feature (1)..(246): NCBI GI NO: 15237397 NR Description: glycosyl hydrolase family 5/cellulase
  misc_feature (1)..(246): NCBI GI NO: 40742809 NR Description: hypothetical protein AN9166.2
MLAEGLGKRPVGAIAGDVATMGFNCVRLTWPTFLVTNASYSSLTVEQSFQRLNLTESLAGIRANNPAVVDLKLIDAFKAVVSSLGENNVMVILDNHVSKPGWCCDNADGNGFFGDGYFEPDVWVDGLTKMATMFAGVPHVVGMSLRNELRGPRQNSNDWYKYMQRGAEAVHAANPRVLVILSGLSFDNDLAFLNSRQVSLSFARKAAFEVHWYSFSNGQEWAAGNPNEVCARIGASVSRRALYLLD

SEQ ID NO: 16114 - protein, 226 aa, Triticum aestivum
  peptide (1)..(226): Ceres Seq. ID no. 14303144
  misc_feature (1)..(226): Pfam Name: glycosyl hydrolase family 5 Pfam Description: Cellulase
  misc_feature (1)..(226): NCBI GI NO: 38345246 NR Description: OSJNBb0011N17.7
  misc_feature (1)..(226): NCBI GI NO: 15222185 NR Description: glycosyl hydrolase family 5/cellulase
  misc_feature (1)..(226): NCBI GI NO: 38345244 NR Description: OSJNBb0011N17.5
  misc_feature (1)..(226): NCBI GI NO: 38345245 NR Description: OSJNBb0011N17.6
  misc_feature (1)..(226): NCBI GI NO: 15231514 NR Description: glycosyl hydrolase family 5/cellulase
  misc_feature (1)..(226): NCBI GI NO: 11994430 NR Description: gene_id:MTC11.2~unknown protein
  misc_feature (1)..(226): NCBI GI NO: 15231513 NR Description: glycosyl hydrolase family 5/cellulase
  misc_feature (1)..(226): NCBI GI NO: 15237972 NR Description: glycosyl hydrolase family 5/cellulase
  misc_feature (1)..(226): NCBI GI NO: 15237397 NR Description: glycosyl hydrolase family 5/cellulase
  misc_feature (1)..(226): NCBI GI NO: 40742809 NR Description: hypothetical protein AN9166.2
MGFNCVRLTWPTFLVTNASYSSLTVEQSFQRLNLTESLAGIRANNPAVVDLKLIDAFKAVVSSLGENNVMVILDNHVSKPGWCCDNADGNGFFGDGYFEPDVWVDGLTKMATMFAGVPHVVGMSLRNELRGPRQNSNDWYKYMQRGAEAVHAANPRVLVILSGLSFDNDLAFLNSRQVSLSFARKAAFEVHWYSFSNGQEWAAGNPNEVCARIGASVSRRALYLLD

SEQ ID NO: 16115 - DNA, 2050 bp, Triticum aestivum
  misc_feature (1)..(2050): Ceres Seq. ID no. 14301486
aatttccaaggagaatgcaggagcatgttctttccttcggcgatctcagagttgcatttcccagcaggcatcctgacatagtttgaaactccatcacctctcggcaagcaacaacggatacgatccagcacgggagctggtgctgttcaccgcccccagctacctacctgctgccgacctttatctctgcagaagatcgatggaaacccaggaaggcgatgcgcataggtccgaatccgatgctcacaaagtgaaagggagaggtggattcgtagccctgccgttcatcatagcaaatgaaatgttggagaaagttgcggggttcgggctcaacaccaacatgatcatgtacctcaccaagcagtaccacctgagcaacgtcaccgccggagcgacgctcttcgtgtgggctgcggcggcaaatttcgcgcccattcccggcgcgctcatagccgacatgtacacaggccgattcatggccatctcgctaggctccatcgcgtgcctaacaggggtcgttttcctatggctgagcgccatgatacccggagcacggccaccgccgtgcggcgtcggccttgccggggagcagtgcgcgcccccggggccgaggcaccttgcgtggctgatcgccggcttcacgttcctgtccatcggcgccggcggcatccggccgtgctccatggccttcggcgcggaccagttctcccggcaccccaaggagaggaggtcgaggatcctgcaggcctacttcaacgcctactacgcgtccatcggggtggccttcacggtcgccgtcaccgtgatcgtctacgtgcaggacaacgtcgggtggaaggccgggttcgccgttccgatgggcctcatgatgctctccgcggtgagcttcctcctgggctcccgcctctacgtcaaggagaaggggtccaagcaaatgttcgccgggataggcgccgccctcgtggcggcgatcaggaactacagggtgcagctgccggcgaagacggaggacggcgtgtaccatcatctcaaggactgcaagctcactgtccccacagacaggttgaggttcctgaacaaggcctgcatcatcagcaacaacgggggcgtggacttacccggcactggcgcggcggcctcagagcgtgatggcaacgttggcggcaggaggctgtgcacggtggaccaggtggagcagctcaagtcggccgtccggatcctgccgatctggtcgtccaccgtgttcctggcgcaggccatgagccagaactacgccgtgctgcaggccaacgagatggaccggcgcatcggcgtgggccagttccgcgtgccgggctgctccctcaccatgttcaacatggtgaccatgtcgctgtggtcgggcagctacgacaggtggatcgcgccggcgctgcgacgggtgacgggcgacccgcgggggctcaccatgaagcagcgcgtcggcgtgggcctgctgctggccaccgcggcgatggccgtgtccggcgcggtggagggcgcgcggcgcaggctggagctggccggcggcggcggcgccggcatgtcggcgttctggctggtgccgcagttcgcgctcatggggctggcggaggcgttcggcgtgatcggggagctcgagttcttctacacggagctgcccaagagcatggccagcttcagcatggcgctgctctacatggccatgggggtgggcaacctggtcaacagcctgatcgtcaaggtggtggacgacgcgagcaggcgcggggggaggacgagctggctctccagcgatctcaacgcgggccactacgactactactactggctgctcgccggtttgggcgccgtcaacttcgtgtacttcctctggtgcgcctggaagtacggcgaggaggggaagaacgtggagtgggaggagggtgaaggtgagagggaacggccgatggcctagttttgtaatgctgagctcgggtgtcacaatgaggccatttttaacgtgagtctgaactcagagggcaaaaaccgcaggttgcggggttggttctcc

SEQ ID NO: 16116 - protein, 584 aa, Triticum aestivum
  peptide (1)..(584): Ceres Seq. ID no. 14301487
  misc_feature (92)..(502): Pfam Name: Pfam Description:  POT family
  misc_feature (17)..(578): NCBI GI NO: 34909752 NR Description: putative peptide transporter
  misc_feature (5)..(580): NCBI GI NO: 15218183 NR Description: peptide transporter -related
  misc_feature (21)..(580): NCBI GI NO: 15233307 NR Description: transport protein -related [Arabidopsis thaliana]
  misc_feature (21)..(564): NCBI GI NO: 20466248 NR Description: putative transport protein [Arabidopsis thaliana]
  misc_feature (12)..(574): NCBI GI NO: 34909754 NR Description: putative peptide transporter
  misc_feature (48)..(580): NCBI GI NO: 9294465 NR Description: peptide/amino acid transporter-like protein
  misc_feature (14)..(583): NCBI GI NO: 18409391 NR Description: peptide transporter -related
  misc_feature (12)..(581): NCBI GI NO: 7488141 NR Description: probable peptide transport protein T17F15
  misc_feature (12)..(581): NCBI GI NO: 18408546 NR Description: peptide transporter -related
  misc_feature (105)..(583): NCBI GI NO: 25404847 NR Description: probable peptide transporter T17F3.10
METQEGDAHRSESDAHKVKGRGGFVALPFIIANEMLEKVAGFGLNTNMIMYLTKQYHLSNVTAGATLFVWAAAANFAPIPGALIADMYTGRFMAISLGSIACLTGVVFLWLSAMIPGARPPPCGVGLAGEQCAPPGPRHLAWLIAGFTFLSIGAGGIRPCSMAFGADQFSRHPKERRSRILQAYFNAYYASIGVAFTVAVTVIVYVQDNVGWKAGFAVPMGLMMLSAVSFLLGSRLYVKEKGSKQMFAGIGAALVAAIRNYRVQLPAKTEDGVYHHLKDCKLTVPTDRLRFLNKACIISNNGGVDLPGTGAAASERDGNVGGRRLCTVDQVEQLKSAVRILPIWSSTVFLAQAMSQNYAVLQANEMDRRIGVGQFRVPGCSLTMFNMVTMSLWSGSYDRWIAPALRRVTGDPRGLTMKQRVGVGLLLATAAMAVSGAVEGARRRLELAGGGGAGMSAFWLVPQFALMGLAEAFGVIGELEFFYTELPKSMASFSMALLYMAMGVGNLVNSLIVKVVDDASRRGGRTSWLSSDLNAGHYDYYYWLLAGLGAVNFVYFLWCAWKYGEEGKNVEWEEGEGERERPMA

SEQ ID NO: 16117 - protein, 550 aa, Triticum aestivum
  peptide (1)..(550): Ceres Seq. ID no. 14301488
  misc_feature (58)..(468): Pfam Name: Pfam Description:  POT family
  misc_feature (1)..(544): NCBI GI NO: 34909752 NR Description: putative peptide transporter
  misc_feature (1)..(546): NCBI GI NO: 15218183 NR Description: peptide transporter -related
  misc_feature (1)..(546): NCBI GI NO: 15233307 NR Description: transport protein -related [Arabidopsis thaliana]
  misc_feature (1)..(530): NCBI GI NO: 20466248 NR Description: putative transport protein [Arabidopsis thaliana]
  misc_feature (1)..(540): NCBI GI NO: 34909754 NR Description: putative peptide transporter
  misc_feature (14)..(546): NCBI GI NO: 9294465 NR Description: peptide/amino acid transporter-like protein
  misc_feature (1)..(549): NCBI GI NO: 18409391 NR Description: peptide transporter -related
  misc_feature (1)..(547): NCBI GI NO: 7488141 NR Description: probable peptide transport protein T17F15
  misc_feature (1)..(547): NCBI GI NO: 18408546 NR Description: peptide transporter -related
  misc_feature (71)..(549): NCBI GI NO: 25404847 NR Description: probable peptide transporter T17F3.10
MLEKVAGFGLNTNMIMYLTKQYHLSNVTAGATLFVWAAAANFAPIPGALIADMYTGRFMAISLGSIACLTGVVFLWLSAMIPGARPPPCGVGLAGEQCAPPGPRHLAWLIAGFTFLSIGAGGIRPCSMAFGADQFSRHPKERRSRILQAYFNAYYASIGVAFTVAVTVIVYVQDNVGWKAGFAVPMGLMMLSAVSFLLGSRLYVKEKGSKQMFAGIGAALVAAIRNYRVQLPAKTEDGVYHHLKDCKLTVPTDRLRFLNKACIISNNGGVDLPGTGAAASERDGNVGGRRLCTVDQVEQLKSAVRILPIWSSTVFLAQAMSQNYAVLQANEMDRRIGVGQFRVPGCSLTMFNMVTMSLWSGSYDRWIAPALRRVTGDPRGLTMKQRVGVGLLLATAAMAVSGAVEGARRRLELAGGGGAGMSAFWLVPQFALMGLAEAFGVIGELEFFYTELPKSMASFSMALLYMAMGVGNLVNSLIVKVVDDASRRGGRTSWLSSDLNAGHYDYYYWLLAGLGAVNFVYFLWCAWKYGEEGKNVEWEEGEGERERPMA

SEQ ID NO: 16118 - protein, 537 aa, Triticum aestivum
  peptide (1)..(537): Ceres Seq. ID no. 14301489
  misc_feature (45)..(455): Pfam Name: Pfam Description:  POT family
  misc_feature (1)..(531): NCBI GI NO: 34909752 NR Description: putative peptide transporter
  misc_feature (1)..(533): NCBI GI NO: 15218183 NR Description: peptide transporter -related
  misc_feature (1)..(533): NCBI GI NO: 15233307 NR Description: transport protein -related [Arabidopsis thaliana]
  misc_feature (1)..(517): NCBI GI NO: 20466248 NR Description: putative transport protein [Arabidopsis thaliana]
  misc_feature (1)..(527): NCBI GI NO: 34909754 NR Description: putative peptide transporter
  misc_feature (1)..(533): NCBI GI NO: 9294465 NR Description: peptide/amino acid transporter-like protein
  misc_feature (1)..(536): NCBI GI NO: 18409391 NR Description: peptide transporter -related
  misc_feature (1)..(534): NCBI GI NO: 7488141 NR Description: probable peptide transport protein T17F15
  misc_feature (1)..(534): NCBI GI NO: 18408546 NR Description: peptide transporter -related
  misc_feature (58)..(536): NCBI GI NO: 25404847 NR Description: probable peptide transporter T17F3.10
MIMYLTKQYHLSNVTAGATLFVWAAAANFAPIPGALIADMYTGRFMAISLGSIACLTGVVFLWLSAMIPGARPPPCGVGLAGEQCAPPGPRHLAWLIAGFTFLSIGAGGIRPCSMAFGADQFSRHPKERRSRILQAYFNAYYASIGVAFTVAVTVIVYVQDNVGWKAGFAVPMGLMMLSAVSFLLGSRLYVKEKGSKQMFAGIGAALVAAIRNYRVQLPAKTEDGVYHHLKDCKLTVPTDRLRFLNKACIISNNGGVDLPGTGAAASERDGNVGGRRLCTVDQVEQLKSAVRILPIWSSTVFLAQAMSQNYAVLQANEMDRRIGVGQFRVPGCSLTMFNMVTMSLWSGSYDRWIAPALRRVTGDPRGLTMKQRVGVGLLLATAAMAVSGAVEGARRRLELAGGGGAGMSAFWLVPQFALMGLAEAFGVIGELEFFYTELPKSMASFSMALLYMAMGVGNLVNSLIVKVVDDASRRGGRTSWLSSDLNAGHYDYYYWLLAGLGAVNFVYFLWCAWKYGEEGKNVEWEEGEGERERPMA

SEQ ID NO: 16119 - DNA, 1351 bp, Triticum aestivum
  misc_feature (1)..(1351): Ceres Seq. ID no. 13656797
cattagatactgtgagccttctcctcctcatccgtgacactagcatcatcccatcccatggtgatcgggcaaaaaaatgcggagggttcgatccaacggtcatgcctaccccgtctgctctgcgcgcgggagcagtactccgcattgctccttttcgtggccgtggccgccgtctgcctcctcgtcgtggttggcagtggcacatacgcgctatcgtctccggccgacgtcggcggcgagatggagcagaggttcttcaacatatttcctcgccaagcagcggccggcgcctcggacgatgaactggaggcggcgctgcgcggcgcggccgacgcgaacaggacgctgatcgtgagcgtgctgaacaaggcgtacgccgaggagggcggcctgctggaccttttcatcgagagcctgaagcaaggggagggcaccgggcatctcatcggccacgtcctccttgtagccatggacgaaccagccttccgcaggtgcagtggcctcggcggcgtccggtgctacctccttcccccggcggccgcgaccaacagcaccaacctctcctcggagcagctctacatgtctggcggcttcatacgcatgatgtggcggcgcattcgcctcctcggcgacatcctcaagcacggctacagcttcatattcaccgatatggatgtgatgtggctgaggaacccgttcccgagcctgaatcgcaccgaggaggaagacctcctgatcagcaccgacggattcaaggggcggccggaggactacctcggccacgagctcaacacgaggttcttcttcgtggccgcgagcaaccggacggcggcgatgttcgacgagtggcacgcggcacgggaggcgtcggaaggcatgaaggagcaggacgtgctaaaccagatgaagcaacaaggcgcgttccgccggctcggcgtgagggtgcgcgtcctggacacggcgcgcttcagcggcttctgccaggacagccaggacgcccggcaggtggtcaccgtgcacgccaactgctgccggaccatgcgggccaaggtcgccgacctcaaggccgttcttggcgccgccaagcagctcaacgggacgacggggcggctgaaatggccgcgtcattcagcctgcttgggatcgtggaggaagtgagacgaggaagcgctcgttcgaggcttcaccttgtctcccttatctcgtttccattgctttacttaccattcgtcactttactgctggtaagatgttttggtttgttggcatgaggaaagaaaaacacccaaaacatcttgctgagtagtaccaagttatcacttatcacatagtacttccttctggaggggtg

SEQ ID NO: 16120 - protein, 366 aa, Triticum aestivum
  peptide (1)..(366): Ceres Seq. ID no. 15219854
  misc_feature (38)..(364): NCBI GI NO: 18396892 NR Description: expressed protein [Arabidopsis thaliana]
  misc_feature (81)..(365): NCBI GI NO: 25372968 NR Description: protein F1K23.10 [imported] - Arabidopsis thaliana
  misc_feature (81)..(360): NCBI GI NO: 6691205 NR Description: F1K23.11 [Arabidopsis thaliana]
  misc_feature (78)..(358): NCBI GI NO: 23306127 NR Description: Putataive InsB from Escherichia coli
  misc_feature (24)..(339): NCBI GI NO: 15235236 NR Description: hypothetical protein common family
  misc_feature (93)..(358): NCBI GI NO: 6063544 NR Description: similar to Arabidopsis thaliana chromosome 2
  misc_feature (101)..(357): NCBI GI NO: 15218760 NR Description: hypothetical protein [Arabidopsis thaliana]
  misc_feature (7)..(339): NCBI GI NO: 21536907 NR Description: regulatory protein [Arabidopsis thaliana]
  misc_feature (69)..(366): NCBI GI NO: 15223826 NR Description: expressed protein [Arabidopsis thaliana]
  misc_feature (82)..(354): NCBI GI NO: 15235236 NR Description: hypothetical protein common family
MVIGQKNAEGSIQRSCLPRLLCAREQYSALLLFVAVAAVCLLVVVGSGTYALSSPADVGGEMEQRFFNIFPRQAAAGASDDELEAALRGAADANRTLIVSVLNKAYAEEGGLLDLFIESLKQGEGTGHLIGHVLLVAMDEPAFRRCSGLGGVRCYLLPPAAATNSTNLSSEQLYMSGGFIRMMWRRIRLLGDILKHGYSFIFTDMDVMWLRNPFPSLNRTEEEDLLISTDGFKGRPEDYLGHELNTRFFFVAASNRTAAMFDEWHAAREASEGMKEQDVLNQMKQQGAFRRLGVRVRVLDTARFSGFCQDSQDARQVVTVHANCCRTMRAKVADLKAVLGAAKQLNGTTGRLKWPRHSACLGSWRK

SEQ ID NO: 16121 - protein, 305 aa, Triticum aestivum
  peptide (1)..(305): Ceres Seq. ID no. 15219855
  misc_feature (1)..(303): NCBI GI NO: 18396892 NR Description: expressed protein [Arabidopsis thaliana]
  misc_feature (20)..(304): NCBI GI NO: 25372968 NR Description: protein F1K23.10 [imported] - Arabidopsis thaliana
  misc_feature (20)..(299): NCBI GI NO: 6691205 NR Description: F1K23.11 [Arabidopsis thaliana]
  misc_feature (17)..(297): NCBI GI NO: 23306127 NR Description: Putataive InsB from Escherichia coli
  misc_feature (1)..(278): NCBI GI NO: 15235236 NR Description: hypothetical protein common family
  misc_feature (32)..(297): NCBI GI NO: 6063544 NR Description: similar to Arabidopsis thaliana chromosome 2
  misc_feature (40)..(296): NCBI GI NO: 15218760 NR Description: hypothetical protein [Arabidopsis thaliana]
  misc_feature (1)..(278): NCBI GI NO: 21536907 NR Description: regulatory protein [Arabidopsis thaliana]
  misc_feature (8)..(305): NCBI GI NO: 15223826 NR Description: expressed protein [Arabidopsis thaliana]
  misc_feature (21)..(293): NCBI GI NO: 15235236 NR Description: hypothetical protein common family
MEQRFFNIFPRQAAAGASDDELEAALRGAADANRTLIVSVLNKAYAEEGGLLDLFIESLKQGEGTGHLIGHVLLVAMDEPAFRRCSGLGGVRCYLLPPAAATNSTNLSSEQLYMSGGFIRMMWRRIRLLGDILKHGYSFIFTDMDVMWLRNPFPSLNRTEEEDLLISTDGFKGRPEDYLGHELNTRFFFVAASNRTAAMFDEWHAAREASEGMKEQDVLNQMKQQGAFRRLGVRVRVLDTARFSGFCQDSQDARQVVTVHANCCRTMRAKVADLKAVLGAAKQLNGTTGRLKWPRHSACLGSWRK

SEQ ID NO: 16122 - protein, 229 aa, Triticum aestivum
  peptide (1)..(229): Ceres Seq. ID no. 15219856
  misc_feature (1)..(227): NCBI GI NO: 18396892 NR Description: expressed protein [Arabidopsis thaliana]
  misc_feature (1)..(228): NCBI GI NO: 25372968 NR Description: protein F1K23.10 [imported] - Arabidopsis thaliana
  misc_feature (1)..(223): NCBI GI NO: 6691205 NR Description: F1K23.11 [Arabidopsis thaliana]
  misc_feature (1)..(221): NCBI GI NO: 23306127 NR Description: Putataive InsB from Escherichia coli
  misc_feature (1)..(202): NCBI GI NO: 15235236 NR Description: hypothetical protein common family
  misc_feature (1)..(221): NCBI GI NO: 6063544 NR Description: similar to Arabidopsis thaliana chromosome 2
  misc_feature (1)..(220): NCBI GI NO: 15218760 NR Description: hypothetical protein [Arabidopsis thaliana]
  misc_feature (1)..(202): NCBI GI NO: 21536907 NR Description: regulatory protein [Arabidopsis thaliana]
  misc_feature (1)..(229): NCBI GI NO: 15223826 NR Description: expressed protein [Arabidopsis thaliana]
  misc_feature (1)..(217): NCBI GI NO: 15235236 NR Description: hypothetical protein common family
MDEPAFRRCSGLGGVRCYLLPPAAATNSTNLSSEQLYMSGGFIRMMWRRIRLLGDILKHGYSFIFTDMDVMWLRNPFPSLNRTEEEDLLISTDGFKGRPEDYLGHELNTRFFFVAASNRTAAMFDEWHAAREASEGMKEQDVLNQMKQQGAFRRLGVRVRVLDTARFSGFCQDSQDARQVVTVHANCCRTMRAKVADLKAVLGAAKQLNGTTGRLKWPRHSACLGSWRK

SEQ ID NO: 16123 - DNA, 1883 bp, Triticum aestivum
  misc_feature (1)..(1883): Ceres Seq. ID no. 14308007
ataaccataaaccatctcatatctcaggctctcgacttagcagcagagaaagccaagcacagaattaaccacaaatcatggagatggagctcaatctcgtctcgtacgtgtccatcgccctgttcgtcctctcgggcgcgtacgtctaccacgcgacgcggagccggtcgccgaggcagcggctcccgccggcgccgccggggtggcccgtgatcggccacctccacctgctgacggacatgccccaccacgcgctggcggagctggccaagaccatgcgcgccccactgctccggctccggctcgggagcgtcccggccctggtgatctccaagcccgacctggcccgcgccgcgctcaccagcaacgacgcggccatggcgtcccgcccccacctcctctccggccagttcctctcgttcgggtgctccgacgtgaccttcgcccccgcggggccgtaccaccgcatggcgcggcgggtggtcgtctccgagctcctctcggcgcgccgcgtcgccacctacggcagcgtccggggcaaggagctccgccgcctgctcgcgcacctcaccaagaacaccaagccgggaacgcccgtcgacctcagcgagtgcttcctcaacctcgccaacgacgtgctctgccgcgtggccttcggccgccggttcccgcacggcaaggacgacaagctcgccgcggtgctcgccgaggcccaggacctgttcgccgggttcaccatcggggacttcttcccggagctcgagcccttcgccagcaccgtcacgggcctccgccgccggctgaagagctgcctcgccgacctccgcgaggtctgcgacgacatcgtcgaggagcacgtgagcggcaagcaccagcgcctccccggcgaccgcgacgaggacttcgtggacgtgctcctccgcgtccagaagtcgcccgacctcgaggtcccgctcaccgacgacaacctcaaagccctcgtcctggacatgttcgtcgccggcacggacacgacgttcgcgacgctggagtgggtgatgacggagctggtgcgccacccgcgcatccttcaaaaggcgcaggaggaggtccggcgggtggtgggcgccaagggccgggtggaggagtcggacctggcggagctccactacatgcgcgccatcatcaaggagaccttccggctgcacccggcggtgccgctgctcgtgccgcgggagaccgtcgcggcgtgcactctcggcggctacgacatcccggccaagacccgcgtcttcatcaacaccttcgccatgggccgggacccggagatctgggaggagccgctggagtactcgccggagcggttcgaggtggccggcgccggcggcgagatcgacctcaaggacccggactacaagctgctgccgttcggcggcgggcggagggggtgcccggggtacacgttcgcgctggccaccgtgcaggtatcgctggccagcctgctgtaccacttcgagtgggcgctgccggccggcgtgcgcgccgaggacgtgagcgtggaggagaccttcgggctggccaccaggaagaaggagccgctcttcgtcgccgtcagcaagagcgatgtgtaccagttcaagggggaggagctcaacgaggtttaaattatttttgcttagtaatttcttgtcatgcaagtaggttttttctcttctcttcagacaatgcaaataagagagtaggtagctaggtaaaaaaacaaaagcaaggaagagagagaataggtaaaataaaaatggatctagtaccgcacgtgttggtgcctgacttgctgtggtaagagacgtgtatgtgtgtaattttgttgtggtaattcttctaaaaaaatgcaatattttgtagtc

SEQ ID NO: 16124 - protein, 521 aa, Triticum aestivum
  peptide (1)..(521): Ceres Seq. ID no. 14308008
  misc_feature (37)..(477): Pfam Name: Pfam Description:  Cytochrome P450
  misc_feature (7)..(501): NCBI GI NO: 25282608 NR Description: cytochrome P-450LXXIA1 [similarity] - avocado
  misc_feature (7)..(477): NCBI GI NO: 117188 NR Description: CYTOCHROME P450 71A1 (CYPLXXIA1) (ARP-2)
  misc_feature (15)..(503): NCBI GI NO: 5915816 NR Description: Cytochrome P450 71A9 (P450 CP1)
  misc_feature (13)..(509): NCBI GI NO: 17644125 NR Description: cytochrome P450-1 [Musa acuminata]
  misc_feature (5)..(504): NCBI GI NO: 12331298 NR Description: cytochrome P450 [Solanum tuberosum]
  misc_feature (13)..(506): NCBI GI NO: 584861 NR Description: Cytochrome P450 71A2 (CYPLXXIA2) (P-450EG4)
  misc_feature (13)..(501): NCBI GI NO: 13516750 NR Description: cytochrome P450 [Asparagus officinalis]
  misc_feature (13)..(501): NCBI GI NO: 13516748 NR Description: cytochrome P450 [Asparagus officinalis]
  misc_feature (3)..(501): NCBI GI NO: 15222174 NR Description: cytochrome P450 family [Arabidopsis thaliana]
  misc_feature (3)..(503): NCBI GI NO: 5915837 NR Description: Cytochrome P450 71D8 (P450 CP7)
MEMELNLVSYVSIALFVLSGAYVYHATRSRSPRQRLPPAPPGWPVIGHLHLLTDMPHHALAELAKTMRAPLLRLRLGSVPALVISKPDLARAALTSNDAAMASRPHLLSGQFLSFGCSDVTFAPAGPYHRMARRVVVSELLSARRVATYGSVRGKELRRLLAHLTKNTKPGTPVDLSECFLNLANDVLCRVAFGRRFPHGKDDKLAAVLAEAQDLFAGFTIGDFFPELEPFASTVTGLRRRLKSCLADLREVCDDIVEEHVSGKHQRLPGDRDEDFVDVLLRVQKSPDLEVPLTDDNLKALVLDMFVAGTDTTFATLEWVMTELVRHPRILQKAQEEVRRVVGAKGRVEESDLAELHYMRAIIKETFRLHPAVPLLVPRETVAACTLGGYDIPAKTRVFINTFAMGRDPEIWEEPLEYSPERFEVAGAGGEIDLKDPDYKLLPFGGGRRGCPGYTFALATVQVSLASLLYHFEWALPAGVRAEDVSVEETFGLATRKKEPLFVAVSKSDVYQFKGEELNEV

SEQ ID NO: 16125 - protein, 519 aa, Triticum aestivum
  peptide (1)..(519): Ceres Seq. ID no. 14308009
  misc_feature (35)..(475): Pfam Name: Pfam Description:  Cytochrome P450
  misc_feature (5)..(499): NCBI GI NO: 25282608 NR Description: cytochrome P-450LXXIA1 [similarity] - avocado
  misc_feature (5)..(475): NCBI GI NO: 117188 NR Description: CYTOCHROME P450 71A1 (CYPLXXIA1) (ARP-2)
  misc_feature (13)..(501): NCBI GI NO: 5915816 NR Description: Cytochrome P450 71A9 (P450 CP1)
  misc_feature (11)..(507): NCBI GI NO: 17644125 NR Description: cytochrome P450-1 [Musa acuminata]
  misc_feature (3)..(502): NCBI GI NO: 12331298 NR Description: cytochrome P450 [Solanum tuberosum]
  misc_feature (11)..(504): NCBI GI NO: 584861 NR Description: Cytochrome P450 71A2 (CYPLXXIA2) (P-450EG4)
  misc_feature (11)..(499): NCBI GI NO: 13516750 NR Description: cytochrome P450 [Asparagus officinalis]
  misc_feature (11)..(499): NCBI GI NO: 13516748 NR Description: cytochrome P450 [Asparagus officinalis]
  misc_feature (1)..(499): NCBI GI NO: 15222174 NR Description: cytochrome P450 family [Arabidopsis thaliana]
  misc_feature (1)..(501): NCBI GI NO: 5915837 NR Description: Cytochrome P450 71D8 (P450 CP7)
MELNLVSYVSIALFVLSGAYVYHATRSRSPRQRLPPAPPGWPVIGHLHLLTDMPHHALAELAKTMRAPLLRLRLGSVPALVISKPDLARAALTSNDAAMASRPHLLSGQFLSFGCSDVTFAPAGPYHRMARRVVVSELLSARRVATYGSVRGKELRRLLAHLTKNTKPGTPVDLSECFLNLANDVLCRVAFGRRFPHGKDDKLAAVLAEAQDLFAGFTIGDFFPELEPFASTVTGLRRRLKSCLADLREVCDDIVEEHVSGKHQRLPGDRDEDFVDVLLRVQKSPDLEVPLTDDNLKALVLDMFVAGTDTTFATLEWVMTELVRHPRILQKAQEEVRRVVGAKGRVEESDLAELHYMRAIIKETFRLHPAVPLLVPRETVAACTLGGYDIPAKTRVFINTFAMGRDPEIWEEPLEYSPERFEVAGAGGEIDLKDPDYKLLPFGGGRRGCPGYTFALATVQVSLASLLYHFEWALPAGVRAEDVSVEETFGLATRKKEPLFVAVSKSDVYQFKGEELNEV

SEQ ID NO: 16126 - protein, 467 aa, Triticum aestivum
  peptide (1)..(467): Ceres Seq. ID no. 14308010
  misc_feature (1)..(423): Pfam Name: Pfam Description:  Cytochrome P450
  misc_feature (1)..(447): NCBI GI NO: 25282608 NR Description: cytochrome P-450LXXIA1 [similarity] - avocado
  misc_feature (1)..(423): NCBI GI NO: 117188 NR Description: CYTOCHROME P450 71A1 (CYPLXXIA1) (ARP-2)
  misc_feature (1)..(449): NCBI GI NO: 5915816 NR Description: Cytochrome P450 71A9 (P450 CP1)
  misc_feature (1)..(455): NCBI GI NO: 17644125 NR Description: cytochrome P450-1 [Musa acuminata]
  misc_feature (1)..(450): NCBI GI NO: 12331298 NR Description: cytochrome P450 [Solanum tuberosum]
  misc_feature (1)..(452): NCBI GI NO: 584861 NR Description: Cytochrome P450 71A2 (CYPLXXIA2) (P-450EG4)
  misc_feature (1)..(447): NCBI GI NO: 13516750 NR Description: cytochrome P450 [Asparagus officinalis]
  misc_feature (1)..(447): NCBI GI NO: 13516748 NR Description: cytochrome P450 [Asparagus officinalis]
  misc_feature (1)..(447): NCBI GI NO: 15222174 NR Description: cytochrome P450 family [Arabidopsis thaliana]
  misc_feature (1)..(449): NCBI GI NO: 5915837 NR Description: Cytochrome P450 71D8 (P450 CP7)
MPHHALAELAKTMRAPLLRLRLGSVPALVISKPDLARAALTSNDAAMASRPHLLSGQFLSFGCSDVTFAPAGPYHRMARRVVVSELLSARRVATYGSVRGKELRRLLAHLTKNTKPGTPVDLSECFLNLANDVLCRVAFGRRFPHGKDDKLAAVLAEAQDLFAGFTIGDFFPELEPFASTVTGLRRRLKSCLADLREVCDDIVEEHVSGKHQRLPGDRDEDFVDVLLRVQKSPDLEVPLTDDNLKALVLDMFVAGTDTTFATLEWVMTELVRHPRILQKAQEEVRRVVGAKGRVEESDLAELHYMRAIIKETFRLHPAVPLLVPRETVAACTLGGYDIPAKTRVFINTFAMGRDPEIWEEPLEYSPERFEVAGAGGEIDLKDPDYKLLPFGGGRRGCPGYTFALATVQVSLASLLYHFEWALPAGVRAEDVSVEETFGLATRKKEPLFVAVSKSDVYQFKGEELNEV

SEQ ID NO: 16127 - DNA, 1393 bp, Triticum aestivum
  misc_feature (1)..(1393): Ceres Seq. ID no. 13656849
accacacactgccctccctccccctccctccccccaccccactcctccccgccgccgccgccgccgccccgctccgatccgccccgcgccgcgcggatcgccgcgccatggaccagtacgagaaggtggagaagatcggggagggcacgtacggggtggtgtacaaggccaaggaccgctacaccaacgagacgatcgcgctcaagaagatccggctggagcaggaggacgagggcgtcccctccaccgccatccgcgagatctccctcctcaaggagatgcagcaccggaacatcgtcaggctgcaggacgtggtgcacaacgagaagtgcatatacctcgtcttcgagtacctcgacctcgacctcaagaagcacatggactcctccgcggacttcaagaaccaccacatagtcaagtccttcctctaccagatcctgcacggcatcgcctactgccactcgcaccgtgtgcttcacagggatctcaagccccagaacctgctgatagatcgccgtaccaattcattgaagcttgctgacttcggattggcgagggcgttcggcattcctgtccggacatttactcacgaggtggtgacattatggtatagagcaccagaaattcttctgggtgcgaggcagtattctacccctgttgatgtgtggtcggttggttgcattttcgccgaaatggtgaatcagaaacctctatttcctggtgattctgagattgatgaactcttcaagattttcagaattatgggcactcctaatgaagaaacctggccaggtgtttcttcgttacctgactacaaatcagctttccccaagtggccatccgtggatcttgcaactgtggttccaacactcgaacctttgggacttgatcttctctctaaaatgctctgcttagatccaaccagaagaatcaacgcccgaaccgccctcgagcacgagtacttcaaggatctggacgtatcctcgtagatcacttgccctgctcctctgtaaattaagatcgcgtcgactgatcgatagcttcctggatcatgtactgtgtgctcctttctctcccattctttctgactctggctgtgtagagagaaatgagaacggaagcgcctccggattcacccttccttgtagtccaagccaattgaaaaatgatcctgatgctctgggagctctgcattgcgatttcgcccgtatttatatggacatcgacgccggcaccagacttgttcatgtacgatggattttggagtagtggcagatagtcaaggggctgcagtgtttcatgaactaccaactgatgtgacaatgtttgggagtgtactactacttgtacttggtaaacatcattatcatcatgaatggaatcagttgtggac

SEQ ID NO: 16128 - protein, 328 aa, Triticum aestivum
  peptide (1)..(328): Ceres Seq. ID no. 13656850
  misc_feature (39)..(313): Pfam Name: Pfam Description:  Protein kinase domain
  misc_feature (36)..(315): NCBI GI NO: 4096105 NR Description: p34cdc2 [Triticum aestivum]
  misc_feature (36)..(327): NCBI GI NO: 231707 NR Description: CELL DIVISION CONTROL PROTEIN 2 HOMOLOG 2
  misc_feature (36)..(324): NCBI GI NO: 13249052 NR Description: CDC2 homolog
  misc_feature (36)..(324): NCBI GI NO: 541800 NR Description: protein kinase (EC 2.7.1.37) cdc2 - Norway spruce
  misc_feature (36)..(324): NCBI GI NO: 17224978 NR Description: cyclin dependent kinase [Helianthus annuus]
  misc_feature (36)..(324): NCBI GI NO: 2289782 NR Description: cdc2 kinase [Allium cepa]
  misc_feature (36)..(324): NCBI GI NO: 8671339 NR Description: cdc2Pnc [Pinus contorta]
  misc_feature (36)..(326): NCBI GI NO: 1196796 NR Description: protein kinase p34cdc2
  misc_feature (36)..(324): NCBI GI NO: 25989351 NR Description: cyclin-dependent kinase [Helianthus tuberosus]
  misc_feature (36)..(324): NCBI GI NO: 9885803 NR Description: cyclin-dependent kinase A:4 [Nicotiana tabacum]
HTLPSLPLPPPTPLLPAAAAAAPLRSAPRRADRRAMDQYEKVEKIGEGTYGVVYKAKDRYTNETIALKKIRLEQEDEGVPSTAIREISLLKEMQHRNIVRLQDVVHNEKCIYLVFEYLDLDLKKHMDSSADFKNHHIVKSFLYQILHGIAYCHSHRVLHRDLKPQNLLIDRRTNSLKLADFGLARAFGIPVRTFTHEVVTLWYRAPEILLGARQYSTPVDVWSVGCIFAEMVNQKPLFPGDSEIDELFKIFRIMGTPNEETWPGVSSLPDYKSAFPKWPSVDLATVVPTLEPLGLDLLSKMLCLDPTRRINARTALEHEYFKDLDVSS

SEQ ID NO: 16129 - protein, 293 aa, Triticum aestivum
  peptide (1)..(293): Ceres Seq. ID no. 13656851
  misc_feature (4)..(278): Pfam Name: Pfam Description:  Protein kinase domain
  misc_feature (1)..(280): NCBI GI NO: 4096105 NR Description: p34cdc2 [Triticum aestivum]
  misc_feature (1)..(292): NCBI GI NO: 231707 NR Description: CELL DIVISION CONTROL PROTEIN 2 HOMOLOG 2
  misc_feature (1)..(289): NCBI GI NO: 13249052 NR Description: CDC2 homolog
  misc_feature (1)..(289): NCBI GI NO: 541800 NR Description: protein kinase (EC 2.7.1.37) cdc2 - Norway spruce
  misc_feature (1)..(289): NCBI GI NO: 17224978 NR Description: cyclin dependent kinase [Helianthus annuus]
  misc_feature (1)..(289): NCBI GI NO: 2289782 NR Description: cdc2 kinase [Allium cepa]
  misc_feature (1)..(289): NCBI GI NO: 8671339 NR Description: cdc2Pnc [Pinus contorta]
  misc_feature (1)..(291): NCBI GI NO: 1196796 NR Description: protein kinase p34cdc2
  misc_feature (1)..(289): NCBI GI NO: 25989351 NR Description: cyclin-dependent kinase [Helianthus tuberosus]
  misc_feature (1)..(289): NCBI GI NO: 9885803 NR Description: cyclin-dependent kinase A:4 [Nicotiana tabacum]
MDQYEKVEKIGEGTYGVVYKAKDRYTNETIALKKIRLEQEDEGVPSTAIREISLLKEMQHRNIVRLQDVVHNEKCIYLVFEYLDLDLKKHMDSSADFKNHHIVKSFLYQILHGIAYCHSHRVLHRDLKPQNLLIDRRTNSLKLADFGLARAFGIPVRTFTHEVVTLWYRAPEILLGARQYSTPVDVWSVGCIFAEMVNQKPLFPGDSEIDELFKIFRIMGTPNEETWPGVSSLPDYKSAFPKWPSVDLATVVPTLEPLGLDLLSKMLCLDPTRRINARTALEHEYFKDLDVSS

SEQ ID NO: 16130 - protein, 236 aa, Triticum aestivum
  peptide (1)..(236): Ceres Seq. ID no. 13656852
  misc_feature (1)..(221): Pfam Name: Pfam Description:  Protein kinase domain
  misc_feature (1)..(223): NCBI GI NO: 4096105 NR Description: p34cdc2 [Triticum aestivum]
  misc_feature (1)..(235): NCBI GI NO: 231707 NR Description: CELL DIVISION CONTROL PROTEIN 2 HOMOLOG 2
  misc_feature (1)..(232): NCBI GI NO: 13249052 NR Description: CDC2 homolog
  misc_feature (1)..(232): NCBI GI NO: 541800 NR Description: protein kinase (EC 2.7.1.37) cdc2 - Norway spruce
  misc_feature (1)..(232): NCBI GI NO: 17224978 NR Description: cyclin dependent kinase [Helianthus annuus]
  misc_feature (1)..(232): NCBI GI NO: 2289782 NR Description: cdc2 kinase [Allium cepa]
  misc_feature (1)..(232): NCBI GI NO: 8671339 NR Description: cdc2Pnc [Pinus contorta]
  misc_feature (1)..(234): NCBI GI NO: 1196796 NR Description: protein kinase p34cdc2
  misc_feature (1)..(232): NCBI GI NO: 25989351 NR Description: cyclin-dependent kinase [Helianthus tuberosus]
  misc_feature (1)..(232): NCBI GI NO: 9885803 NR Description: cyclin-dependent kinase A:4 [Nicotiana tabacum]
MQHRNIVRLQDVVHNEKCIYLVFEYLDLDLKKHMDSSADFKNHHIVKSFLYQILHGIAYCHSHRVLHRDLKPQNLLIDRRTNSLKLADFGLARAFGIPVRTFTHEVVTLWYRAPEILLGARQYSTPVDVWSVGCIFAEMVNQKPLFPGDSEIDELFKIFRIMGTPNEETWPGVSSLPDYKSAFPKWPSVDLATVVPTLEPLGLDLLSKMLCLDPTRRINARTALEHEYFKDLDVSS

SEQ ID NO: 16131 - DNA, 881 bp, Triticum aestivum
  misc_feature (1)..(881): Ceres Seq. ID no. 12626248
gtgctcatcgcagtaaaatccagaaacatccgacgaacacaggcagggagagaagggagagcgtggacaatggcatcacgggtggtgttctccaacaggatcccgctggcgcgcgccatggagaacctcctggccgcgtcctccgggtcggctctcaggccggctgccgtcgccggcggcgtccgcgggtacaacgccggcgcgcccctccggagctacgaccgggacgaggcggtcgagcgcagcccccgcagcggcgcgcgcgagcgcgacgtcggcgtgcccagcttcttctcagatgtgttccgtgacccgttcagcgcgccgcagagcctgggccggctgctgagcatgctggacgacgtggcggcggcgtccaccgacggcgcggcgcgggcggcgccgctccggcgcgggtggaacgcgagggaggacgcggacgcgctgcggctgagggtggacatgccggggctgggcaaggagcacgtgaaggtgtgggcggagcagaacagcctggtgatcaagggcgagggcgagaaggaatcggaccgggagggcgccgacgcgccgaggtacagcggccggctcgagctcgccggggacgtgtaccggatggaccagatcaaggccgagatgaagaacggcgtgctccgggtggtcgtgcccaaggtcaaggaggaggagcgcaaggacgtcttcgaggtcaaagtggactaggcactaggcaggatcacgccaagtttcgcgtcacggaatagccgagtcgtctcgtgtgagccgagtaataataactaaaaataactcaagcttttttgtttgtcgtgttgggtctggatgttttggtctcgtgttaagtgcctgtacgagtagaatcgatcaaa

SEQ ID NO: 16132 - protein, 238 aa, Triticum aestivum
  peptide (1)..(238): Ceres Seq. ID no. 12626249
  misc_feature (24)..(238): NCBI GI NO: 4138869 NR Description: small heat shock protein Hsp23.5
  misc_feature (24)..(238): NCBI GI NO: 7441311 NR Description: heat shock protein hsp22 precursor
  misc_feature (39)..(238): NCBI GI NO: 7441310 NR Description: heat shock protein MTSHP precursor
  misc_feature (39)..(238): NCBI GI NO: 123564 NR Description: Small heat shock protein, chloroplast precursor
  misc_feature (39)..(238): NCBI GI NO: 1170368 NR Description: Heat shock 22 kDa protein, mitochondrial precursor
  misc_feature (39)..(238): NCBI GI NO: 4138871 NR Description: small heat shock protein Hsp23.6
  misc_feature (37)..(238): NCBI GI NO: 21554988 NR Description: mitochondrial heat shock 22 kd protein-like
  misc_feature (31)..(238): NCBI GI NO: 15234969 NR Description: Arabidopsis mitochondrion-localized small heatshock
  misc_feature (37)..(238): NCBI GI NO: 15242086 NR Description: mitochondrial heat shock 22 kd protein-like
  misc_feature (31)..(238): NCBI GI NO: 2326354 NR Description: LMW heat shock protein [Arabidopsis thaliana]
VLIAVKSRNIRRTQAGREGRAWTMASRVVFSNRIPLARAMENLLAASSGSALRPAAVAGGVRGYNAGAPLRSYDRDEAVERSPRSGARERDVGVPSFFSDVFRDPFSAPQSLGRLLSMLDDVAAASTDGAARAAPLRRGWNAREDADALRLRVDMPGLGKEHVKVWAEQNSLVIKGEGEKESDREGADAPRYSGRLELAGDVYRMDQIKAEMKNGVLRVVVPKVKEEERKDVFEVKVD

SEQ ID NO: 16133 - protein, 215 aa, Triticum aestivum
  peptide (1)..(215): Ceres Seq. ID no. 12626250
  misc_feature (1)..(215): NCBI GI NO: 4138869 NR Description: small heat shock protein Hsp23.5
  misc_feature (1)..(215): NCBI GI NO: 7441311 NR Description: heat shock protein hsp22 precursor
  misc_feature (16)..(215): NCBI GI NO: 7441310 NR Description: heat shock protein MTSHP precursor
  misc_feature (16)..(215): NCBI GI NO: 123564 NR Description: Small heat shock protein, chloroplast precursor
  misc_feature (16)..(215): NCBI GI NO: 1170368 NR Description: Heat shock 22 kDa protein, mitochondrial precursor
  misc_feature (16)..(215): NCBI GI NO: 4138871 NR Description: small heat shock protein Hsp23.6
  misc_feature (14)..(215): NCBI GI NO: 21554988 NR Description: mitochondrial heat shock 22 kd protein-like
  misc_feature (8)..(215): NCBI GI NO: 15234969 NR Description: Arabidopsis mitochondrion-localized small heatshock
  misc_feature (14)..(215): NCBI GI NO: 15242086 NR Description: mitochondrial heat shock 22 kd protein-like
  misc_feature (8)..(215): NCBI GI NO: 2326354 NR Description: LMW heat shock protein [Arabidopsis thaliana]
MASRVVFSNRIPLARAMENLLAASSGSALRPAAVAGGVRGYNAGAPLRSYDRDEAVERSPRSGARERDVGVPSFFSDVFRDPFSAPQSLGRLLSMLDDVAAASTDGAARAAPLRRGWNAREDADALRLRVDMPGLGKEHVKVWAEQNSLVIKGEGEKESDREGADAPRYSGRLELAGDVYRMDQIKAEMKNGVLRVVVPKVKEEERKDVFEVKVD

SEQ ID NO: 16134 - protein, 199 aa, Triticum aestivum
  peptide (1)..(199): Ceres Seq. ID no. 12626251
  misc_feature (1)..(199): NCBI GI NO: 4138869 NR Description: small heat shock protein Hsp23.5
  misc_feature (1)..(199): NCBI GI NO: 7441311 NR Description: heat shock protein hsp22 precursor
  misc_feature (1)..(199): NCBI GI NO: 7441310 NR Description: heat shock protein MTSHP precursor
  misc_feature (1)..(199): NCBI GI NO: 123564 NR Description: Small heat shock protein, chloroplast precursor
  misc_feature (1)..(199): NCBI GI NO: 1170368 NR Description: Heat shock 22 kDa protein, mitochondrial precursor
  misc_feature (1)..(199): NCBI GI NO: 4138871 NR Description: small heat shock protein Hsp23.6
  misc_feature (1)..(199): NCBI GI NO: 21554988 NR Description: mitochondrial heat shock 22 kd protein-like
  misc_feature (1)..(199): NCBI GI NO: 15234969 NR Description: Arabidopsis mitochondrion-localized small heatshock
  misc_feature (1)..(199): NCBI GI NO: 15242086 NR Description: mitochondrial heat shock 22 kd protein-like
  misc_feature (1)..(199): NCBI GI NO: 2326354 NR Description: LMW heat shock protein [Arabidopsis thaliana]
MENLLAASSGSALRPAAVAGGVRGYNAGAPLRSYDRDEAVERSPRSGARERDVGVPSFFSDVFRDPFSAPQSLGRLLSMLDDVAAASTDGAARAAPLRRGWNAREDADALRLRVDMPGLGKEHVKVWAEQNSLVIKGEGEKESDREGADAPRYSGRLELAGDVYRMDQIKAEMKNGVLRVVVPKVKEEERKDVFEVKVD

SEQ ID NO: 16135 - DNA, 1148 bp, Triticum aestivum
  misc_feature (1)..(1148): Ceres Seq. ID no. 15169603
aacaccaagcttacatcatctcctttactcgtgacttatgagcagctcatccaagagagagcaaatggatgatgccgtggggctgtcatgggaggcgcggtgcgcggggctagccttcttcagcctgtccatcttcttggtggccctcaccgcggtgctcctgctcgtccgccggtggcccaacccctggtgcggctgccacgtgtgccgggcttacctcacggggtcctgggccaaggacttcaccaacctcgccgactggtacgcgcacctgctgcgcgagtcgccgacaggcaccgtccacttccacgtcctcggctgcaccgtcaccgccaaccctgccaacgtcgagtacatgctcaagacccgcttcgacaacttccccaagggcaagcgcttcgccgcgctcctcggcgacctccttggcggcggcatcttcaacgtcgacggcgacgcctggcgccaccagcgcaagatggccagcctcgagctcggcagcgtcaccgtgcgctcctacgcctacaagatcgtagcccaggaggtggaggcccgcctcctgccggtcctggccgacgccgccgacaagggcaaggtgatcgacctccaggacgtgttccggcggttcgccttcgacaccgtctgcaagatctccttcgggcttgacccaggctgcctcgacctcgacatgcccatgtccgacctagccaacgcgttcgacaccgcctcgcggctctgcgccatgcggggcgccgcggcctcgccgttggtgtggaagatgaagcggatgctcaacattgggtcagagagggagcttaagaaggccatcaagctcgtcgacgacctcgcgtcggccatgattctgcagcggcggagtctgggttttgacaacagccacgaccttctgtcccgcttcatggcctcggacgtcgccatggacgacaagtatctccgcaacatcgtggtcagcttcctcctcgccgggcgggatacggttgcctcggcgcttacaacgctcttcatcccgaaaatataaaatagcacagctgcaccctggccctctctatctaaccatccattctgcgtatcgcaattcgtgcaaacacatttttcttttttgtttctctcatataaaacatattttgaagttc

SEQ ID NO: 16136 - protein, 331 aa, Triticum aestivum
  peptide (1)..(331): Ceres Seq. ID no. 15169604
  misc_feature (26)..(328): NCBI GI NO: 34908446 NR Description: putative cytochrome P450
  misc_feature (25)..(327): NCBI GI NO: 15226228 NR Description: cytochrome P450, putative [Arabidopsis thaliana]
  misc_feature (64)..(327): NCBI GI NO: 15228396 NR Description: cytochrome P450 family [Arabidopsis thaliana]
  misc_feature (64)..(327): NCBI GI NO: 15242759 NR Description: cytochrome P450, putative [Arabidopsis thaliana]
  misc_feature (64)..(327): NCBI GI NO: 21536522 NR Description: cytochrome P450-like protein
  misc_feature (64)..(327): NCBI GI NO: 26452145 NR Description: putative cytochrome P450 [Arabidopsis thaliana]
  misc_feature (74)..(327): NCBI GI NO: 15228981 NR Description: cytochrome P450, putative [Arabidopsis thaliana]
  misc_feature (74)..(327): NCBI GI NO: 15218671 NR Description: cytochrome P450 family [Arabidopsis thaliana]
  misc_feature (30)..(327): NCBI GI NO: 34902476 NR Description: Putative cytochrome P450
  misc_feature (31)..(327): NCBI GI NO: 18395978 NR Description: cytochrome P450 family [Arabidopsis thaliana]
MSSSSKREQMDDAVGLSWEARCAGLAFFSLSIFLVALTAVLLLVRRWPNPWCGCHVCRAYLTGSWAKDFTNLADWYAHLLRESPTGTVHFHVLGCTVTANPANVEYMLKTRFDNFPKGKRFAALLGDLLGGGIFNVDGDAWRHQRKMASLELGSVTVRSYAYKIVAQEVEARLLPVLADAADKGKVIDLQDVFRRFAFDTVCKISFGLDPGCLDLDMPMSDLANAFDTASRLCAMRGAAASPLVWKMKRMLNIGSERELKKAIKLVDDLASAMILQRRSLGFDNSHDLLSRFMASDVAMDDKYLRNIVVSFLLAGRDTVASALTTLFIPKI

SEQ ID NO: 16137 - protein, 322 aa, Triticum aestivum
  peptide (1)..(322): Ceres Seq. ID no. 15169605
  misc_feature (17)..(319): NCBI GI NO: 34908446 NR Description: putative cytochrome P450
  misc_feature (16)..(318): NCBI GI NO: 15226228 NR Description: cytochrome P450, putative [Arabidopsis thaliana]
  misc_feature (55)..(318): NCBI GI NO: 15228396 NR Description: cytochrome P450 family [Arabidopsis thaliana]
  misc_feature (55)..(318): NCBI GI NO: 15242759 NR Description: cytochrome P450, putative [Arabidopsis thaliana]
  misc_feature (55)..(318): NCBI GI NO: 26452145 NR Description: putative cytochrome P450 [Arabidopsis thaliana]
  misc_feature (55)..(318): NCBI GI NO: 21536522 NR Description: cytochrome P450-like protein
  misc_feature (65)..(318): NCBI GI NO: 15228981 NR Description: cytochrome P450, putative [Arabidopsis thaliana]
  misc_feature (65)..(318): NCBI GI NO: 15218671 NR Description: cytochrome P450 family [Arabidopsis thaliana]
  misc_feature (21)..(318): NCBI GI NO: 34902476 NR Description: Putative cytochrome P450
  misc_feature (22)..(318): NCBI GI NO: 18395978 NR Description: cytochrome P450 family [Arabidopsis thaliana]
MDDAVGLSWEARCAGLAFFSLSIFLVALTAVLLLVRRWPNPWCGCHVCRAYLTGSWAKDFTNLADWYAHLLRESPTGTVHFHVLGCTVTANPANVEYMLKTRFDNFPKGKRFAALLGDLLGGGIFNVDGDAWRHQRKMASLELGSVTVRSYAYKIVAQEVEARLLPVLADAADKGKVIDLQDVFRRFAFDTVCKISFGLDPGCLDLDMPMSDLANAFDTASRLCAMRGAAASPLVWKMKRMLNIGSERELKKAIKLVDDLASAMILQRRSLGFDNSHDLLSRFMASDVAMDDKYLRNIVVSFLLAGRDTVASALTTLFIPKI

SEQ ID NO: 16138 - protein, 225 aa, Triticum aestivum
  peptide (1)..(225): Ceres Seq. ID no. 15169606
  misc_feature (1)..(222): NCBI GI NO: 34908446 NR Description: putative cytochrome P450
  misc_feature (1)..(221): NCBI GI NO: 15226228 NR Description: cytochrome P450, putative [Arabidopsis thaliana]
  misc_feature (1)..(221): NCBI GI NO: 15228396 NR Description: cytochrome P450 family [Arabidopsis thaliana]
  misc_feature (1)..(221): NCBI GI NO: 15242759 NR Description: cytochrome P450, putative [Arabidopsis thaliana]
  misc_feature (1)..(221): NCBI GI NO: 26452145 NR Description: putative cytochrome P450 [Arabidopsis thaliana]
  misc_feature (1)..(221): NCBI GI NO: 21536522 NR Description: cytochrome P450-like protein
  misc_feature (1)..(221): NCBI GI NO: 15228981 NR Description: cytochrome P450, putative [Arabidopsis thaliana]
  misc_feature (1)..(221): NCBI GI NO: 15218671 NR Description: cytochrome P450 family [Arabidopsis thaliana]
  misc_feature (1)..(221): NCBI GI NO: 34902476 NR Description: Putative cytochrome P450
  misc_feature (1)..(221): NCBI GI NO: 18395978 NR Description: cytochrome P450 family [Arabidopsis thaliana]
MLKTRFDNFPKGKRFAALLGDLLGGGIFNVDGDAWRHQRKMASLELGSVTVRSYAYKIVAQEVEARLLPVLADAADKGKVIDLQDVFRRFAFDTVCKISFGLDPGCLDLDMPMSDLANAFDTASRLCAMRGAAASPLVWKMKRMLNIGSERELKKAIKLVDDLASAMILQRRSLGFDNSHDLLSRFMASDVAMDDKYLRNIVVSFLLAGRDTVASALTTLFIPKI

SEQ ID NO: 16139 - DNA, 1599 bp, Triticum aestivum
  misc_feature (1)..(1599): Ceres Seq. ID no. 13656519
acgatcacacgacaccgcttccgtcctcttcgatctccagaagccccgcgagtaaaggattcaatcccctccccaccctccacctcgccgccgccgccgccgccccctccgtctccgctcgagcttgtcagtccgcctcgtcctcctccttcggttctgcccgcccgtcgaccagattgattctctcttcttcttcgtcgtcgtcttcttggtctgccgctgccgcttggaatcccaaggccttggttgatcaatcctgtgaccctggaagaagatcgaagggcgtcgcgtggtgacatggtgatggtgagcgtgcagcagagccccatggtgcggtcggaggaggacctgggcccgccgtggctgcggccgctgctgggcacgagcttcttcgtgccatgcccggcgcacccggacctgagcaagaacgagtgcaacttcttctgcctcggctgcaaccacgccgccggcgcgctctgctcctactgcgtccccgcgcaccgcgaccaccacgtcgtccagatacggcgttcgtcgtaccacaacgtgatccgggtgtcggaggtggggaagctgatcgacatcgcgcacgtgcagacgtacgtgatcaacagcgccaagatcgtgttcctcaacggccggccgcaggccaggcccggcaagggcgtcaccaacacctgtgagatttgctgccgcagcctcccggactcgttccgcttctgctccctcggatgcaagctcggggggatgcagtgggacccgaccctgacatttgccatccggcccaagcgtagccaggactccggcggagaagggtacggctccgaggacgactcgttcagcccgaggaagcagctccggagggccgggttcgagctgggacggttcgaccggagcgtccggtggtctgacgacgagggcagcaagtccaacacccggccgatgacaccaaccacgccgccgatcagccggtgccggccgtccaggaggaagggcatcccccaccgtgccccgttctacggttagactaccggtggaaaccactctcaaaagtgacaatgctactactagtattgcaatgcaatgtgtgtcggttgggacttgggcctgagtagtgaagtgatccagttagtagatcactagctaggtattagctatagcatgcatggtatatatacttgtatatatatacatatacatacacacaataatgtaggtggagtgtgtgtaaatatgatatgttggcaaaggttgccaattcgcataagggcatgcatgggggcatggcgcggtgccctagtatttcatgcagaaaataaggtgaagaacgacgaagaaaggggtggtaagaaacacagctaatagaaacatagctagggtttttagcttgggtagggtcgagattgatatgtgaaaagtgataaatcatcatgtatatgtctcggtttgtagtggttaatttggctgtctaccccacccaatgtgtttattagcgttgcggtgtgtagttaattcaaggttcggcaacttacaggaacataataatttgtatatacagttatattggtattggcagaagaaagataaggactttgcctc

SEQ ID NO: 16140 - protein, 242 aa, Triticum aestivum
  peptide (1)..(242): Ceres Seq. ID no. 15220588
  misc_feature (20)..(234): Pfam Name: Pfam Description:  Protein of unknown function, DUF597
  misc_feature (10)..(240): NCBI GI NO: 18394936 NR Description: expressed protein [Arabidopsis thaliana]
  misc_feature (10)..(240): NCBI GI NO: 21537073 NR Description: unknown [Arabidopsis thaliana]
  misc_feature (11)..(240): NCBI GI NO: 25337907 NR Description: hypothetical protein F9H16
  misc_feature (11)..(240): NCBI GI NO: 21536890 NR Description: unknown [Arabidopsis thaliana]
  misc_feature (11)..(240): NCBI GI NO: 18411153 NR Description: expressed protein [Arabidopsis thaliana]
  misc_feature (11)..(240): NCBI GI NO: 25337904 NR Description: unknown protein F14G6.19
  misc_feature (20)..(151): NCBI GI NO: 6714272 NR Description: F6N18.8 [Arabidopsis thaliana]
  misc_feature (20)..(151): NCBI GI NO: 18398555 NR Description: expressed protein [Arabidopsis thaliana]
  misc_feature (217)..(242): NCBI GI NO: 6714272 NR Description: F6N18.8 [Arabidopsis thaliana]
  misc_feature (217)..(242): NCBI GI NO: 18398555 NR Description: expressed protein [Arabidopsis thaliana]
MVMVSVQQSPMVRSEEDLGPPWLRPLLGTSFFVPCPAHPDLSKNECNFFCLGCNHAAGALCSYCVPAHRDHHVVQIRRSSYHNVIRVSEVGKLIDIAHVQTYVINSAKIVFLNGRPQARPGKGVTNTCEICCRSLPDSFRFCSLGCKLGGMQWDPTLTFAIRPKRSQDSGGEGYGSEDDSFSPRKQLRRAGFELGRFDRSVRWSDDEGSKSNTRPMTPTTPPISRCRPSRRKGIPHRAPFYG

SEQ ID NO: 16141 - protein, 240 aa, Triticum aestivum
  peptide (1)..(240): Ceres Seq. ID no. 15220589
  misc_feature (18)..(232): Pfam Name: Pfam Description:  Protein of unknown function, DUF597
  misc_feature (8)..(238): NCBI GI NO: 18394936 NR Description: expressed protein [Arabidopsis thaliana]
  misc_feature (8)..(238): NCBI GI NO: 21537073 NR Description: unknown [Arabidopsis thaliana]
  misc_feature (9)..(238): NCBI GI NO: 25337907 NR Description: hypothetical protein F9H16
  misc_feature (9)..(238): NCBI GI NO: 21536890 NR Description: unknown [Arabidopsis thaliana]
  misc_feature (9)..(238): NCBI GI NO: 18411153 NR Description: expressed protein [Arabidopsis thaliana]
  misc_feature (9)..(238): NCBI GI NO: 25337904 NR Description: unknown protein F14G6.19
  misc_feature (18)..(149): NCBI GI NO: 6714272 NR Description: F6N18.8 [Arabidopsis thaliana]
  misc_feature (18)..(149): NCBI GI NO: 18398555 NR Description: expressed protein [Arabidopsis thaliana]
  misc_feature (215)..(240): NCBI GI NO: 6714272 NR Description: F6N18.8 [Arabidopsis thaliana]
  misc_feature (215)..(240): NCBI GI NO: 18398555 NR Description: expressed protein [Arabidopsis thaliana]
MVSVQQSPMVRSEEDLGPPWLRPLLGTSFFVPCPAHPDLSKNECNFFCLGCNHAAGALCSYCVPAHRDHHVVQIRRSSYHNVIRVSEVGKLIDIAHVQTYVINSAKIVFLNGRPQARPGKGVTNTCEICCRSLPDSFRFCSLGCKLGGMQWDPTLTFAIRPKRSQDSGGEGYGSEDDSFSPRKQLRRAGFELGRFDRSVRWSDDEGSKSNTRPMTPTTPPISRCRPSRRKGIPHRAPFYG

SEQ ID NO: 16142 - protein, 232 aa, Triticum aestivum
  peptide (1)..(232): Ceres Seq. ID no. 15220590
  misc_feature (10)..(224): Pfam Name: Pfam Description:  Protein of unknown function, DUF597
  misc_feature (1)..(230): NCBI GI NO: 18394936 NR Description: expressed protein [Arabidopsis thaliana]
  misc_feature (1)..(230): NCBI GI NO: 21537073 NR Description: unknown [Arabidopsis thaliana]
  misc_feature (1)..(230): NCBI GI NO: 25337907 NR Description: hypothetical protein F9H16
  misc_feature (1)..(230): NCBI GI NO: 21536890 NR Description: unknown [Arabidopsis thaliana]
  misc_feature (1)..(230): NCBI GI NO: 18411153 NR Description: expressed protein [Arabidopsis thaliana]
  misc_feature (1)..(230): NCBI GI NO: 25337904 NR Description: unknown protein F14G6.19
  misc_feature (10)..(141): NCBI GI NO: 6714272 NR Description: F6N18.8 [Arabidopsis thaliana]
  misc_feature (10)..(141): NCBI GI NO: 18398555 NR Description: expressed protein [Arabidopsis thaliana]
  misc_feature (207)..(232): NCBI GI NO: 6714272 NR Description: F6N18.8 [Arabidopsis thaliana]
  misc_feature (207)..(232): NCBI GI NO: 18398555 NR Description: expressed protein [Arabidopsis thaliana]
MVRSEEDLGPPWLRPLLGTSFFVPCPAHPDLSKNECNFFCLGCNHAAGALCSYCVPAHRDHHVVQIRRSSYHNVIRVSEVGKLIDIAHVQTYVINSAKIVFLNGRPQARPGKGVTNTCEICCRSLPDSFRFCSLGCKLGGMQWDPTLTFAIRPKRSQDSGGEGYGSEDDSFSPRKQLRRAGFELGRFDRSVRWSDDEGSKSNTRPMTPTTPPISRCRPSRRKGIPHRAPFYG

SEQ ID NO: 16143 - DNA, 362 bp, Triticum aestivum
  misc_feature (1)..(362): Ceres Seq. ID no. 12619355
atcagcctaaacccgcaccaaagccccgagcgccgtcggatcagatcccactccaccaccaccaccaccacgctcctgccggccaccgctccttrtattccgaggccggccggagaccccctgctcattttccgtctccccccctctgcccgccctcstcctcctcgagctgagctcaaggggaaagaaccatggagccggcgacgatggcgtggacggcggggctggtgggcgccggcytggtgtactggttcgtgtgggtgatgggcgcggcggaggtgaaggggaagcggrcggtggatctcaagatgggatccatcacgcgggacaaggtgcaggacawgtacacgcagtactggtcc

SEQ ID NO: 16144 - protein, 87 aa, Triticum aestivum
  peptide (1)..(87): Ceres Seq. ID no. 13656860
  misc_feature (32)..(32): Xaa is any aa, unknown or other
  misc_feature (53)..(53): Xaa is any aa, unknown or other
  misc_feature (80)..(80): Xaa is any aa, unknown or other
ISLNPHQSPERRRIRSHSTTTTTTLLPATAPXIPRPAGDPLLIFRLPPSARPXPPRAELKGKEPWSRRRWRGRRGWWAPXWCTGSCG

SEQ ID NO: 16145 - protein, 57 aa, Triticum aestivum
  peptide (1)..(57): Ceres Seq. ID no. 13656861
  misc_feature (1)..(56): NCBI GI NO: 3560533 NR Description: 24-methylene lophenol C24(1)methyltransferase
  misc_feature (1)..(56): NCBI GI NO: 7443718 NR Description: probable sterol 24-C-methyltransferase (EC2
  misc_feature (1)..(56): NCBI GI NO: 1061040 NR Description: sterol-C-methyltransferase [Arabidopsis thaliana]
  misc_feature (1)..(56): NCBI GI NO: 15217917 NR Description: sterol-C-methyltransferase; protein id:At1g20330
  misc_feature (1)..(56): NCBI GI NO: 21555010 NR Description: sterol-C-methyltransferase [Arabidopsis thaliana]
  misc_feature (1)..(56): NCBI GI NO: 23397216 NR Description: putative sterol-C-methyltransferase
  misc_feature (1)..(56): NCBI GI NO: 22136020 NR Description: 24-sterol C-methyltransferase
  misc_feature (1)..(56): NCBI GI NO: 2246456 NR Description: S-adenosyl-methionine-sterol-C-methyltransferase
  misc_feature (1)..(56): NCBI GI NO: 15222955 NR Description: S-adenosyl-methionine-sterol-C-methyltransferase
  misc_feature (9)..(56): NCBI GI NO: 7443717 NR Description: probable sterol 24-C-methyltransferase (EC2
  misc_feature (17)..(17): Xaa is any aa, unknown or other
  misc_feature (35)..(35): Xaa is any aa, unknown or other
  misc_feature (51)..(51): Xaa is any aa, unknown or other
MEPATMAWTAGLVGAGXVYWFVWVMGAAEVKGKRXVDLKMGSITRDKVQDXYTQYWS

SEQ ID NO: 16146 - protein, 56 aa, Triticum aestivum
  peptide (1)..(56): Ceres Seq. ID no. 13656862
  misc_feature (31)..(31): Xaa is any aa, unknown or other
  misc_feature (52)..(52): Xaa is any aa, unknown or other
QPKPAPKPRAPSDQIPLHHHHHHAPAGHRSXYSEAGRRPPAHFPSPPLCPPXSSSS

SEQ ID NO: 16147 - DNA, 797 bp, Triticum aestivum
  misc_feature (1)..(797): Ceres Seq. ID no. 14301890
actcacacacacacaaccagtaccagatccacaagccagcagaaaggaagaagatgatgagcaccaaggccctcaccctcggcgcggtcgtcgtcctcgccatcgccatggcgggcgcgcacgccgagcagtgcggccacgcggccgacggcatggagtgcccaaacaacctctgctgcagcgcgtgggggtactgcggcatggacgccaactactgcggcgacggctgccagagcggcgcctgctacgagcccaaacgctgcggcgcccaggccgaggggaacgcggtgacgtgccccaacaaccactgctgcagcggcaacgggtactgcggctacggccaggagtactgcggcgacggctgccagaacgggccatgccgcgccaacatcaagtgcagcgccgacaagccgtgcctgagcaacttctgctgcagcaagtacggatactgcgggctcggcgtcgagttctgcggccagggctgccagagcggcgcctgccatgacgccgttggcgccgccgccctgccgctcagctccatagtgcaggggtgatcttgaactgcgcatggctacaagtattgcgacgggatcaggtgaggagatgagttgtggcaatgtcgatcgttgccacgtcttcttcaccggctagtttgcgttttcctcgtctttacaatcgttcccatcatgcatgcacgcatgcatgattagcgttcgggaaccacaaataatgcgtgtggcgccatgcgccgtctttgtaacctttgtaatccaataaatctgaatctcgttgcaatc

SEQ ID NO: 16148 - protein, 183 aa, Triticum aestivum
  peptide (1)..(183): Ceres Seq. ID no. 14301891
  misc_feature (85)..(126): Pfam Name: Pfam Description:  Chitin recognition protein
  misc_feature (17)..(166): NCBI GI NO: 113508 NR Description: Root-specific lectin precursor
  misc_feature (16)..(166): NCBI GI NO: 113506 NR Description: Agglutinin isolectin 2 precursor
  misc_feature (17)..(166): NCBI GI NO: 113505 NR Description: Agglutinin isolectin 1 precursor
  misc_feature (20)..(166): NCBI GI NO: 113509 NR Description: Lectin precursor (Agglutinin)
  misc_feature (24)..(166): NCBI GI NO: 38346860 NR Description: OSJNBb0015C06.8
  misc_feature (42)..(166): NCBI GI NO: 113507 NR Description: Agglutinin isolectin 3 precursor (WGA3)
  misc_feature (43)..(166): NCBI GI NO: 1065091 NR Description: Chain A, Wheat Germ Agglutinin (Isolectin 3)
  misc_feature (29)..(166): NCBI GI NO: 220977 NR Description: agglutinin isolectin 2 precursor
  misc_feature (43)..(166): NCBI GI NO: 230784 NR Description: Chain A, Wheat Germ Agglutinin
  misc_feature (41)..(166): NCBI GI NO: 4689400 NR Description: lectin [Oryza sativa subsp. japonica]
SHTHNQYQIHKPAERKKMMSTKALTLGAVVVLAIAMAGAHAEQCGHAADGMECPNNLCCSAWGYCGMDANYCGDGCQSGACYEPKRCGAQAEGNAVTCPNNHCCSGNGYCGYGQEYCGDGCQNGPCRANIKCSADKPCLSNFCCSKYGYCGLGVEFCGQGCQSGACHDAVGAAALPLSSIVQG

SEQ ID NO: 16149 - protein, 167 aa, Triticum aestivum
  peptide (1)..(167): Ceres Seq. ID no. 14301892
LTHTQPVPDPQASRKEEDDEHQGPHPRRGRRPRHRHGGRARRAVRPRGRRHGVPKQPLLQRVGVLRHGRQLLRRRLPERRLLRAQTLRRPGRGERGDVPQQPLLQRQRVLRLRPGVLRRRLPERAMPRQHQVQRRQAVPEQLLLQQVRILRARRRVLRPGLPERRLP

SEQ ID NO: 16150 - protein, 166 aa, Triticum aestivum
  peptide (1)..(166): Ceres Seq. ID no. 14301893
  misc_feature (68)..(109): Pfam Name: Pfam Description:  Chitin recognition protein
  misc_feature (1)..(149): NCBI GI NO: 113508 NR Description: Root-specific lectin precursor
  misc_feature (1)..(149): NCBI GI NO: 113506 NR Description: Agglutinin isolectin 2 precursor
  misc_feature (1)..(149): NCBI GI NO: 113505 NR Description: Agglutinin isolectin 1 precursor
  misc_feature (3)..(149): NCBI GI NO: 113509 NR Description: Lectin precursor (Agglutinin)
  misc_feature (7)..(149): NCBI GI NO: 38346860 NR Description: OSJNBb0015C06.8
  misc_feature (25)..(149): NCBI GI NO: 113507 NR Description: Agglutinin isolectin 3 precursor (WGA3)
  misc_feature (26)..(149): NCBI GI NO: 1065091 NR Description: Chain A, Wheat Germ Agglutinin (Isolectin 3)
  misc_feature (12)..(149): NCBI GI NO: 220977 NR Description: agglutinin isolectin 2 precursor
  misc_feature (26)..(149): NCBI GI NO: 230784 NR Description: Chain A, Wheat Germ Agglutinin
  misc_feature (24)..(149): NCBI GI NO: 4689400 NR Description: lectin [Oryza sativa subsp. japonica]
MMSTKALTLGAVVVLAIAMAGAHAEQCGHAADGMECPNNLCCSAWGYCGMDANYCGDGCQSGACYEPKRCGAQAEGNAVTCPNNHCCSGNGYCGYGQEYCGDGCQNGPCRANIKCSADKPCLSNFCCSKYGYCGLGVEFCGQGCQSGACHDAVGAAALPLSSIVQG

SEQ ID NO: 16151 - DNA, 963 bp, Triticum aestivum
  misc_feature (1)..(963): Ceres Seq. ID no. 14303660
accaaatatctctctgattgcattgcctccctgcctggctacatttgacttgcttccatccattcgatccactcaactcaaggaagatctactgcactcccgcccatactagccgaggttcgttgggtaggataagatcatcgatggaggatgtgtggaaggacatgtcgctgtgctccaccccgctcgcgctacagtcctaccacctccactccccggccgccgctccctaccgcggcgccgctgtctacccccaggactacctggccggcgcggttccgcaaccgccccgcacgccgccgccggctcacacggcgctcaccctggagttcacctgccccggggggaccagcgctgccaacacggccaccagctccggcgacgacccagccggctgccactttggcttctccgcgtccggaggcggcagcaggagggccgtggtccagccggcggtgggcggcgaccggcggcagcgccggatggtcaagaaccgggagtcggcggcgcggtcgcgggcgcggaagcaggcccacaccaacgagatggagctggagctggagcagctgcgccgggagaacaggatgcttatccagcgcgagcaggacttcatcaacgatcgcttggcgaaggcggcgcaggtagccgtcccggactgcagcagcagcagcagcagctggaggaggaacactagtagcagtaccctccagcagccgcagaggtgccgctccgcccctgcaccatgatcgtcgcggcggccatcgactctagcagcggcagcttcattccacttactagtacaacggattgattgtccaagctagctagatgacttgattagcattgtactacgcgttaaccaagtactatgtatgtaatctagcagtagcctacttccttgcaaaattaagcaagcatgtagctcgacgatggatggaagttaagctaagctagtactcaacc

SEQ ID NO: 16152 - protein, 200 aa, Triticum aestivum
  peptide (1)..(200): Ceres Seq. ID no. 14303661
  misc_feature (108)..(157): Pfam Name: Pfam Description:  bZIP transcription factor
  misc_feature (1)..(159): NCBI GI NO: 33146493 NR Description: putative bZIP protein DPBF3
  misc_feature (41)..(178): NCBI GI NO: 28317383 NR Description: TPA: putative basic leucine zipper transcriptionfactor
  misc_feature (87)..(163): NCBI GI NO: 32526659 NR Description: hypothetical protein
  misc_feature (1)..(185): NCBI GI NO: 29367541 NR Description: OSE2-like protein
  misc_feature (26)..(194): NCBI GI NO: 34908468 NR Description: putative abscisic acid insensitive 5
  misc_feature (32)..(157): NCBI GI NO: 21693585 NR Description: ABA response element binding factor
  misc_feature (108)..(157): NCBI GI NO: 19347609 NR Description: Raba1 [Oryza sativa]
  misc_feature (91)..(166): NCBI GI NO: 28317381 NR Description: TPA: putative basic leucine zipper transcriptionfactor
  misc_feature (91)..(166): NCBI GI NO: 29027737 NR Description: bZIP transcription factor [Arabidopsis thaliana]
  misc_feature (91)..(166): NCBI GI NO: 29027735 NR Description: bZIP transcription factor [Arabidopsis thaliana]
MEDVWKDMSLCSTPLALQSYHLHSPAAAPYRGAAVYPQDYLAGAVPQPPRTPPPAHTALTLEFTCPGGTSAANTATSSGDDPAGCHFGFSASGGGSRRAVVQPAVGGDRRQRRMVKNRESAARSRARKQAHTNEMELELEQLRRENRMLIQREQDFINDRLAKAAQVAVPDCSSSSSSWRRNTSSSTLQQPQRCRSAPAP

SEQ ID NO: 16153 - protein, 193 aa, Triticum aestivum
  peptide (1)..(193): Ceres Seq. ID no. 14303662
  misc_feature (101)..(150): Pfam Name: Pfam Description:  bZIP transcription factor
  misc_feature (1)..(152): NCBI GI NO: 33146493 NR Description: putative bZIP protein DPBF3
  misc_feature (34)..(171): NCBI GI NO: 28317383 NR Description: TPA: putative basic leucine zipper transcriptionfactor
  misc_feature (80)..(156): NCBI GI NO: 32526659 NR Description: hypothetical protein
  misc_feature (1)..(178): NCBI GI NO: 29367541 NR Description: OSE2-like protein
  misc_feature (19)..(187): NCBI GI NO: 34908468 NR Description: putative abscisic acid insensitive 5
  misc_feature (25)..(150): NCBI GI NO: 21693585 NR Description: ABA response element binding factor
  misc_feature (101)..(150): NCBI GI NO: 19347609 NR Description: Raba1 [Oryza sativa]
  misc_feature (84)..(159): NCBI GI NO: 28317381 NR Description: TPA: putative basic leucine zipper transcriptionfactor
  misc_feature (84)..(159): NCBI GI NO: 29027735 NR Description: bZIP transcription factor [Arabidopsis thaliana]
  misc_feature (84)..(159): NCBI GI NO: 29027737 NR Description: bZIP transcription factor [Arabidopsis thaliana]
MSLCSTPLALQSYHLHSPAAAPYRGAAVYPQDYLAGAVPQPPRTPPPAHTALTLEFTCPGGTSAANTATSSGDDPAGCHFGFSASGGGSRRAVVQPAVGGDRRQRRMVKNRESAARSRARKQAHTNEMELELEQLRRENRMLIQREQDFINDRLAKAAQVAVPDCSSSSSSWRRNTSSSTLQQPQRCRSAPAP

SEQ ID NO: 16154 - protein, 164 aa, Triticum aestivum
  peptide (1)..(164): Ceres Seq. ID no. 14303663
MCGRTCRCAPPRSRYSPTTSTPRPPLPTAAPLSTPRTTWPARFRNRPARRRRLTRRSPWSSPAPGGPALPTRPPAPATTQPAATLASPRPEAAAGGPWSSRRWAATGGSAGWSRTGSRRRGRGRGSRPTPTRWSWSWSSCAGRTGCLSSASRTSSTIAWRRRRR

SEQ ID NO: 16155 - DNA, 1168 bp, Triticum aestivum
  misc_feature (1)..(1168): Ceres Seq. ID no. 12620027
aaagaagtacagcatcagaagaggagaggagagcagaggcggagagtgaggagagagaggtgtagcggaggagccgtaggtaggtagagagagatggaggtggcggtgcctgtcatggcgccgagcgcgccgtgcagcccaagaaccgcggccgccatgggcggcggcggcagccacctgcccagctactgctacttcttctccagcgcccccacgagcccgtccagggccagcagctacgccgcggacgagcagggcgacgccgccacgttcgacttcgccttcggcttcagcgggcagctccgggagtccacgcccatcctcgccgccgccgacgagctgttcgagggcggcaggatccggccgctcaacggcccgcgctcaagcggcagcggcctgctcgccgacgaggactacgcctccctctccgtctccccccggtcgccgagaagagcgaggacgatgtccgcggtgcgcggcggtgcaggggatcgggcggaggcgccggccgatcagggtcagacgaggggcaggtccggccggccggcccctgcgtcgtcctcgtcgtcgggcgtgtcgtctcgcagcaggagggccacgcggtctctgtccccgtacaggggcgaccccatcgacgacgagttctgctcctccccaccctcccctcgcggcgccgcctccctgatgcgcggctgcgggagcggcagccgcaagtggcggctcaaggacctgttcctgttccgcagcgcgtcggagggccgcgccaccgccggcaaggacccgctgctcaagtacagcatgctcaagagcggcggcgacgcgtcgatgcggaaggggaggggctcggcggcgtcggcgagcgacatggcgccgtacacggtgagccgggcggcggccgaggagatgcggcggaggacgacgacgccgctgccgttccaccggaacagcctcttcggctacttccggtccaacccggccatccactccatcagccgcaagcttagcagctactcctcgtcgaactccaaccgcggccggaacgccgccgccgccgccaactgacagccgacgacgcagctcgctcgctcgctcgcgcgcacatgcatggcatgctggctactttggcagtagaaaaaaagggaaggaaagagaacagttttattcgttc

SEQ ID NO: 16156 - protein, 322 aa, Triticum aestivum
  peptide (1)..(322): Ceres Seq. ID no. 12620028
  misc_feature (1)..(318): NCBI GI NO: 34906768 NR Description: contains EST AU082121
  misc_feature (142)..(309): NCBI GI NO: 33111961 NR Description: pheromone receptor-like protein [Quercus robur]
  misc_feature (95)..(278): NCBI GI NO: 1669593 NR Description: AR781 [Arabidopsis thaliana]
  misc_feature (95)..(278): NCBI GI NO: 15225326 NR Description: AR781, similar to yeast pheromone receptor
  misc_feature (95)..(278): NCBI GI NO: 15293109 NR Description: putative yeast pheromone receptor protein AR781
MEVAVPVMAPSAPCSPRTAAAMGGGGSHLPSYCYFFSSAPTSPSRASSYAADEQGDAATFDFAFGFSGQLRESTPILAAADELFEGGRIRPLNGPRSSGSGLLADEDYASLSVSPRSPRRARTMSAVRGGAGDRAEAPADQGQTRGRSGRPAPASSSSSGVSSRSRRATRSLSPYRGDPIDDEFCSSPPSPRGAASLMRGCGSGSRKWRLKDLFLFRSASEGRATAGKDPLLKYSMLKSGGDASMRKGRGSAASASDMAPYTVSRAAAEEMRRRTTTPLPFHRNSLFGYFRSNPAIHSISRKLSSYSSSNSNRGRNAAAAAN

SEQ ID NO: 16157 - protein, 315 aa, Triticum aestivum
  peptide (1)..(315): Ceres Seq. ID no. 12620029
  misc_feature (1)..(311): NCBI GI NO: 34906768 NR Description: contains EST AU082121
  misc_feature (135)..(302): NCBI GI NO: 33111961 NR Description: pheromone receptor-like protein [Quercus robur]
  misc_feature (88)..(271): NCBI GI NO: 1669593 NR Description: AR781 [Arabidopsis thaliana]
  misc_feature (88)..(271): NCBI GI NO: 15225326 NR Description: AR781, similar to yeast pheromone receptor
  misc_feature (88)..(271): NCBI GI NO: 15293109 NR Description: putative yeast pheromone receptor protein AR781
MAPSAPCSPRTAAAMGGGGSHLPSYCYFFSSAPTSPSRASSYAADEQGDAATFDFAFGFSGQLRESTPILAAADELFEGGRIRPLNGPRSSGSGLLADEDYASLSVSPRSPRRARTMSAVRGGAGDRAEAPADQGQTRGRSGRPAPASSSSSGVSSRSRRATRSLSPYRGDPIDDEFCSSPPSPRGAASLMRGCGSGSRKWRLKDLFLFRSASEGRATAGKDPLLKYSMLKSGGDASMRKGRGSAASASDMAPYTVSRAAAEEMRRRTTTPLPFHRNSLFGYFRSNPAIHSISRKLSSYSSSNSNRGRNAAAAAN

SEQ ID NO: 16158 - protein, 301 aa, Triticum aestivum
  peptide (1)..(301): Ceres Seq. ID no. 12620030
  misc_feature (1)..(297): NCBI GI NO: 34906768 NR Description: contains EST AU082121
  misc_feature (121)..(288): NCBI GI NO: 33111961 NR Description: pheromone receptor-like protein [Quercus robur]
  misc_feature (74)..(257): NCBI GI NO: 1669593 NR Description: AR781 [Arabidopsis thaliana]
  misc_feature (74)..(257): NCBI GI NO: 15225326 NR Description: AR781, similar to yeast pheromone receptor
  misc_feature (74)..(257): NCBI GI NO: 15293109 NR Description: putative yeast pheromone receptor protein AR781
MGGGGSHLPSYCYFFSSAPTSPSRASSYAADEQGDAATFDFAFGFSGQLRESTPILAAADELFEGGRIRPLNGPRSSGSGLLADEDYASLSVSPRSPRRARTMSAVRGGAGDRAEAPADQGQTRGRSGRPAPASSSSSGVSSRSRRATRSLSPYRGDPIDDEFCSSPPSPRGAASLMRGCGSGSRKWRLKDLFLFRSASEGRATAGKDPLLKYSMLKSGGDASMRKGRGSAASASDMAPYTVSRAAAEEMRRRTTTPLPFHRNSLFGYFRSNPAIHSISRKLSSYSSSNSNRGRNAAAAAN

SEQ ID NO: 16159 - DNA, 1319 bp, Triticum aestivum
  misc_feature (1)..(1319): Ceres Seq. ID no. 13656856
agaacatcctaattgaaaagagttctgattagtggctttgtgatgcaatcccagttgaagtgcagaacctttccggagtttggactttgggaacttcgaatcatcatcagccgagaaagagaaaagttgcccacgaacacacgaaaaagagccccatcatgactaggctcgctcctcctgttgctttccggccctgtctctctgtattgcacgaacttttagcgcgtaacatttactctcttatattatctgcgatctgaatcttgctgctgatttgctgagactttctgtttgtgcttcatgcagagcgggagatcggcgccgcgcctgagcccgtcgtgtacacgccgccggcgccgctgatgccgtccccgccctcggtcaacggcgccaatgtcagtgccagcaccagcagcgtcgcggccacgtcgcagagcctcctcggcagcatgttcgcgccgtcttccgtggcccagacggcgcagtatccggagcgcgcgctggcagccaagcccccgtcgctgtgcctcgcgaccgacgccgcgtccgcccagttctcggcccctacggctgaccggcagcagcagctcgtgcagccgccgccgtcgccgtccccatcggcgcacatgtccgccacggcgctgcttcagaaggcggcgcagatgggcgccacctcgtcgagctcctcgttcctgcgtgggctgggcctcgacatctcgtcgtcgccgccgggcgtcgacgtcgtcaggtcagcatcaacagcagcaccaccaccaccagcaacaccaccaggagcccatgcagatgcagttcccggagggttcgctgcagcaatggccgccgcggttggagcccgagccggccccgatgatgtcggccgggctgggcctcgggctgccatacgactcgaccggcggtccgatggggttgccggagctcatgatgggccagtcatcactgttcagcgccaagccggccacgctggacttcctggggctggggatgagccccacgggggcgaccacgagcaggggcctccccgtgttcatgcagcccatgggcggcgcggtcggcatggcccggaccggctccggccctccagacacgttcggctccggccggggcgctcaggccaagccgtgggagaggaacccgagcagctcgccgatcctgtaaaaggactgctgggaaagtagtaacacgtagcacagcagctgtaaaatgctgcttgtgtctaattagcagcagctagtcgtcagtccttggccgttcttttgttttcttaggtcacaatcaagaaagtaagttacttttgttcc

SEQ ID NO: 16160 - protein, 277 aa, Triticum aestivum
  peptide (1)..(277): Ceres Seq. ID no. 15220591
  misc_feature (1)..(151): NCBI GI NO: 33146841 NR Description: zinc finger protein-like protein
  misc_feature (29)..(136): NCBI GI NO: 15240072 NR Description: zinc finger protein [Arabidopsis thaliana]
  misc_feature (6)..(121): NCBI GI NO: 9858780 NR Description: BAC19.12 [Lycopersicon esculentum]
  misc_feature (1)..(128): NCBI GI NO: 15229832 NR Description: zinc finger protein [Arabidopsis thaliana]
MPSPPSVNGANVSASTSSVAATSQSLLGSMFAPSSVAQTAQYPERALAAKPPSLCLATDAASAQFSAPTADRQQQLVQPPPSPSPSAHMSATALLQKAAQMGATSSSSSFLRGLGLDISSSPPGVDVVRSASTAAPPPPATPPGAHADAVPGGFAAAMAAAVGARAGPDDVGRAGPRAAIRLDRRSDGVAGAHDGPVITVQRQAGHAGLPGAGDEPHGGDHEQGPPRVHAAHGRRGRHGPDRLRPSRHVRLRPGRSGQAVGEEPEQLADPVKGLLGK

SEQ ID NO: 16161 - protein, 260 aa, Triticum aestivum
  peptide (1)..(260): Ceres Seq. ID no. 15220592
  misc_feature (1)..(90): Pfam Name: Pfam Description:  Cupin
  misc_feature (135)..(228): NCBI GI NO: 33146841 NR Description: zinc finger protein-like protein
  misc_feature (152)..(234): NCBI GI NO: 15240072 NR Description: zinc finger protein [Arabidopsis thaliana]
  misc_feature (146)..(241): NCBI GI NO: 9858780 NR Description: BAC19.12 [Lycopersicon esculentum]
  misc_feature (163)..(234): NCBI GI NO: 15229832 NR Description: zinc finger protein [Arabidopsis thaliana]
  misc_feature (1)..(154): NCBI GI NO: 25143299 NR Description: pre-mRNA splicing SR protein related RSR-1 (68
MSVPAPAASRPRRRASSAACSRRLPWPRRRSIRSARWQPSPRRCASRPTPRPPSSRPLRLTGSSSSCSRRRRRPHRRTCPPRRCFRRRRRWAPPRRAPRSCVGWASTSRRRRRASTSSGQHQQQHHHHQQHHQEPMQMQFPEGSLQQWPPRLEPEPAPMMSAGLGLGLPYDSTGGPMGLPELMMGQSSLFSAKPATLDFLGLGMSPTGATTSRGLPVFMQPMGGAVGMARTGSGPPDTFGSGRGAQAKPWERNPSSSPIL

SEQ ID NO: 16162 - protein, 248 aa, Triticum aestivum
  peptide (1)..(248): Ceres Seq. ID no. 15220593
  misc_feature (1)..(122): NCBI GI NO: 33146841 NR Description: zinc finger protein-like protein
  misc_feature (1)..(107): NCBI GI NO: 15240072 NR Description: zinc finger protein [Arabidopsis thaliana]
  misc_feature (1)..(92): NCBI GI NO: 9858780 NR Description: BAC19.12 [Lycopersicon esculentum]
  misc_feature (1)..(99): NCBI GI NO: 15229832 NR Description: zinc finger protein [Arabidopsis thaliana]
MFAPSSVAQTAQYPERALAAKPPSLCLATDAASAQFSAPTADRQQQLVQPPPSPSPSAHMSATALLQKAAQMGATSSSSSFLRGLGLDISSSPPGVDVVRSASTAAPPPPATPPGAHADAVPGGFAAAMAAAVGARAGPDDVGRAGPRAAIRLDRRSDGVAGAHDGPVITVQRQAGHAGLPGAGDEPHGGDHEQGPPRVHAAHGRRGRHGPDRLRPSRHVRLRPGRSGQAVGEEPEQLADPVKGLLGK

SEQ ID NO: 16163 - DNA, 1885 bp, Triticum aestivum
  misc_feature (1)..(1885): Ceres Seq. ID no. 14308011
agggacagaccagaacaacccaaccgcacccgttccagagcgcgatcacacaacagagcggtaacagtttcccgggcagttcccgccccggccggcgccatggacttcgtcttcgtggagaagctcctcgcgggcctcctcgcggccgtggtgggcgccatcgtggtgtccaagatccggggccgcaagctgaggctgccgccgggccccttcccggtccccatcttcggcaactggctgcaggtcggcgacgacctgaaccaccgcaacctggcggcgatggcccgcaagttcggcgaggtcttcctcctccgcatgggccagcgcaacctggtggtggtctcctctccgccgctcgcccgcgaggtgctccacacgcagggcgtggagttcgggtcccgcacccgcaacgtggtgttcgacatcttcacgggcgagggccaagacatggtgttcaccgtgtacggtgaccactggcgcaagatgcggcgcatcatgacggtgcccttcttcaccaacaaggtggtgcagcagtaccggcccgggtgggaggccgaggcggccttcgtcatcgacaacgtccgcgccgaccccagggccgccacagagggcgtcgtgctccgccgccacctgcagctcatgatgtacaacaacatgtaccgcatcatgttcgaccggcggttcgagagcatggacgacccgctgttcctccggctccgggcgctcaacggcgagcgcagccgcctcgcgcaaagcttcgagtacaactacggcgacttcatccccatcctccgccccttcctccgcggctacctcaggctctgcaaggaggtcaaggagacccgcctcaagctcttcaaggattacttcctggacgagaggaagaagctggtgagcaccaaggccatggacaacaacggtgggctcaagtgcgccattgatcacatcctggaggctgagcagaagggggagatcaacgaggacaacgtcctctacatcatcgagaacatcaacgtcgcagcgatcgagacgacgctgtggtcgatcgagtgggggctggcagagctggtgaaccacccggagatccagcagaagcttcgcgacgaaatggacgcggtgctgggcgcggggcaccagatcacggagccggagacgcacaagctcccctacctgcaggcggtgatcaaggagacgctccggctgcgcatggccatcccgctgctggtgccccacatgaacctccacgacgccaagctcgccggctacaacatccccgccgagagcaagatcctcgtcaacgcctggttcctcgccaacaacccggagcagtggaagcggcccgacgagttccggccggagcgcttcctggaggaggagaagcacgtggaggccaacggcaacgacttcaggtacctgcccttcggcgtcggccgccggagctgccccggcatcatcctcgcgctgcccatcctcggcatcaccatcggccgcctcgtccagaacttcgtgctcacgccgccgcccggccaggacaagctcgacaccacggagaagggcggccagttcagcctccacatcctcaagcactccaccatcgtcgccaagcccagagtgttctagagcagcgacgtacgtgctctggagtttggacttccagcattttggtttggtggtgttgtactttcacgattgttcgctcgtcctaagtatacttgattatagtatccgtcacagagtagacacacgtttcgttaatgttatccgcaagaaaacagaggagctgaagaaatgtcgaacggggaggaaaagactggacgatttccgtcagatgtactcctgatgctgccataaattaaatcctcaaaatattgatgattttttcacg

SEQ ID NO: 16164 - protein, 539 aa, Triticum aestivum
  peptide (1)..(539): Ceres Seq. ID no. 14308012
  misc_feature (67)..(533): Pfam Name: Pfam Description:  Cytochrome P450
  misc_feature (34)..(539): NCBI GI NO: 586082 NR Description: Trans-cinnamate 4-monooxygenase
  misc_feature (34)..(539): NCBI GI NO: 1351206 NR Description: Trans-cinnamate 4-monooxygenase
  misc_feature (34)..(539): NCBI GI NO: 9965897 NR Description: cinnamate-4-hydroxylase [Gossypium arboreum]
  misc_feature (34)..(539): NCBI GI NO: 3915111 NR Description: Trans-cinnamate 4-monooxygenase
  misc_feature (34)..(539): NCBI GI NO: 3915095 NR Description: Trans-cinnamate 4-monooxygenase
  misc_feature (34)..(538): NCBI GI NO: 3915112 NR Description: Trans-cinnamate 4-monooxygenase
  misc_feature (34)..(539): NCBI GI NO: 417863 NR Description: Trans-cinnamate 4-monooxygenase
  misc_feature (34)..(539): NCBI GI NO: 14210375 NR Description: cinnamate 4-hydroxylase [Citrus x paradisi]
  misc_feature (34)..(539): NCBI GI NO: 9965899 NR Description: cinnamate-4-hydroxylase [Gossypium arboreum]
  misc_feature (34)..(537): NCBI GI NO: 16555879 NR Description: cinnamic acid 4-hydroxylase
RDRPEQPNRTRSRARSHNRAVTVSRAVPAPAGAMDFVFVEKLLAGLLAAVVGAIVVSKIRGRKLRLPPGPFPVPIFGNWLQVGDDLNHRNLAAMARKFGEVFLLRMGQRNLVVVSSPPLAREVLHTQGVEFGSRTRNVVFDIFTGEGQDMVFTVYGDHWRKMRRIMTVPFFTNKVVQQYRPGWEAEAAFVIDNVRADPRAATEGVVLRRHLQLMMYNNMYRIMFDRRFESMDDPLFLRLRALNGERSRLAQSFEYNYGDFIPILRPFLRGYLRLCKEVKETRLKLFKDYFLDERKKLVSTKAMDNNGGLKCAIDHILEAEQKGEINEDNVLYIIENINVAAIETTLWSIEWGLAELVNHPEIQQKLRDEMDAVLGAGHQITEPETHKLPYLQAVIKETLRLRMAIPLLVPHMNLHDAKLAGYNIPAESKILVNAWFLANNPEQWKRPDEFRPERFLEEEKHVEANGNDFRYLPFGVGRRSCPGIILALPILGITIGRLVQNFVLTPPPGQDKLDTTEKGGQFSLHILKHSTIVAKPRVF

SEQ ID NO: 16165 - protein, 506 aa, Triticum aestivum
  peptide (1)..(506): Ceres Seq. ID no. 14308013
  misc_feature (34)..(500): Pfam Name: Pfam Description:  Cytochrome P450
  misc_feature (1)..(506): NCBI GI NO: 586082 NR Description: Trans-cinnamate 4-monooxygenase
  misc_feature (1)..(506): NCBI GI NO: 1351206 NR Description: Trans-cinnamate 4-monooxygenase
  misc_feature (1)..(506): NCBI GI NO: 9965897 NR Description: cinnamate-4-hydroxylase [Gossypium arboreum]
  misc_feature (1)..(506): NCBI GI NO: 3915111 NR Description: Trans-cinnamate 4-monooxygenase
  misc_feature (1)..(506): NCBI GI NO: 3915095 NR Description: Trans-cinnamate 4-monooxygenase
  misc_feature (1)..(505): NCBI GI NO: 3915112 NR Description: Trans-cinnamate 4-monooxygenase
  misc_feature (1)..(506): NCBI GI NO: 417863 NR Description: Trans-cinnamate 4-monooxygenase
  misc_feature (1)..(506): NCBI GI NO: 14210375 NR Description: cinnamate 4-hydroxylase [Citrus x paradisi]
  misc_feature (1)..(506): NCBI GI NO: 9965899 NR Description: cinnamate-4-hydroxylase [Gossypium arboreum]
  misc_feature (1)..(504): NCBI GI NO: 16555879 NR Description: cinnamic acid 4-hydroxylase
MDFVFVEKLLAGLLAAVVGAIVVSKIRGRKLRLPPGPFPVPIFGNWLQVGDDLNHRNLAAMARKFGEVFLLRMGQRNLVVVSSPPLAREVLHTQGVEFGSRTRNVVFDIFTGEGQDMVFTVYGDHWRKMRRIMTVPFFTNKVVQQYRPGWEAEAAFVIDNVRADPRAATEGVVLRRHLQLMMYNNMYRIMFDRRFESMDDPLFLRLRALNGERSRLAQSFEYNYGDFIPILRPFLRGYLRLCKEVKETRLKLFKDYFLDERKKLVSTKAMDNNGGLKCAIDHILEAEQKGEINEDNVLYIIENINVAAIETTLWSIEWGLAELVNHPEIQQKLRDEMDAVLGAGHQITEPETHKLPYLQAVIKETLRLRMAIPLLVPHMNLHDAKLAGYNIPAESKILVNAWFLANNPEQWKRPDEFRPERFLEEEKHVEANGNDFRYLPFGVGRRSCPGIILALPILGITIGRLVQNFVLTPPPGQDKLDTTEKGGQFSLHILKHSTIVAKPRVF

SEQ ID NO: 16166 - protein, 446 aa, Triticum aestivum
  peptide (1)..(446): Ceres Seq. ID no. 14308014
  misc_feature (1)..(440): Pfam Name: Pfam Description:  Cytochrome P450
  misc_feature (1)..(446): NCBI GI NO: 586082 NR Description: Trans-cinnamate 4-monooxygenase
  misc_feature (1)..(446): NCBI GI NO: 1351206 NR Description: Trans-cinnamate 4-monooxygenase
  misc_feature (1)..(446): NCBI GI NO: 9965897 NR Description: cinnamate-4-hydroxylase [Gossypium arboreum]
  misc_feature (1)..(446): NCBI GI NO: 3915111 NR Description: Trans-cinnamate 4-monooxygenase
  misc_feature (1)..(446): NCBI GI NO: 3915095 NR Description: Trans-cinnamate 4-monooxygenase
  misc_feature (1)..(445): NCBI GI NO: 3915112 NR Description: Trans-cinnamate 4-monooxygenase
  misc_feature (1)..(446): NCBI GI NO: 417863 NR Description: Trans-cinnamate 4-monooxygenase
  misc_feature (1)..(446): NCBI GI NO: 14210375 NR Description: cinnamate 4-hydroxylase [Citrus x paradisi]
  misc_feature (1)..(446): NCBI GI NO: 9965899 NR Description: cinnamate-4-hydroxylase [Gossypium arboreum]
  misc_feature (1)..(444): NCBI GI NO: 16555879 NR Description: cinnamic acid 4-hydroxylase
MARKFGEVFLLRMGQRNLVVVSSPPLAREVLHTQGVEFGSRTRNVVFDIFTGEGQDMVFTVYGDHWRKMRRIMTVPFFTNKVVQQYRPGWEAEAAFVIDNVRADPRAATEGVVLRRHLQLMMYNNMYRIMFDRRFESMDDPLFLRLRALNGERSRLAQSFEYNYGDFIPILRPFLRGYLRLCKEVKETRLKLFKDYFLDERKKLVSTKAMDNNGGLKCAIDHILEAEQKGEINEDNVLYIIENINVAAIETTLWSIEWGLAELVNHPEIQQKLRDEMDAVLGAGHQITEPETHKLPYLQAVIKETLRLRMAIPLLVPHMNLHDAKLAGYNIPAESKILVNAWFLANNPEQWKRPDEFRPERFLEEEKHVEANGNDFRYLPFGVGRRSCPGIILALPILGITIGRLVQNFVLTPPPGQDKLDTTEKGGQFSLHILKHSTIVAKPRVF

SEQ ID NO: 16167 - DNA, 1419 bp, Triticum aestivum
  misc_feature (1)..(1419): Ceres Seq. ID no. 13654452
acacacacacagcgcaacgcctcccagctcgactccacgtgctgccgccgccgccggcgtagacctcccgttggccgccatggacccgcgcttccagctgcccactccggtgccgtcctccggcggcgctggtgtgcgagggcaccaccggcgggcccattcggagacgtttctgcgcttccccgacaccgacctcttcctcgaccccgatggagacttctccttctccgacctcgacttcccatccctctccgacgactccccggcggtctccgacccgaccccgcctcctcccccgccgatggcggccagctcgtcccagacaccggctccccgtccaccgggcgggacccacaacaggagcctctcccttgacgccgccttcttcgagggcctcgccttgcaggggggaggaggcgggggttgtggtggccataagaggagcgggtccatggatggggtgaactcgccgttcgaaggcgagtcggcgctgtcgggcgggctggactacgccaagaaggccatgccggccgagaggatcgccgagctagctctccttgaccccaaacgcgcaaagaggattttggcaaaccggcagtcggcagcgaggtcgaaggagaggaagatcaagtataccggtgagctagagaggaaggtccagacactgcagaccgaggccactacgctatcagcacagcttacacttctccagagggatacttctggtttaactaccgagaatagagaactcaaacttcggttgcagtccatggaggagcaagctaaactacgggatgctctaaatgacgctctgcgagaagaagtccagcggcttaagatagctgcagggcaagctccaaaaatgaatgggagtcaattcaacggcggactccagcagattccatcctatttctctcagcaacaccagcgacagcagcagcagcagcatcaacaacagatggcttacttaggtgggcaccaagctcagcgtcaccatccaaaccatcaccagagcccatcgaatggtggccagtcgctgagtggtctgtccctagacgactccatggatttcatttgaggaacactagggccctcctattaaatcatacaccaactgcaactcagcattgtacagatagctaatgtactatctatgcatatgaatcattggtagggtagctagcctttctttgtatttctatcattaatcagaaagcatgctcttgtatgacataatctcctctttcccttctttgtctgtttctggagagcaattgatgatactgggaactcttacttacaatgtgcttttcaggtcataactgttatgagatacacttgttagatwaaaaaaaaaaaaaaaaaaaaaaaaaaaaacaaaaaaccaaaaaaaaaaaaaaaaaagcttatcgataccgt

SEQ ID NO: 16168 - protein, 358 aa, Triticum aestivum
  peptide (1)..(358): Ceres Seq. ID no. 15219657
  misc_feature (187)..(249): Pfam Name: Pfam Description:  bZIP transcription factor
  misc_feature (151)..(358): NCBI GI NO: 29367343 NR Description: bZIP-like protein
  misc_feature (169)..(358): NCBI GI NO: 19401702 NR Description: susceptibility transcription factor RVS1
  misc_feature (78)..(353): NCBI GI NO: 2921823 NR Description: shoot-forming PKSF1 [Paulownia kawakamii]
  misc_feature (64)..(316): NCBI GI NO: 8777512 NR Description: bZIP transcriptional activator RSG
  misc_feature (113)..(355): NCBI GI NO: 34394739 NR Description: putative transcription activator RF2a
  misc_feature (83)..(324): NCBI GI NO: 21553989 NR Description: VirE2-interacting protein VIP1
  misc_feature (83)..(324): NCBI GI NO: 7258340 NR Description: VirE2-interacting protein VIP1
  misc_feature (83)..(324): NCBI GI NO: 18400998 NR Description: VirE2-interacting protein VIP1
  misc_feature (49)..(337): NCBI GI NO: 15221391 NR Description: bZIP protein [Arabidopsis thaliana]
  misc_feature (49)..(337): NCBI GI NO: 21553831 NR Description: transcriptional activator RF2a, putative
HTHSATPPSSTPRAAAAAGVDLPLAAMDPRFQLPTPVPSSGGAGVRGHHRRAHSETFLRFPDTDLFLDPDGDFSFSDLDFPSLSDDSPAVSDPTPPPPPPMAASSSQTPAPRPPGGTHNRSLSLDAAFFEGLALQGGGGGGCGGHKRSGSMDGVNSPFEGESALSGGLDYAKKAMPAERIAELALLDPKRAKRILANRQSAARSKERKIKYTGELERKVQTLQTEATTLSAQLTLLQRDTSGLTTENRELKLRLQSMEEQAKLRDALNDALREEVQRLKIAAGQAPKMNGSQFNGGLQQIPSYFSQQHQRQQQQQHQQQMAYLGGHQAQRHHPNHHQSPSNGGQSLSGLSLDDSMDFI

SEQ ID NO: 16169 - protein, 332 aa, Triticum aestivum
  peptide (1)..(332): Ceres Seq. ID no. 15219658
  misc_feature (161)..(223): Pfam Name: Pfam Description:  bZIP transcription factor
  misc_feature (125)..(332): NCBI GI NO: 29367343 NR Description: bZIP-like protein
  misc_feature (143)..(332): NCBI GI NO: 19401702 NR Description: susceptibility transcription factor RVS1
  misc_feature (52)..(327): NCBI GI NO: 2921823 NR Description: shoot-forming PKSF1 [Paulownia kawakamii]
  misc_feature (38)..(290): NCBI GI NO: 8777512 NR Description: bZIP transcriptional activator RSG
  misc_feature (87)..(329): NCBI GI NO: 34394739 NR Description: putative transcription activator RF2a
  misc_feature (57)..(298): NCBI GI NO: 21553989 NR Description: VirE2-interacting protein VIP1
  misc_feature (57)..(298): NCBI GI NO: 7258340 NR Description: VirE2-interacting protein VIP1
  misc_feature (57)..(298): NCBI GI NO: 18400998 NR Description: VirE2-interacting protein VIP1
  misc_feature (23)..(311): NCBI GI NO: 15221391 NR Description: bZIP protein [Arabidopsis thaliana]
  misc_feature (23)..(311): NCBI GI NO: 21553831 NR Description: transcriptional activator RF2a, putative
MDPRFQLPTPVPSSGGAGVRGHHRRAHSETFLRFPDTDLFLDPDGDFSFSDLDFPSLSDDSPAVSDPTPPPPPPMAASSSQTPAPRPPGGTHNRSLSLDAAFFEGLALQGGGGGGCGGHKRSGSMDGVNSPFEGESALSGGLDYAKKAMPAERIAELALLDPKRAKRILANRQSAARSKERKIKYTGELERKVQTLQTEATTLSAQLTLLQRDTSGLTTENRELKLRLQSMEEQAKLRDALNDALREEVQRLKIAAGQAPKMNGSQFNGGLQQIPSYFSQQHQRQQQQQHQQQMAYLGGHQAQRHHPNHHQSPSNGGQSLSGLSLDDSMDFI

SEQ ID NO: 16170 - protein, 258 aa, Triticum aestivum
  peptide (1)..(258): Ceres Seq. ID no. 15219659
  misc_feature (87)..(149): Pfam Name: Pfam Description:  bZIP transcription factor
  misc_feature (51)..(258): NCBI GI NO: 29367343 NR Description: bZIP-like protein
  misc_feature (69)..(258): NCBI GI NO: 19401702 NR Description: susceptibility transcription factor RVS1
  misc_feature (1)..(253): NCBI GI NO: 2921823 NR Description: shoot-forming PKSF1 [Paulownia kawakamii]
  misc_feature (1)..(216): NCBI GI NO: 8777512 NR Description: bZIP transcriptional activator RSG
  misc_feature (13)..(255): NCBI GI NO: 34394739 NR Description: putative transcription activator RF2a
  misc_feature (1)..(224): NCBI GI NO: 21553989 NR Description: VirE2-interacting protein VIP1
  misc_feature (1)..(224): NCBI GI NO: 7258340 NR Description: VirE2-interacting protein VIP1
  misc_feature (1)..(224): NCBI GI NO: 18400998 NR Description: VirE2-interacting protein VIP1
  misc_feature (1)..(237): NCBI GI NO: 15221391 NR Description: bZIP protein [Arabidopsis thaliana]
  misc_feature (1)..(237): NCBI GI NO: 21553831 NR Description: transcriptional activator RF2a, putative
MAASSSQTPAPRPPGGTHNRSLSLDAAFFEGLALQGGGGGGCGGHKRSGSMDGVNSPFEGESALSGGLDYAKKAMPAERIAELALLDPKRAKRILANRQSAARSKERKIKYTGELERKVQTLQTEATTLSAQLTLLQRDTSGLTTENRELKLRLQSMEEQAKLRDALNDALREEVQRLKIAAGQAPKMNGSQFNGGLQQIPSYFSQQHQRQQQQQHQQQMAYLGGHQAQRHHPNHHQSPSNGGQSLSGLSLDDSMDFI

SEQ ID NO: 16171 - DNA, 610 bp, Triticum aestivum
  misc_feature (1)..(610): Ceres Seq. ID no. 14302375
accccacttcccacttcccaagcgcgcccacgcgcacgaaaatactcctagtactaattcgagagccagtgagtctagggtcgagtcccggctggggatgacgagccctcgccggcgatggacttgccgctagccctcgcagctctactcctcctcctcctagtgctcctcgctgccccgccggcggcgctcctcattgccctccacctgaaccgccgccgccgcctaacgccgcccgagccggcggccgcggcgctcgagccgagcgcgccggccgaggagaacgagggcgggaaggagaagaggcggcggcgcagggcgaggcggaagcagcagcagaagcagggcggcgacggggccctctcgcaggcggcaggcggcggcggggacgacgcgctgccgccgcggccgcggttcccgctcgcctcggtggccggcgcactgcagcggcggatcaccgcgcggtacgacgagctcgcgcgggccagccaggcccagtccctcaccatggacggtgtgatcgtgctcgtcaagctcttgggcctccccctgtgccttgaactcttgagtcatggctatgaataagatctgaactgggcagatccaaatg

SEQ ID NO: 16172 - protein, 155 aa, Triticum aestivum
  peptide (1)..(155): Ceres Seq. ID no. 14302376
  misc_feature (1)..(131): NCBI GI NO: 34903590 NR Description: P0419B01.8
MDLPLALAALLLLLLVLLAAPPAALLIALHLNRRRRLTPPEPAAAALEPSAPAEENEGGKEKRRRRRARRKQQQKQGGDGALSQAAGGGGDDALPPRPRFPLASVAGALQRRITARYDELARASQAQSLTMDGVIVLVKLLGLPLCLELLSHGYE

SEQ ID NO: 16173 - DNA, 498 bp, Triticum aestivum
  misc_feature (1)..(498): Ceres Seq. ID no. 13656369
tccccccacactccccggccgccgccgccggcctcgtcagtcgcagatcccccaaccaccagcgaagccgccgctcaccgccgactggcccacatggccgcctctatcgccgccgccgcgtccgtctcccacctcctcctcgggccgaaacccaagcccacaaccccgccccgcctctccctcctcccccgcaggcgctccggagccgccggggccatctccgcctccgcgtccgcggcctccgacttcctcgccccggtcccgtccctcaagtcccgcctcgccgccggcgacaccctctacggcctcttcctcctctccttctcccccacgctcgccgagatcgccgcgctcgccggctacgactacgtggtcgtcgacatggagcacgggccgggcggcatcacggaggccctcgcctgcctccgcgccctcgacgccgcccgcacccccgccgtcctccgcctcccggtgttaaacacaataaagtgggaacgg

SEQ ID NO: 16174 - protein, 166 aa, Triticum aestivum
  peptide (1)..(166): Ceres Seq. ID no. 13656370
  misc_feature (89)..(165): Pfam Name: Pfam Description:  HpcH/HpaI aldolase family
  misc_feature (52)..(165): NCBI GI NO: 15236908 NR Description: aldolase -related [Arabidopsis thaliana]
  misc_feature (52)..(165): NCBI GI NO: 21593014 NR Description: putative aldolase [Arabidopsis thaliana]
  misc_feature (84)..(160): NCBI GI NO: 2262108 NR Description: 2
SPHTPRPPPPASSVADPPTTSEAAAHRRLAHMAASIAAAASVSHLLLGPKPKPTTPPRLSLLPRRRSGAAGAISASASAASDFLAPVPSLKSRLAAGDTLYGLFLLSFSPTLAEIAALAGYDYVVVDMEHGPGGITEALACLRALDAARTPAVLRLPVLNTIKWER

SEQ ID NO: 16175 - protein, 165 aa, Triticum aestivum
  peptide (1)..(165): Ceres Seq. ID no. 13656371
PPHSPAAAAGLVSRRSPNHQRSRRSPPTGPHGRLYRRRRVRLPPPPRAETQAHNPAPPLPPPPQALRSRRGHLRLRVRGLRLPRPGPVPQVPPRRRRHPLRPLPPLLLPHARRDRRARRLRLRGRRHGARAGRHHGGPRLPPRPRRRPHPRRPPPPGVKHNKVGT

SEQ ID NO: 16176 - protein, 158 aa, Triticum aestivum
  peptide (1)..(158): Ceres Seq. ID no. 13656372
  misc_feature (1)..(157): Pfam Name: Pfam Description:  Formin Homology 2 Domain
  misc_feature (1)..(157): NCBI GI NO: 6523547 NR Description: hydroxyproline-rich glycoprotein DZ-HRGP
  misc_feature (1)..(152): NCBI GI NO: 6523547 NR Description: hydroxyproline-rich glycoprotein DZ-HRGP
  misc_feature (1)..(153): NCBI GI NO: 6523547 NR Description: hydroxyproline-rich glycoprotein DZ-HRGP
  misc_feature (1)..(152): NCBI GI NO: 6523547 NR Description: hydroxyproline-rich glycoprotein DZ-HRGP
  misc_feature (23)..(152): NCBI GI NO: 30387315 NR Description: unknown [Choristoneura fumiferana MNPV]
  misc_feature (2)..(156): NCBI GI NO: 9630030 NR Description: unknown
  misc_feature (1)..(154): NCBI GI NO: 81286 NR Description: extensin - Volvox carteri (fragment)
  misc_feature (19)..(153): NCBI GI NO: 6523547 NR Description: hydroxyproline-rich glycoprotein DZ-HRGP
  misc_feature (1)..(152): NCBI GI NO: 6523547 NR Description: hydroxyproline-rich glycoprotein DZ-HRGP
  misc_feature (1)..(152): NCBI GI NO: 6523547 NR Description: hydroxyproline-rich glycoprotein DZ-HRGP
PPTLPGRRRRPRQSQIPQPPAKPPLTADWPTWPPLSPPPRPSPTSSSGRNPSPQPRPASPSSPAGAPEPPGPSPPPRPRPPTSSPRSRPSSPASPPATPSTASSSSPSPPRSPRSPRSPATTTWSSTWSTGRAASRRPSPASAPSTPPAPPPSSASRC

SEQ ID NO: 16177 - protein, 135 aa, Triticum aestivum
  peptide (1)..(135): Ceres Seq. ID no. 13656373
  misc_feature (58)..(134): Pfam Name: Pfam Description:  HpcH/HpaI aldolase family
  misc_feature (21)..(134): NCBI GI NO: 15236908 NR Description: aldolase -related [Arabidopsis thaliana]
  misc_feature (21)..(134): NCBI GI NO: 21593014 NR Description: putative aldolase [Arabidopsis thaliana]
  misc_feature (53)..(129): NCBI GI NO: 2262108 NR Description: 2
MAASIAAAASVSHLLLGPKPKPTTPPRLSLLPRRRSGAAGAISASASAASDFLAPVPSLKSRLAAGDTLYGLFLLSFSPTLAEIAALAGYDYVVVDMEHGPGGITEALACLRALDAARTPAVLRLPVLNTIKWER

SEQ ID NO: 16178 - DNA, 1749 bp, Triticum aestivum
  misc_feature (1)..(1749): Ceres Seq. ID no. 14308015
agagcaatacttgttgccaacacagacaccgctctgcctcttgaacccaagcagagcatcaaagaaaccagaggaggcggaggcagaggaagaagatggcgctcctccttgtgcttgtcggcgttgtggtcggcgtggtgctcgcgagcagcctgctgctgcggtggaacgaggtcaggtacggccggaggaaggagggccgcttgccgccggggacaatggggtggccgctcttcggcgagaccaccgagttcctcaagcagggcccgagcttcatgaagcagaggaggctcaggtacgggaggctgttccggacgcacatcctgggttgccccacggtggtgtgcatggacccggagctcaaccgccggatgctgctgcagggcgaggccggcggcctggtgcccggctacccgcagtccatgctcgacatcctcggccgcaacaatatcgccgccgtgcacggccagctgcaccgcgtcatgcgtggtgccatggtcggcctcgtccgccccgccgcgctccggcaaagcctcctccccaagatcgacgccttcatgcgcgaccacctctgcggctgggccggcaccgttgtcgacgtccaggccaagaccaaggagatggccttgctgtctgcactcaggcagatcgccggcgtcacggccggcccactctctgacgccctcaagacggagctgtacacgcttgtgctcggcaccatctccttgcccatcaacctcccagggaccagctactaccaaggctttcaggcaaggaagaagctcgtgtccattctagagcagatgatcgcggaacggcgatcctctggtgatgctcacgatgacatgttggatgctctcttgagaagcggcgatgacggcaccagggaaaagattagcgatgagcagatcattgacttgctcatcgccctcatctactctgggtacgagaccatgtcgacgacctcaatgatggctgtcaagtacctgtcagaacatccgcgggccctcgaagaacttaggagagagcatcttgatatcaggaagggaaaatcgccggacgaagccatcagctacgatgatgtcaagtccatgactttcactcgagctgccatttttgagacgctaagattagccacagttgtgaatggactgctgaggaaaactattaaggatgtagaaatgaatgggtatgtcattccaaaaggctggagaatctatgtttacacaagggagataaactacgatccgttcatgtatcctgacccgatgacctttaatccgtggagatggctggagaagaacatggaatcgcacccgcacttcatgttgttcggagggggcggccggatgtgccccgggaaggaggtgggaacggtggagatcacgactttcctccactatttcgtgacccgatacagatgggaggaagaaggcaagaacaccatcttgaaattcccccgggtggaagctcccaacgggctgcatatccgagttcaagattactgaactcttccaagaaacattttgcagagtttagatagatatgacaaagacaaagacgatgagagcgcgattctgcgccgatgaatagattagattagaaatttgatacctgtataaacataggaaaatagcgatagtatagatgttataggttcactaggtagccgggataataggcaacaacatgctcctgtgttcttttgttctaccaattccgaaatgaacaaaggcgtatgatgtgggt

SEQ ID NO: 16179 - protein, 470 aa, Triticum aestivum
  peptide (1)..(470): Ceres Seq. ID no. 14308016
  misc_feature (3)..(470): NCBI GI NO: 27127269 NR Description: cytochrome P450
  misc_feature (1)..(467): NCBI GI NO: 5921933 NR Description: Cytochrome P450 85 (Dwarf protein)
  misc_feature (1)..(470): NCBI GI NO: 9294419 NR Description: cytochrome P450 [Arabidopsis thaliana]
  misc_feature (1)..(470): NCBI GI NO: 18406372 NR Description: cytochrome p450, putative [Arabidopsis thaliana]
  misc_feature (4)..(470): NCBI GI NO: 21536828 NR Description: cytochrome P450 homolog, putative
  misc_feature (1)..(470): NCBI GI NO: 30693327 NR Description: cytochrome p450, putative [Arabidopsis thaliana]
  misc_feature (1)..(400): NCBI GI NO: 30693331 NR Description: cytochrome p450, putative [Arabidopsis thaliana]
  misc_feature (3)..(225): NCBI GI NO: 34896758 NR Description: 'OSJNBa0015G17.1'
  misc_feature (7)..(467): NCBI GI NO: 34903584 NR Description: cytochrome P450-like protein
  misc_feature (2)..(470): NCBI GI NO: 15239203 NR Description: cytochrome p450 90A1 [Arabidopsis thaliana]
MALLLVLVGVVVGVVLASSLLLRWNEVRYGRRKEGRLPPGTMGWPLFGETTEFLKQGPSFMKQRRLRYGRLFRTHILGCPTVVCMDPELNRRMLLQGEAGGLVPGYPQSMLDILGRNNIAAVHGQLHRVMRGAMVGLVRPAALRQSLLPKIDAFMRDHLCGWAGTVVDVQAKTKEMALLSALRQIAGVTAGPLSDALKTELYTLVLGTISLPINLPGTSYYQGFQARKKLVSILEQMIAERRSSGDAHDDMLDALLRSGDDGTREKISDEQIIDLLIALIYSGYETMSTTSMMAVKYLSEHPRALEELRREHLDIRKGKSPDEAISYDDVKSMTFTRAAIFETLRLATVVNGLLRKTIKDVEMNGYVIPKGWRIYVYTREINYDPFMYPDPMTFNPWRWLEKNMESHPHFMLFGGGGRMCPGKEVGTVEITTFLHYFVTRYRWEEEGKNTILKFPRVEAPNGLHIRVQDY

SEQ ID NO: 16180 - protein, 429 aa, Triticum aestivum
  peptide (1)..(429): Ceres Seq. ID no. 14308017
  misc_feature (1)..(429): NCBI GI NO: 27127269 NR Description: cytochrome P450
  misc_feature (1)..(426): NCBI GI NO: 5921933 NR Description: Cytochrome P450 85 (Dwarf protein)
  misc_feature (1)..(429): NCBI GI NO: 9294419 NR Description: cytochrome P450 [Arabidopsis thaliana]
  misc_feature (1)..(429): NCBI GI NO: 18406372 NR Description: cytochrome p450, putative [Arabidopsis thaliana]
  misc_feature (1)..(429): NCBI GI NO: 21536828 NR Description: cytochrome P450 homolog, putative
  misc_feature (1)..(429): NCBI GI NO: 30693327 NR Description: cytochrome p450, putative [Arabidopsis thaliana]
  misc_feature (1)..(359): NCBI GI NO: 30693331 NR Description: cytochrome p450, putative [Arabidopsis thaliana]
  misc_feature (1)..(184): NCBI GI NO: 34896758 NR Description: 'OSJNBa0015G17.1'
  misc_feature (1)..(426): NCBI GI NO: 34903584 NR Description: cytochrome P450-like protein
  misc_feature (1)..(429): NCBI GI NO: 15239203 NR Description: cytochrome p450 90A1 [Arabidopsis thaliana]
MGWPLFGETTEFLKQGPSFMKQRRLRYGRLFRTHILGCPTVVCMDPELNRRMLLQGEAGGLVPGYPQSMLDILGRNNIAAVHGQLHRVMRGAMVGLVRPAALRQSLLPKIDAFMRDHLCGWAGTVVDVQAKTKEMALLSALRQIAGVTAGPLSDALKTELYTLVLGTISLPINLPGTSYYQGFQARKKLVSILEQMIAERRSSGDAHDDMLDALLRSGDDGTREKISDEQIIDLLIALIYSGYETMSTTSMMAVKYLSEHPRALEELRREHLDIRKGKSPDEAISYDDVKSMTFTRAAIFETLRLATVVNGLLRKTIKDVEMNGYVIPKGWRIYVYTREINYDPFMYPDPMTFNPWRWLEKNMESHPHFMLFGGGGRMCPGKEVGTVEITTFLHYFVTRYRWEEEGKNTILKFPRVEAPNGLHIRVQDY

SEQ ID NO: 16181 - protein, 410 aa, Triticum aestivum
  peptide (1)..(410): Ceres Seq. ID no. 14308018
  misc_feature (1)..(410): NCBI GI NO: 27127269 NR Description: cytochrome P450
  misc_feature (1)..(407): NCBI GI NO: 5921933 NR Description: Cytochrome P450 85 (Dwarf protein)
  misc_feature (1)..(410): NCBI GI NO: 9294419 NR Description: cytochrome P450 [Arabidopsis thaliana]
  misc_feature (1)..(410): NCBI GI NO: 18406372 NR Description: cytochrome p450, putative [Arabidopsis thaliana]
  misc_feature (1)..(410): NCBI GI NO: 21536828 NR Description: cytochrome P450 homolog, putative
  misc_feature (1)..(410): NCBI GI NO: 30693327 NR Description: cytochrome p450, putative [Arabidopsis thaliana]
  misc_feature (1)..(340): NCBI GI NO: 30693331 NR Description: cytochrome p450, putative [Arabidopsis thaliana]
  misc_feature (1)..(165): NCBI GI NO: 34896758 NR Description: 'OSJNBa0015G17.1'
  misc_feature (1)..(407): NCBI GI NO: 34903584 NR Description: cytochrome P450-like protein
  misc_feature (1)..(410): NCBI GI NO: 15239203 NR Description: cytochrome p450 90A1 [Arabidopsis thaliana]
MKQRRLRYGRLFRTHILGCPTVVCMDPELNRRMLLQGEAGGLVPGYPQSMLDILGRNNIAAVHGQLHRVMRGAMVGLVRPAALRQSLLPKIDAFMRDHLCGWAGTVVDVQAKTKEMALLSALRQIAGVTAGPLSDALKTELYTLVLGTISLPINLPGTSYYQGFQARKKLVSILEQMIAERRSSGDAHDDMLDALLRSGDDGTREKISDEQIIDLLIALIYSGYETMSTTSMMAVKYLSEHPRALEELRREHLDIRKGKSPDEAISYDDVKSMTFTRAAIFETLRLATVVNGLLRKTIKDVEMNGYVIPKGWRIYVYTREINYDPFMYPDPMTFNPWRWLEKNMESHPHFMLFGGGGRMCPGKEVGTVEITTFLHYFVTRYRWEEEGKNTILKFPRVEAPNGLHIRVQDY

SEQ ID NO: 16182 - DNA, 1479 bp, Triticum aestivum
  misc_feature (1)..(1479): Ceres Seq. ID no. 13657621
accgagcttttccttcttcaagcaacataggagtagtcttcgctctgctcctcctctcccccaccagctctcgtgctcgccgccagccccggacagcgccgccccagctcaccgggagggcagcaagcaatggagcggagcctcccccccgtccccgtccccgcggcgcgcgtgtagcgttttgatccgcgaggatggcgatggcggcctacagcaaccaagcgcaggcgatgatgagggactacctgctcgccgacccgctcgtcccctacacctccgtgctcatcggcgttttcctctgcaagatggcttatgacctcacacggatattgagctcattctacttcaagggctattcttctttgacaaaaatacagcgtgttgaatggaacaacaggggtatgtccagtgcacatgcgatctttatcgcagcagtatcagtatatcttgttgcatctacagatcttttctctgatcgccttaatgggcctattacattccgcagttcgatcatctccacctctgcattaggggtttctgtgggttacttcatcactgatcttgcaatgatcttctggttgtttccttcccttggtggaatggaatatgtactccatcatactctttctctggttgcaatagcctacacaatgttgtcaggggaggggcagttttacacatacatgattcttatttcagaaacaaccacccctgaaatcaacatgagatggttccttgacaccgctggattgaagaagtcgagcgcctacctgattaatggtattttgatatttgttgtatggctggtggcaaggatatttttgttcctgtatgtattttaccacatctatttgcactacagccagataatgaagatgcacgcatttggttattacctgacactgaccgtgccgtcggtgctctttgtcatgaacgcaatgtggtttacgaagattttgaaaggggtaatgaaaacactgtcgaaatggtcgtaatcggagtaggctttgcggaccagaagtgcaacataactgggtgttcctgccgtgctgcactgcgtgtgacttgaatatgtaaagttatgaatatatgaattaggctttgcagaccggaagtacaacgccaacttggttggtgttcctgcagtgctgcttgagaccttgatgtgcaaagttatgaacatatcggcgtaactagggaaagtgaatatgtaaaatactagcaaacaagttagattaggctaaatcgcgctattttccatgagctgggatttcctggccagtttggcactgtactgaagttcctattccaatcctgcaatctgtgtataccaggccaggagataattccattgcatctcttattcatactaaatttgataatctaatttgagatattatatataagctgttgttattccaagaaaaaaaaaaaaaaaaaagcttatcgataccgtcgacctcgagggggggcccggta

SEQ ID NO: 16183 - protein, 266 aa, Triticum aestivum
  peptide (1)..(266): Ceres Seq. ID no. 13657622
  misc_feature (25)..(264): Pfam Name: DUF887 Pfam Description: Eukaryotic protein of unknown function
  misc_feature (1)..(266): NCBI GI NO: 40538924 NR Description: expressed protein
  misc_feature (2)..(264): NCBI GI NO: 18397885 NR Description: expressed protein [Arabidopsis thaliana]
  misc_feature (1)..(264): NCBI GI NO: 22328807 NR Description: expressed protein [Arabidopsis thaliana]
  misc_feature (23)..(264): NCBI GI NO: 21537382 NR Description: unknown [Arabidopsis thaliana]
  misc_feature (23)..(264): NCBI GI NO: 18413327 NR Description: expressed protein [Arabidopsis thaliana]
  misc_feature (28)..(264): NCBI GI NO: 34909246 NR Description: B1148D12.11
  misc_feature (2)..(164): NCBI GI NO: 25403400 NR Description: protein T19E23.9 [imported] - Arabidopsis thaliana
  misc_feature (210)..(264): NCBI GI NO: 25403400 NR Description: protein T19E23.9 [imported] - Arabidopsis thaliana
  misc_feature (23)..(264): NCBI GI NO: 7486070 NR Description: hypothetical protein F24G24
  misc_feature (27)..(263): NCBI GI NO: 34860211 NR Description: similar to RIKEN cDNA C730036B01
MAMAAYSNQAQAMMRDYLLADPLVPYTSVLIGVFLCKMAYDLTRILSSFYFKGYSSLTKIQRVEWNNRGMSSAHAIFIAAVSVYLVASTDLFSDRLNGPITFRSSIISTSALGVSVGYFITDLAMIFWLFPSLGGMEYVLHHTLSLVAIAYTMLSGEGQFYTYMILISETTTPEINMRWFLDTAGLKKSSAYLINGILIFVVWLVARIFLFLYVFYHIYLHYSQIMKMHAFGYYLTLTVPSVLFVMNAMWFTKILKGVMKTLSKWS

SEQ ID NO: 16184 - protein, 264 aa, Triticum aestivum
  peptide (1)..(264): Ceres Seq. ID no. 13657623
  misc_feature (23)..(262): Pfam Name: DUF887 Pfam Description: Eukaryotic protein of unknown function
  misc_feature (1)..(264): NCBI GI NO: 40538924 NR Description: expressed protein
  misc_feature (1)..(262): NCBI GI NO: 18397885 NR Description: expressed protein [Arabidopsis thaliana]
  misc_feature (1)..(262): NCBI GI NO: 22328807 NR Description: expressed protein [Arabidopsis thaliana]
  misc_feature (21)..(262): NCBI GI NO: 21537382 NR Description: unknown [Arabidopsis thaliana]
  misc_feature (21)..(262): NCBI GI NO: 18413327 NR Description: expressed protein [Arabidopsis thaliana]
  misc_feature (26)..(262): NCBI GI NO: 34909246 NR Description: B1148D12.11
  misc_feature (1)..(162): NCBI GI NO: 25403400 NR Description: protein T19E23.9 [imported] - Arabidopsis thaliana
  misc_feature (208)..(262): NCBI GI NO: 25403400 NR Description: protein T19E23.9 [imported] - Arabidopsis thaliana
  misc_feature (21)..(262): NCBI GI NO: 7486070 NR Description: hypothetical protein F24G24
  misc_feature (25)..(261): NCBI GI NO: 34860211 NR Description: similar to RIKEN cDNA C730036B01
MAAYSNQAQAMMRDYLLADPLVPYTSVLIGVFLCKMAYDLTRILSSFYFKGYSSLTKIQRVEWNNRGMSSAHAIFIAAVSVYLVASTDLFSDRLNGPITFRSSIISTSALGVSVGYFITDLAMIFWLFPSLGGMEYVLHHTLSLVAIAYTMLSGEGQFYTYMILISETTTPEINMRWFLDTAGLKKSSAYLINGILIFVVWLVARIFLFLYVFYHIYLHYSQIMKMHAFGYYLTLTVPSVLFVMNAMWFTKILKGVMKTLSKWS

SEQ ID NO: 16185 - protein, 254 aa, Triticum aestivum
  peptide (1)..(254): Ceres Seq. ID no. 13657624
  misc_feature (13)..(252): Pfam Name: DUF887 Pfam Description: Eukaryotic protein of unknown function
  misc_feature (1)..(254): NCBI GI NO: 40538924 NR Description: expressed protein
  misc_feature (1)..(252): NCBI GI NO: 18397885 NR Description: expressed protein [Arabidopsis thaliana]
  misc_feature (1)..(252): NCBI GI NO: 22328807 NR Description: expressed protein [Arabidopsis thaliana]
  misc_feature (11)..(252): NCBI GI NO: 21537382 NR Description: unknown [Arabidopsis thaliana]
  misc_feature (11)..(252): NCBI GI NO: 18413327 NR Description: expressed protein [Arabidopsis thaliana]
  misc_feature (16)..(252): NCBI GI NO: 34909246 NR Description: B1148D12.11
  misc_feature (1)..(152): NCBI GI NO: 25403400 NR Description: protein T19E23.9 [imported] - Arabidopsis thaliana
  misc_feature (198)..(252): NCBI GI NO: 25403400 NR Description: protein T19E23.9 [imported] - Arabidopsis thaliana
  misc_feature (11)..(252): NCBI GI NO: 7486070 NR Description: hypothetical protein F24G24
  misc_feature (15)..(251): NCBI GI NO: 34860211 NR Description: similar to RIKEN cDNA C730036B01
MMRDYLLADPLVPYTSVLIGVFLCKMAYDLTRILSSFYFKGYSSLTKIQRVEWNNRGMSSAHAIFIAAVSVYLVASTDLFSDRLNGPITFRSSIISTSALGVSVGYFITDLAMIFWLFPSLGGMEYVLHHTLSLVAIAYTMLSGEGQFYTYMILISETTTPEINMRWFLDTAGLKKSSAYLINGILIFVVWLVARIFLFLYVFYHIYLHYSQIMKMHAFGYYLTLTVPSVLFVMNAMWFTKILKGVMKTLSKWS

SEQ ID NO: 16186 - DNA, 575 bp, Triticum aestivum
  misc_feature (1)..(575): Ceres Seq. ID no. 13656404
gcagtcgatttcacgcgatcggatccagccgccccatgccgccgtcccccgccgcgtccgccccggcgagccgccacctgcgactctggtggcgccgccgcggccgggccggcgccgtcgcggccaccttcgccgcggcactcctcgccgcggccctcctcctctcgctctcctacttcgcctccctgcccctcgcgcccgcctcctcctccgccctcgtcggcctcaccctcctccgccgcgccgaggagaagggcgcgctgtgcttggatgggagcgcgccggggtaccatctgcagcgagggtcagggagtggctctcagagctggctcatccacttggagggtggaggctggtgccgaaatttgaaatcatgcgcttcacgccagaaatcgatgttgggttcttcccattacatggaacgtcaggttgagtttgctgggatgttgagcgatgatgaagatcagaatccagattttcacaactggaataaagtgaagataaggtattgtgatggggcatcattttctgggaacgttaaagacgagttgcagaacggcacaaaattctttttc

SEQ ID NO: 16187 - protein, 191 aa, Triticum aestivum
  peptide (1)..(191): Ceres Seq. ID no. 13656405
  misc_feature (68)..(190): Pfam Name: Pfam Description:  Pectinacetylesterase
  misc_feature (68)..(190): NCBI GI NO: 6478931 NR Description: putative pectinacetylesterase
  misc_feature (68)..(190): NCBI GI NO: 22330933 NR Description: pectinacetylesterase family [Arabidopsis thaliana]
  misc_feature (72)..(182): NCBI GI NO: 7487997 NR Description: pectin acetylesterase homolog F21E10
  misc_feature (55)..(190): NCBI GI NO: 6478941 NR Description: putative pectinacetylesterase
  misc_feature (72)..(182): NCBI GI NO: 6714404 NR Description: putative pectinacetylesterase
  misc_feature (72)..(182): NCBI GI NO: 18397406 NR Description: pectinacetylesterase, putative
  misc_feature (55)..(190): NCBI GI NO: 22330933 NR Description: pectinacetylesterase family [Arabidopsis thaliana]
  misc_feature (68)..(181): NCBI GI NO: 34913332 NR Description: putative pectin acetylesterase precursor
  misc_feature (52)..(190): NCBI GI NO: 34907550 NR Description: putative pectinacetylesterase
  misc_feature (55)..(182): NCBI GI NO: 15228677 NR Description: pectinacetylesterase family [Arabidopsis thaliana]
SRFHAIGSSRPMPPSPAASAPASRHLRLWWRRRGRAGAVAATFAAALLAAALLLSLSYFASLPLAPASSSALVGLTLLRRAEEKGALCLDGSAPGYHLQRGSGSGSQSWLIHLEGGGWCRNLKSCASRQKSMLGSSHYMERQVEFAGMLSDDEDQNPDFHNWNKVKIRYCDGASFSGNVKDELQNGTKFFF

SEQ ID NO: 16188 - protein, 180 aa, Triticum aestivum
  peptide (1)..(180): Ceres Seq. ID no. 13656406
  misc_feature (57)..(179): Pfam Name: Pfam Description:  Pectinacetylesterase
  misc_feature (57)..(179): NCBI GI NO: 6478931 NR Description: putative pectinacetylesterase
  misc_feature (57)..(179): NCBI GI NO: 22330933 NR Description: pectinacetylesterase family [Arabidopsis thaliana]
  misc_feature (61)..(171): NCBI GI NO: 7487997 NR Description: pectin acetylesterase homolog F21E10
  misc_feature (44)..(179): NCBI GI NO: 6478941 NR Description: putative pectinacetylesterase
  misc_feature (61)..(171): NCBI GI NO: 6714404 NR Description: putative pectinacetylesterase
  misc_feature (61)..(171): NCBI GI NO: 18397406 NR Description: pectinacetylesterase, putative
  misc_feature (44)..(179): NCBI GI NO: 22330933 NR Description: pectinacetylesterase family [Arabidopsis thaliana]
  misc_feature (57)..(170): NCBI GI NO: 34913332 NR Description: putative pectin acetylesterase precursor
  misc_feature (41)..(179): NCBI GI NO: 34907550 NR Description: putative pectinacetylesterase
  misc_feature (44)..(171): NCBI GI NO: 15228677 NR Description: pectinacetylesterase family [Arabidopsis thaliana]
MPPSPAASAPASRHLRLWWRRRGRAGAVAATFAAALLAAALLLSLSYFASLPLAPASSSALVGLTLLRRAEEKGALCLDGSAPGYHLQRGSGSGSQSWLIHLEGGGWCRNLKSCASRQKSMLGSSHYMERQVEFAGMLSDDEDQNPDFHNWNKVKIRYCDGASFSGNVKDELQNGTKFFF

SEQ ID NO: 16189 - protein, 143 aa, Triticum aestivum
  peptide (1)..(143): Ceres Seq. ID no. 13656407
QSISRDRIQPPHAAVPRRVRPGEPPPATLVAPPRPGRRRRGHLRRGTPRRGPPPLALLLRLPAPRARLLLRPRRPHPPPPRRGEGRAVLGWERAGVPSAARVREWLSELAHPLGGWRLVPKFEIMRFTPEIDVGFFPLHGTSG

SEQ ID NO: 16190 - DNA, 974 bp, Triticum aestivum
  misc_feature (1)..(974): Ceres Seq. ID no. 13656408
attacctagaacatcctaatcgaaaaactgcggcttacaccagggaaaggctctcgcatcgctccctccccggggcgacacgggcggcggctcaggcgcccctccaccagaccccctcctcattcccctcccctcgccgtcgccggtgggctccgccgggcgaagcccgcatggatccggcggcggcgggacctcttctacccggcgtcgctcgtgaggggaagacttgcagcggcgggcgacggatgccggacgacgtacggtgctggtgtcggctgcgggcggcggatggggagctggggcggcggcatcggtccgggctccggcgtggcctgggcgtggacggcatgcatgcgcgcggcggcggtcggcttcggatcgtgcgtggggtgcggatcgacgtcgggcgcggcagcggctttcgtctcccggatttcgccgccgcagccgctcaccgcccacgcctcctacccgtcgacgagatgacgaagcgcaccaagaaggctggtattgtcggcaaatatggtacccgttatggtgccagtttgcgtaagcagatcaagaagatggaggtgtctcagcactccaagtacttctgtgagttctgtgggaagtttgctgtgaagaggaaagcagttggaatttggggatgcaaggactgtgggaaggtgaaggctggcggtgcttacactatgaacactgccagtgcggtcactgtcaggagcactatccgtcgtttgagggagcagactgaagcataagttgctactagtgttttgtcctagtgaatcatctgggatttcgcagtttagacgatactttggattcagttccattggctgtttagtcaaggattatctttgtacttggtgcgatgatgttctgttatgttattctcccacccttttgttgcctgattccactctgatttactgtggattaaaaaaaaaaaaaaaaaagcttatcgataccgt

SEQ ID NO: 16191 - protein, 252 aa, Triticum aestivum
  peptide (1)..(252): Ceres Seq. ID no. 13656409
  misc_feature (159)..(252): NCBI GI NO: 34911166 NR Description: putative 60S ribosomal protein L37a
  misc_feature (161)..(251): NCBI GI NO: 6831607 NR Description: 60S ribosomal protein L37a
  misc_feature (161)..(252): NCBI GI NO: 6831602 NR Description: 60S RIBOSOMAL PROTEIN L37A
  misc_feature (161)..(252): NCBI GI NO: 15228411 NR Description: 60S ribosomal protein L37a (RPL37aB)
  misc_feature (161)..(251): NCBI GI NO: 18411538 NR Description: 60S ribosomal protein L37a (RPL37aC)
  misc_feature (161)..(251): NCBI GI NO: 1173045 NR Description: 60S RIBOSOMAL PROTEIN L37A
  misc_feature (166)..(251): NCBI GI NO: 11358898 NR Description: translation initiation factor eIF-4 gamma homologF27H5
  misc_feature (161)..(252): NCBI GI NO: 6093889 NR Description: 60S RIBOSOMAL PROTEIN L37A
  misc_feature (161)..(248): NCBI GI NO: 7441206 NR Description: ribosomal protein L37a
  misc_feature (161)..(249): NCBI GI NO: 33637090 NR Description: N1 [Toxoplasma gondii]
YLEHPNRKTAAYTRERLSHRSLPGATRAAAQAPLHQTPSSFPSPRRRRWAPPGEARMDPAAAGPLLPGVAREGKTCSGGRRMPDDVRCWCRLRAADGELGRRHRSGLRRGLGVDGMHARGGGRLRIVRGVRIDVGRGSGFRLPDFAAAAAHRPRLLPVDEMTKRTKKAGIVGKYGTRYGASLRKQIKKMEVSQHSKYFCEFCGKFAVKRKAVGIWGCKDCGKVKAGGAYTMNTASAVTVRSTIRRLREQTEA

SEQ ID NO: 16192 - protein, 196 aa, Triticum aestivum
  peptide (1)..(196): Ceres Seq. ID no. 13656410
  misc_feature (103)..(196): NCBI GI NO: 34911166 NR Description: putative 60S ribosomal protein L37a
  misc_feature (105)..(195): NCBI GI NO: 6831607 NR Description: 60S ribosomal protein L37a
  misc_feature (105)..(196): NCBI GI NO: 6831602 NR Description: 60S RIBOSOMAL PROTEIN L37A
  misc_feature (105)..(196): NCBI GI NO: 15228411 NR Description: 60S ribosomal protein L37a (RPL37aB)
  misc_feature (105)..(195): NCBI GI NO: 18411538 NR Description: 60S ribosomal protein L37a (RPL37aC)
  misc_feature (105)..(195): NCBI GI NO: 1173045 NR Description: 60S RIBOSOMAL PROTEIN L37A
  misc_feature (110)..(195): NCBI GI NO: 11358898 NR Description: translation initiation factor eIF-4 gamma homologF27H5
  misc_feature (105)..(196): NCBI GI NO: 6093889 NR Description: 60S RIBOSOMAL PROTEIN L37A
  misc_feature (105)..(192): NCBI GI NO: 7441206 NR Description: ribosomal protein L37a
  misc_feature (105)..(193): NCBI GI NO: 33637090 NR Description: N1 [Toxoplasma gondii]
MDPAAAGPLLPGVAREGKTCSGGRRMPDDVRCWCRLRAADGELGRRHRSGLRRGLGVDGMHARGGGRLRIVRGVRIDVGRGSGFRLPDFAAAAAHRPRLLPVDEMTKRTKKAGIVGKYGTRYGASLRKQIKKMEVSQHSKYFCEFCGKFAVKRKAVGIWGCKDCGKVKAGGAYTMNTASAVTVRSTIRRLREQTEA

SEQ ID NO: 16193 - protein, 171 aa, Triticum aestivum
  peptide (1)..(171): Ceres Seq. ID no. 13656411
  misc_feature (78)..(171): NCBI GI NO: 34911166 NR Description: putative 60S ribosomal protein L37a
  misc_feature (80)..(170): NCBI GI NO: 6831607 NR Description: 60S ribosomal protein L37a
  misc_feature (80)..(171): NCBI GI NO: 6831602 NR Description: 60S RIBOSOMAL PROTEIN L37A
  misc_feature (80)..(171): NCBI GI NO: 15228411 NR Description: 60S ribosomal protein L37a (RPL37aB)
  misc_feature (80)..(170): NCBI GI NO: 18411538 NR Description: 60S ribosomal protein L37a (RPL37aC)
  misc_feature (80)..(170): NCBI GI NO: 1173045 NR Description: 60S RIBOSOMAL PROTEIN L37A
  misc_feature (85)..(170): NCBI GI NO: 11358898 NR Description: translation initiation factor eIF-4 gamma homologF27H5
  misc_feature (80)..(171): NCBI GI NO: 6093889 NR Description: 60S RIBOSOMAL PROTEIN L37A
  misc_feature (80)..(167): NCBI GI NO: 7441206 NR Description: ribosomal protein L37a
  misc_feature (80)..(168): NCBI GI NO: 33637090 NR Description: N1 [Toxoplasma gondii]
MPDDVRCWCRLRAADGELGRRHRSGLRRGLGVDGMHARGGGRLRIVRGVRIDVGRGSGFRLPDFAAAAAHRPRLLPVDEMTKRTKKAGIVGKYGTRYGASLRKQIKKMEVSQHSKYFCEFCGKFAVKRKAVGIWGCKDCGKVKAGGAYTMNTASAVTVRSTIRRLREQTEA

SEQ ID NO: 16194 - DNA, 1310 bp, Triticum aestivum
  misc_feature (1)..(1310): Ceres Seq. ID no. 14302514
agaaaactgaggaaagtagaccgagccccaaacgaaatcaaatcgagaggagaggagaaagagagaggagcacgcgccgccgccaggccaagcacatcgccatggccgcctcctgccgccgcgcgccccagatgctgggctccgccgcctcccgcctcctccattcgcgtggctacgcggccgccgccgccgcgccctccccggcggtgttcgtcgacaagagcacccgcgtgatctgccagggcatcaccgggaagaacggcaccttccacaccgagcaggccatcgagtacggcaccaacatggtaggtggagttactcccaagaaaggtggaactgagcacctaggccttccagttttcaactcggtagcagaagctaaggccgagacaaaggccaatgcatctgttatatatgttccaccaccatttgctgccgctgcaataatggaggcattggaagcagagcttgaccttgttgtctgcattactgaagggatacctcagcatgacatggtgaaagtgaaagctgctctgaacaggcaatcaaaaaccagattgatcgggccaaactgccctggtatcattaagcctggtgaatgtaagattggaatcatgccaggttacatccacaaaccaggacgcattggaattgtatctcgttctggtaccttgacatatgaagcggtgtttcaaacaacagccgtaggcttggggcagtcaacttgtgtgggcatgggtggtgacccctttaacggcactaattttgttgactgccttgaaaagtttgttgatgatcctcagacagaaggtattgttctcattggagaaattggcggtactgctgaggaggatgctgcagcctttatccgggagagcaaaacagaaaagcctgtcgttgcattcatagctggacttactgcacccccaggccgtcgcatgggccatgctggagcaattgtgtcaggggggaagggtaccgcccaggacaagatcaaggcactcagggatgctggggttactgttgtcgagtcaccagctaagatcggttcaaccatgttcgaacttttcaagcagcgcggaatggtagagtagagagaaggaatggtacagtagaaaagaaaacattgggaaacttctttttgttgctcgttggttaatagcgagcaatacgtcggtagggccccatcgctggtcgctgagttgagctactcagtcccttttttccttttcctttccccgtcttaagtgtgagactggcctttacatgtgctcatttcaaatgttcaataagacaaattctcgacatac

SEQ ID NO: 16195 - protein, 363 aa, Triticum aestivum
  peptide (1)..(363): Ceres Seq. ID no. 14302515
  misc_feature (70)..(181): Pfam Name: Pfam Description:  CoA binding domain
  misc_feature (34)..(363): NCBI GI NO: 34393512 NR Description: putative succinyl-CoA ligase alpha subunit
  misc_feature (39)..(362): NCBI GI NO: 27357175 NR Description: succinyl-CoA ligase alpha subunit
  misc_feature (52)..(363): NCBI GI NO: 15237260 NR Description: succinyl-CoA synthetase, alpha subunit
  misc_feature (52)..(363): NCBI GI NO: 21593483 NR Description: succinyl-CoA synthetase, alpha subunit
  misc_feature (52)..(363): NCBI GI NO: 15241592 NR Description: succinyl-CoA-ligase alpha subunit
  misc_feature (69)..(363): NCBI GI NO: 1076415 NR Description: succinate-CoA ligase (GDP-forming) (EC 6
  misc_feature (55)..(352): NCBI GI NO: 1711574 NR Description: SUCCINYL-COA LIGASE
  misc_feature (69)..(362): NCBI GI NO: 4104377 NR Description: ATP-specific succinyl-CoA synthetase alpha subunit
  misc_feature (32)..(362): NCBI GI NO: 2258465 NR Description: succinyl-CoA synthetase alpha subunit [Sus scrofa]
  misc_feature (68)..(359): NCBI GI NO: 23056207 NR Description: hypothetical protein [Geobacter metallireducens]
KTEESRPSPKRNQIERRGERERSTRRRQAKHIAMAASCRRAPQMLGSAASRLLHSRGYAAAAAAPSPAVFVDKSTRVICQGITGKNGTFHTEQAIEYGTNMVGGVTPKKGGTEHLGLPVFNSVAEAKAETKANASVIYVPPPFAAAAIMEALEAELDLVVCITEGIPQHDMVKVKAALNRQSKTRLIGPNCPGIIKPGECKIGIMPGYIHKPGRIGIVSRSGTLTYEAVFQTTAVGLGQSTCVGMGGDPFNGTNFVDCLEKFVDDPQTEGIVLIGEIGGTAEEDAAAFIRESKTEKPVVAFIAGLTAPPGRRMGHAGAIVSGGKGTAQDKIKALRDAGVTVVESPAKIGSTMFELFKQRGMVE

SEQ ID NO: 16196 - protein, 330 aa, Triticum aestivum
  peptide (1)..(330): Ceres Seq. ID no. 14302516
  misc_feature (37)..(148): Pfam Name: Pfam Description:  CoA binding domain
  misc_feature (1)..(330): NCBI GI NO: 34393512 NR Description: putative succinyl-CoA ligase alpha subunit
  misc_feature (6)..(329): NCBI GI NO: 27357175 NR Description: succinyl-CoA ligase alpha subunit
  misc_feature (19)..(330): NCBI GI NO: 15237260 NR Description: succinyl-CoA synthetase, alpha subunit
  misc_feature (19)..(330): NCBI GI NO: 21593483 NR Description: succinyl-CoA synthetase, alpha subunit
  misc_feature (19)..(330): NCBI GI NO: 15241592 NR Description: succinyl-CoA-ligase alpha subunit
  misc_feature (36)..(330): NCBI GI NO: 1076415 NR Description: succinate-CoA ligase (GDP-forming) (EC 6
  misc_feature (22)..(319): NCBI GI NO: 1711574 NR Description: SUCCINYL-COA LIGASE
  misc_feature (36)..(329): NCBI GI NO: 4104377 NR Description: ATP-specific succinyl-CoA synthetase alpha subunit
  misc_feature (1)..(329): NCBI GI NO: 2258465 NR Description: succinyl-CoA synthetase alpha subunit [Sus scrofa]
  misc_feature (35)..(326): NCBI GI NO: 23056207 NR Description: hypothetical protein [Geobacter metallireducens]
MAASCRRAPQMLGSAASRLLHSRGYAAAAAAPSPAVFVDKSTRVICQGITGKNGTFHTEQAIEYGTNMVGGVTPKKGGTEHLGLPVFNSVAEAKAETKANASVIYVPPPFAAAAIMEALEAELDLVVCITEGIPQHDMVKVKAALNRQSKTRLIGPNCPGIIKPGECKIGIMPGYIHKPGRIGIVSRSGTLTYEAVFQTTAVGLGQSTCVGMGGDPFNGTNFVDCLEKFVDDPQTEGIVLIGEIGGTAEEDAAAFIRESKTEKPVVAFIAGLTAPPGRRMGHAGAIVSGGKGTAQDKIKALRDAGVTVVESPAKIGSTMFELFKQRGMVE

SEQ ID NO: 16197 - protein, 320 aa, Triticum aestivum
  peptide (1)..(320): Ceres Seq. ID no. 14302517
  misc_feature (27)..(138): Pfam Name: Pfam Description:  CoA binding domain
  misc_feature (1)..(320): NCBI GI NO: 34393512 NR Description: putative succinyl-CoA ligase alpha subunit
  misc_feature (1)..(319): NCBI GI NO: 27357175 NR Description: succinyl-CoA ligase alpha subunit
  misc_feature (9)..(320): NCBI GI NO: 15237260 NR Description: succinyl-CoA synthetase, alpha subunit
  misc_feature (9)..(320): NCBI GI NO: 21593483 NR Description: succinyl-CoA synthetase, alpha subunit
  misc_feature (9)..(320): NCBI GI NO: 15241592 NR Description: succinyl-CoA-ligase alpha subunit
  misc_feature (26)..(320): NCBI GI NO: 1076415 NR Description: succinate-CoA ligase (GDP-forming) (EC 6
  misc_feature (12)..(309): NCBI GI NO: 1711574 NR Description: SUCCINYL-COA LIGASE
  misc_feature (26)..(319): NCBI GI NO: 4104377 NR Description: ATP-specific succinyl-CoA synthetase alpha subunit
  misc_feature (1)..(319): NCBI GI NO: 2258465 NR Description: succinyl-CoA synthetase alpha subunit [Sus scrofa]
  misc_feature (25)..(316): NCBI GI NO: 23056207 NR Description: hypothetical protein [Geobacter metallireducens]
MLGSAASRLLHSRGYAAAAAAPSPAVFVDKSTRVICQGITGKNGTFHTEQAIEYGTNMVGGVTPKKGGTEHLGLPVFNSVAEAKAETKANASVIYVPPPFAAAAIMEALEAELDLVVCITEGIPQHDMVKVKAALNRQSKTRLIGPNCPGIIKPGECKIGIMPGYIHKPGRIGIVSRSGTLTYEAVFQTTAVGLGQSTCVGMGGDPFNGTNFVDCLEKFVDDPQTEGIVLIGEIGGTAEEDAAAFIRESKTEKPVVAFIAGLTAPPGRRMGHAGAIVSGGKGTAQDKIKALRDAGVTVVESPAKIGSTMFELFKQRGMVE

SEQ ID NO: 16198 - DNA, 808 bp, Triticum aestivum
  misc_feature (1)..(808): Ceres Seq. ID no. 12618916
aaagcaccaacccctcaagagacacatccttcagctcatccttgcctcttgcgttctcttctccgtagcttgcagataagtaagcttgtccgttgtgcggagaggggaggcggataggtacatacacatggaagggttgcagagatcgtcctccactttcagaaggtccggctcgtcgggcctggtgtgggacgagcggttcctgaccgagggcgccgaggcgaaggccgccggcgagggcggcacggatgaagcccagccggagatgcggcgctcccggagcaccggcggcgtcgggatgatgctgcgccgtggcggcgacgacaagaagcagcagcagcagaaaaaggagcagcaaggccagaagaagaaggacgaggagcgcgatccccaggtgttccggaccaaggaggtggccccggacgtggacccgccgtcgccgagggtgtccggctgcatcctctgcgccatcttcgggggctccggctccggctctggcccggcggcgcgccgaggccgcgccaagccgaagaggaggcaacggtcggcggcgtaaagtttgatcgggccttggcggatggatgtcatgcgagctgtgtttatactggagtgacgatgatgatgatatactactgatattggttggtttgtattgtactctgctctgcgttactgcgtacgtagtctatacgtgtcaggttagttcctctttttttggttagtttctgggttcagatccgtgagcagcagcagctgctgagatctgcgatgttctttcttgatctggcgcatgattttttccccgtcc

SEQ ID NO: 16199 - protein, 142 aa, Triticum aestivum
  peptide (1)..(142): Ceres Seq. ID no. 12618917
  misc_feature (1)..(139): NCBI GI NO: 30684356 NR Description: expressed protein [Arabidopsis thaliana]
  misc_feature (1)..(139): NCBI GI NO: 30684361 NR Description: expressed protein [Arabidopsis thaliana]
  misc_feature (1)..(137): NCBI GI NO: 18412687 NR Description: expressed protein; protein id: At1g80180
MEGLQRSSSTFRRSGSSGLVWDERFLTEGAEAKAAGEGGTDEAQPEMRRSRSTGGVGMMLRRGGDDKKQQQQKKEQQGQKKKDEERDPQVFRTKEVAPDVDPPSPRVSGCILCAIFGGSGSGSGPAARRGRAKPKRRQRSAA

SEQ ID NO: 16200 - protein, 96 aa, Triticum aestivum
  peptide (1)..(96): Ceres Seq. ID no. 12618918
  misc_feature (1)..(93): NCBI GI NO: 30684356 NR Description: expressed protein [Arabidopsis thaliana]
  misc_feature (1)..(93): NCBI GI NO: 30684361 NR Description: expressed protein [Arabidopsis thaliana]
  misc_feature (1)..(91): NCBI GI NO: 18412687 NR Description: expressed protein; protein id: At1g80180
MRRSRSTGGVGMMLRRGGDDKKQQQQKKEQQGQKKKDEERDPQVFRTKEVAPDVDPPSPRVSGCILCAIFGGSGSGSGPAARRGRAKPKRRQRSAA

SEQ ID NO: 16201 - protein, 85 aa, Triticum aestivum
  peptide (1)..(85): Ceres Seq. ID no. 12618919
  misc_feature (1)..(82): NCBI GI NO: 30684356 NR Description: expressed protein [Arabidopsis thaliana]
  misc_feature (1)..(82): NCBI GI NO: 30684361 NR Description: expressed protein [Arabidopsis thaliana]
  misc_feature (1)..(80): NCBI GI NO: 18412687 NR Description: expressed protein; protein id: At1g80180
MMLRRGGDDKKQQQQKKEQQGQKKKDEERDPQVFRTKEVAPDVDPPSPRVSGCILCAIFGGSGSGSGPAARRGRAKPKRRQRSAA

SEQ ID NO: 16202 - DNA, 1180 bp, Triticum aestivum
  misc_feature (1)..(1180): Ceres Seq. ID no. 12780566
caggccgggcgttgcaacgaacaaacaaacgctgctttcagaagaagggttcttccttctccactccttgtattccgtcacacgagtccgacggcgacgacgacttgagggagaaggcgaagaggaaggaaggcggactcgagaggttcgacggggattttggtgttcgtccggcggattcccagcgatcggccgatcctcgccggcggatggggcaggcgttccgcaaactgttcgatgccttcttcggcaacagcgagatgagggtcgtgatgcttgggctggatgccgcgggcaagaccaccatcctgtacaagctgcacatcggggaggtcctctcgactgtccctacgattgggttcaatgttgagaaagttcagtacaagaacgtgctgtttacagtgtgggatgttggtggccaggagaagttgaggcccttgtggagacattactttaataacacagatggcttgatctacgtggttgattcattggatagggagagaattggaaaagccaaagcagagtttcagacaataatcaacgatcctttcatgcttaacagtgtcatattggtatttgccaataaacaagatatgaaaggggcgatgacaccaatggaggtgtgcgaaggccttggcctctatgatttgaagaaccgcgtctggcacatccaagtatgagggcttggactggctgtcaagtactctgcaggatctgcaagcgttcggtcgcctaccctcaggagggacctaacagttctaagtagcacttctgcttataagatcctaatgctcatactaacaacctttggatgaaagatgacactcagagagaaagaaaaagatagtggtgagaaacacatccaggttttgcgataagctttggtgttgattctgctgaagaaaagactttgcttgggtctgaccacatcaaatttaccagtacaatcttgtcatggatagtgtggattctctaattcgtgacatatttcatgtaaaatttcctgtgagtttagaggagctaaccatcttatgcttttgttcacatatgaggagtggaacataatgttattgatgtaaattttctgtaagataattttggcacatacgatccgtatctagacaaaagaattttgggacggagggagtacaatttatgtctcccttgcccccccccc

SEQ ID NO: 16203 - protein, 226 aa, Triticum aestivum
  peptide (1)..(226): Ceres Seq. ID no. 12780567
  misc_feature (73)..(225): Pfam Name: Pfam Description:  ADP-ribosylation factor family
  misc_feature (70)..(225): NCBI GI NO: 37537196 NR Description: putative ADP-ribosylation factor
  misc_feature (70)..(225): NCBI GI NO: 15237901 NR Description: ADP-ribosylation factor -like protein
  misc_feature (70)..(225): NCBI GI NO: 15228464 NR Description: putative ADP-ribosylation factor
  misc_feature (70)..(225): NCBI GI NO: 34897926 NR Description: Similar to Drosophila melanogaster ADP-ribosylationfactor 1
  misc_feature (70)..(225): NCBI GI NO: 461532 NR Description: ADP-RIBOSYLATION FACTOR
  misc_feature (70)..(225): NCBI GI NO: 3182915 NR Description: ADP-RIBOSYLATION FACTOR
  misc_feature (70)..(225): NCBI GI NO: 17136866 NR Description: ADP ribosylation factor 79F CG8385-PB
  misc_feature (15)..(225): NCBI GI NO: 34909214 NR Description: putative ADP-ribosylation factor
  misc_feature (70)..(225): NCBI GI NO: 39584902 NR Description: Hypothetical protein CBG09004
  misc_feature (70)..(225): NCBI GI NO: 17551730 NR Description: ADP-Ribosylation Factor related ARF-1 (20
GRALQRTNKRCFQKKGSSFSTPCIPSHESDGDDDLREKAKRKEGGLERFDGDFGVRPADSQRSADPRRRMGQAFRKLFDAFFGNSEMRVVMLGLDAAGKTTILYKLHIGEVLSTVPTIGFNVEKVQYKNVLFTVWDVGGQEKLRPLWRHYFNNTDGLIYVVDSLDRERIGKAKAEFQTIINDPFMLNSVILVFANKQDMKGAMTPMEVCEGLGLYDLKNRVWHIQV

SEQ ID NO: 16204 - protein, 157 aa, Triticum aestivum
  peptide (1)..(157): Ceres Seq. ID no. 12780568
  misc_feature (4)..(156): Pfam Name: Pfam Description:  ADP-ribosylation factor family
  misc_feature (1)..(156): NCBI GI NO: 37537196 NR Description: putative ADP-ribosylation factor
  misc_feature (1)..(156): NCBI GI NO: 15237901 NR Description: ADP-ribosylation factor -like protein
  misc_feature (1)..(156): NCBI GI NO: 15228464 NR Description: putative ADP-ribosylation factor
  misc_feature (1)..(156): NCBI GI NO: 34897926 NR Description: Similar to Drosophila melanogaster ADP-ribosylationfactor 1
  misc_feature (1)..(156): NCBI GI NO: 461532 NR Description: ADP-RIBOSYLATION FACTOR
  misc_feature (1)..(156): NCBI GI NO: 3182915 NR Description: ADP-RIBOSYLATION FACTOR
  misc_feature (1)..(156): NCBI GI NO: 17136866 NR Description: ADP ribosylation factor 79F CG8385-PB
  misc_feature (1)..(156): NCBI GI NO: 34909214 NR Description: putative ADP-ribosylation factor
  misc_feature (1)..(156): NCBI GI NO: 39584902 NR Description: Hypothetical protein CBG09004
  misc_feature (1)..(156): NCBI GI NO: 17551730 NR Description: ADP-Ribosylation Factor related ARF-1 (20
MGQAFRKLFDAFFGNSEMRVVMLGLDAAGKTTILYKLHIGEVLSTVPTIGFNVEKVQYKNVLFTVWDVGGQEKLRPLWRHYFNNTDGLIYVVDSLDRERIGKAKAEFQTIINDPFMLNSVILVFANKQDMKGAMTPMEVCEGLGLYDLKNRVWHIQV

SEQ ID NO: 16205 - protein, 140 aa, Triticum aestivum
  peptide (1)..(140): Ceres Seq. ID no. 12780569
  misc_feature (1)..(139): Pfam Name: Pfam Description:  ADP-ribosylation factor family
  misc_feature (1)..(139): NCBI GI NO: 37537196 NR Description: putative ADP-ribosylation factor
  misc_feature (1)..(139): NCBI GI NO: 15237901 NR Description: ADP-ribosylation factor -like protein
  misc_feature (1)..(139): NCBI GI NO: 15228464 NR Description: putative ADP-ribosylation factor
  misc_feature (1)..(139): NCBI GI NO: 34897926 NR Description: Similar to Drosophila melanogaster ADP-ribosylationfactor 1
  misc_feature (1)..(139): NCBI GI NO: 461532 NR Description: ADP-RIBOSYLATION FACTOR
  misc_feature (1)..(139): NCBI GI NO: 3182915 NR Description: ADP-RIBOSYLATION FACTOR
  misc_feature (1)..(139): NCBI GI NO: 17136866 NR Description: ADP ribosylation factor 79F CG8385-PB
  misc_feature (1)..(139): NCBI GI NO: 34909214 NR Description: putative ADP-ribosylation factor
  misc_feature (1)..(139): NCBI GI NO: 39584902 NR Description: Hypothetical protein CBG09004
  misc_feature (1)..(139): NCBI GI NO: 17551730 NR Description: ADP-Ribosylation Factor related ARF-1 (20
MRVVMLGLDAAGKTTILYKLHIGEVLSTVPTIGFNVEKVQYKNVLFTVWDVGGQEKLRPLWRHYFNNTDGLIYVVDSLDRERIGKAKAEFQTIINDPFMLNSVILVFANKQDMKGAMTPMEVCEGLGLYDLKNRVWHIQV

SEQ ID NO: 16206 - DNA, 1766 bp, Triticum aestivum
  misc_feature (1)..(1766): Ceres Seq. ID no. 14308027
cacaactcacaacttgcaaacacacgaagcgaaattccttagctccgacccagagtcgccagggagagcgcaaatggaggacaccttcatcacggtctgcctcgccgtagctctcgtttcgctgctcatcatgattgcgggccgccggcgctggggggcgcgtggcgacggcctgcgtatggcgcctgggccgtggcagctgccggtgatcggcagcctgcaccacctcgtcctggccgggcagctccctcaccgcgcgatgcgcgacctggcgcgacgctacgggccggccgtgctgctccagctcggccaggtgaagacgctggtggtgtcctctcgggagggggcgcgcgaggtgatgaagaaccacgacaccatgttcgccacgcggccgctgagcaccaccatgcgcgtgctctcctacggcggccaggacatcgtcttcgcgccctacggagaatactggcgccagctccgcaagatcgccgtgtccgagctcttcaccgcgcgccgcgtcctctccttccgcgccatccgcgaggaggaggtcgccacggcgctccgcgtcgtcggcgaggctgcggcggcggcgcgccccgtggagatgcgcgcggtgctatccacgctcgtgacggacagcacggcgcgcgccgtcataggcgaccggtgcagggagcgcgacgcgttcctccgggagctcgaccgcatcgtgcagctcgcgtcggggttcaacctggccgacatgtggccgtcgtcgcagcttgcggcgtggctcagtggagccgaggagtgccgccacaccctgtacaccatgctcgacggcatcgttgaggagcacctggagaggacggacggcggcggaggccacgccgaggacttgctcgacgtgctgctcaagatccagaaggagggtggtctcaagtttcccatccacatggacgccgtcaaagccatcatcttggacgtattctctgccggcagtgaaacaacaactacgacaattgagtgggccatatcagagctgatcaacaacccgatggccatgcagaaggcgacagatgaggtgcgacaagccttccatgctagtggaaccgtgtccgagcacgccctaagcgagctcccatacctgcgcttggtcatccgagagacgctgcggctacacccgcccctgccgttgttgttccgcgagtgccaggaaccgtgccaagtgcagggatacgacgtgcagcggggcacgcaggtgttggtcaatgcttgggcgctaggccgcgacgagcgctattggcccgacgcgcctgaggagttccggccggaacggttcgaggaagaagcagcaaaggcagactttgggggtggtgactttgcgttcttgccgtttggcgccggccgcaggatgtgccctgggatggcgtttggcctcgccggcgtcgagctcccgcttgcaagcatgctcttccactttgactggaagccaccagggccaggctcggcggagctcgacatgacagagacgttcggcctcaccgcacggcggacagaccagctcctgttgcgccctgtccttcgcgtacctattcccggagtctagtcaatatataaactataagaaatggaggtataatgtaaaactatacttgtacccacatagaaaataaattgcaaagttctacgactgttgcataacatcattagtattgtgcaataactagcgtagtggggctagatcaatatgtggttcctgaatatattgtaaacctatttgaaat

SEQ ID NO: 16207 - protein, 528 aa, Triticum aestivum
  peptide (1)..(528): Ceres Seq. ID no. 14308028
  misc_feature (62)..(359): Pfam Name: Pfam Description:  Cytochrome P450
  misc_feature (25)..(524): NCBI GI NO: 34897000 NR Description: putative cytochrome P450
  misc_feature (30)..(527): NCBI GI NO: 34896754 NR Description: putative cytochrome P450
  misc_feature (34)..(525): NCBI GI NO: 34914838 NR Description: putative cytochrome P450
  misc_feature (34)..(359): NCBI GI NO: 37531530 NR Description: putative cytochrome P450
  misc_feature (321)..(521): NCBI GI NO: 37531530 NR Description: putative cytochrome P450
  misc_feature (23)..(288): NCBI GI NO: 34905742 NR Description: putative cytochrome P450
  misc_feature (273)..(518): NCBI GI NO: 34905742 NR Description: putative cytochrome P450
  misc_feature (29)..(517): NCBI GI NO: 12331298 NR Description: cytochrome P450 [Solanum tuberosum]
  misc_feature (25)..(523): NCBI GI NO: 38345354 NR Description: OSJNBa0032I19.6
  misc_feature (39)..(517): NCBI GI NO: 5915836 NR Description: Cytochrome P450 71D7
TTHNLQTHEAKFLSSDPESPGRAQMEDTFITVCLAVALVSLLIMIAGRRRWGARGDGLRMAPGPWQLPVIGSLHHLVLAGQLPHRAMRDLARRYGPAVLLQLGQVKTLVVSSREGAREVMKNHDTMFATRPLSTTMRVLSYGGQDIVFAPYGEYWRQLRKIAVSELFTARRVLSFRAIREEEVATALRVVGEAAAAARPVEMRAVLSTLVTDSTARAVIGDRCRERDAFLRELDRIVQLASGFNLADMWPSSQLAAWLSGAEECRHTLYTMLDGIVEEHLERTDGGGGHAEDLLDVLLKIQKEGGLKFPIHMDAVKAIILDVFSAGSETTTTTIEWAISELINNPMAMQKATDEVRQAFHASGTVSEHALSELPYLRLVIRETLRLHPPLPLLFRECQEPCQVQGYDVQRGTQVLVNAWALGRDERYWPDAPEEFRPERFEEEAAKADFGGGDFAFLPFGAGRRMCPGMAFGLAGVELPLASMLFHFDWKPPGPGSAELDMTETFGLTARRTDQLLLRPVLRVPIPGV

SEQ ID NO: 16208 - protein, 504 aa, Triticum aestivum
  peptide (1)..(504): Ceres Seq. ID no. 14308029
  misc_feature (38)..(335): Pfam Name: Pfam Description:  Cytochrome P450
  misc_feature (1)..(500): NCBI GI NO: 34897000 NR Description: putative cytochrome P450
  misc_feature (6)..(503): NCBI GI NO: 34896754 NR Description: putative cytochrome P450
  misc_feature (10)..(501): NCBI GI NO: 34914838 NR Description: putative cytochrome P450
  misc_feature (10)..(335): NCBI GI NO: 37531530 NR Description: putative cytochrome P450
  misc_feature (297)..(497): NCBI GI NO: 37531530 NR Description: putative cytochrome P450
  misc_feature (1)..(264): NCBI GI NO: 34905742 NR Description: putative cytochrome P450
  misc_feature (249)..(494): NCBI GI NO: 34905742 NR Description: putative cytochrome P450
  misc_feature (5)..(493): NCBI GI NO: 12331298 NR Description: cytochrome P450 [Solanum tuberosum]
  misc_feature (1)..(499): NCBI GI NO: 38345354 NR Description: OSJNBa0032I19.6
  misc_feature (15)..(493): NCBI GI NO: 5915836 NR Description: Cytochrome P450 71D7
MEDTFITVCLAVALVSLLIMIAGRRRWGARGDGLRMAPGPWQLPVIGSLHHLVLAGQLPHRAMRDLARRYGPAVLLQLGQVKTLVVSSREGAREVMKNHDTMFATRPLSTTMRVLSYGGQDIVFAPYGEYWRQLRKIAVSELFTARRVLSFRAIREEEVATALRVVGEAAAAARPVEMRAVLSTLVTDSTARAVIGDRCRERDAFLRELDRIVQLASGFNLADMWPSSQLAAWLSGAEECRHTLYTMLDGIVEEHLERTDGGGGHAEDLLDVLLKIQKEGGLKFPIHMDAVKAIILDVFSAGSETTTTTIEWAISELINNPMAMQKATDEVRQAFHASGTVSEHALSELPYLRLVIRETLRLHPPLPLLFRECQEPCQVQGYDVQRGTQVLVNAWALGRDERYWPDAPEEFRPERFEEEAAKADFGGGDFAFLPFGAGRRMCPGMAFGLAGVELPLASMLFHFDWKPPGPGSAELDMTETFGLTARRTDQLLLRPVLRVPIPGV

SEQ ID NO: 16209 - protein, 485 aa, Triticum aestivum
  peptide (1)..(485): Ceres Seq. ID no. 14308030
  misc_feature (19)..(316): Pfam Name: Pfam Description:  Cytochrome P450
  misc_feature (1)..(481): NCBI GI NO: 34897000 NR Description: putative cytochrome P450
  misc_feature (1)..(484): NCBI GI NO: 34896754 NR Description: putative cytochrome P450
  misc_feature (1)..(482): NCBI GI NO: 34914838 NR Description: putative cytochrome P450
  misc_feature (1)..(316): NCBI GI NO: 37531530 NR Description: putative cytochrome P450
  misc_feature (278)..(478): NCBI GI NO: 37531530 NR Description: putative cytochrome P450
  misc_feature (1)..(245): NCBI GI NO: 34905742 NR Description: putative cytochrome P450
  misc_feature (230)..(475): NCBI GI NO: 34905742 NR Description: putative cytochrome P450
  misc_feature (1)..(474): NCBI GI NO: 12331298 NR Description: cytochrome P450 [Solanum tuberosum]
  misc_feature (1)..(480): NCBI GI NO: 38345354 NR Description: OSJNBa0032I19.6
  misc_feature (1)..(474): NCBI GI NO: 5915836 NR Description: Cytochrome P450 71D7
MIAGRRRWGARGDGLRMAPGPWQLPVIGSLHHLVLAGQLPHRAMRDLARRYGPAVLLQLGQVKTLVVSSREGAREVMKNHDTMFATRPLSTTMRVLSYGGQDIVFAPYGEYWRQLRKIAVSELFTARRVLSFRAIREEEVATALRVVGEAAAAARPVEMRAVLSTLVTDSTARAVIGDRCRERDAFLRELDRIVQLASGFNLADMWPSSQLAAWLSGAEECRHTLYTMLDGIVEEHLERTDGGGGHAEDLLDVLLKIQKEGGLKFPIHMDAVKAIILDVFSAGSETTTTTIEWAISELINNPMAMQKATDEVRQAFHASGTVSEHALSELPYLRLVIRETLRLHPPLPLLFRECQEPCQVQGYDVQRGTQVLVNAWALGRDERYWPDAPEEFRPERFEEEAAKADFGGGDFAFLPFGAGRRMCPGMAFGLAGVELPLASMLFHFDWKPPGPGSAELDMTETFGLTARRTDQLLLRPVLRVPIPGV

SEQ ID NO: 16210 - DNA, 1434 bp, Triticum aestivum
  misc_feature (1)..(1434): Ceres Seq. ID no. 14302355
gaaccttccagaccgctcccgcgccccctcccctatttatcccctcaccccctcccccattcaccaccatctccacaccacacctcactcgcccacaatctcgaacaacggccgtcggatccatcatcatcggcagcggagcgattccatcgaccagctttctacagacggacatggggatgccggccgtgaggaggagggagagggacgcggaggcggagctcaacctgccccccggcttccgcttccaccccaccgacgacgagctcgtcgagcactacctctgccgcaaggcggcggggcagcgcctcccggtccccatcatcgtcgaggtcgacctctaccgcttcgacccctgggcgctccctgaccgcgccctcttcggcacccgcgagtggtacttcttcaccccccgcgaccgcaagtaccccaacggctcccgacccaaccgcgccgccggcaacggctactggaaggccaccggcgccgacaagcccgtcgcgccccgcggcgggcggaccatggggatcaagaaggccctcgtgttttacgcgggcaaggcgcctaagggggtcaagaccgactggatcatgcatgagtatcgcctcgccgacgccggccgcgccgccgccagcaagaagggctcgctcaggctggacgactgggtgctctgccggctctacaacaagaagaacgagtgggagaagatgcagctgcagcagcaaggggaagaggagacgatgatggagcccaaggcggagaacacggcctccgacatggtggtcacctcgcactcccactcgcagtcccagtcgcactcgcactcgtggggcgaggcgcgcacgccggagtcggagatcgtcgacaacgacccgtcgctgttccagcaggcgacggcggcggcgttccaggcccagagccccgcggccgccgcggcgcaccaggagatgatggccacgctgatggtgcccaagaaggaggcggcggacgaggccggcaggaacgacctcttcgtcgacctcagctacgacgacatccagagcatgtacaacggcctcgacatgatgccgcccggggacgacctgctctactcctccctcttcgcctccccccgtgtccgcgggagccagcccagcgccggcggcatgccggccccgttctaagcagagcaaagacagagaccgtcagagaccccgagatcgacagaagtggaatggacgacttcttggccgcgagcgagcgagaccgcggtgcagtgtaaatacagcataggaaacgggagggagggaggtggcgtcgtgtcgagagaagccggcgtcgtgccggggcgtgccgttgtacatggagagcccggcgccggggcctggccggctgggttgattcttttgttcttactaccttgtactctcaatgcggatgtagctctttcttctc

SEQ ID NO: 16211 - protein, 386 aa, Triticum aestivum
  peptide (1)..(386): Ceres Seq. ID no. 14302356
  misc_feature (76)..(203): Pfam Name: NAM Pfam Description: No apical meristem
  misc_feature (58)..(386): NCBI GI NO: 40786563 NR Description: putative NAC-domain protein
  misc_feature (68)..(241): NCBI GI NO: 34909234 NR Description: development regulation gene OsNAC4
  misc_feature (60)..(290): NCBI GI NO: 34900404 NR Description: OsNAC3 protein
  misc_feature (58)..(257): NCBI GI NO: 4218535 NR Description: GRAB1 protein [Triticum sp.]
  misc_feature (71)..(290): NCBI GI NO: 31322570 NR Description: NAC-domain protein 5-1 [Brassica napus]
  misc_feature (72)..(241): NCBI GI NO: 21105748 NR Description: nam-like protein 10 [Petunia x hybrida]
  misc_feature (71)..(291): NCBI GI NO: 22326685 NR Description: No apical meristem (NAM) protein family
  misc_feature (71)..(291): NCBI GI NO: 31322568 NR Description: NAC-domain protein 3 [Brassica napus]
  misc_feature (71)..(291): NCBI GI NO: 31322572 NR Description: NAC-domain protein 5-7 [Brassica napus]
  misc_feature (71)..(291): NCBI GI NO: 31322574 NR Description: NAC-domain protein 5-8 [Brassica napus]
TFQTAPAPPPLFIPSPPPPFTTISTPHLTRPQSRTTAVGSIIIGSGAIPSTSFLQTDMGMPAVRRRERDAEAELNLPPGFRFHPTDDELVEHYLCRKAAGQRLPVPIIVEVDLYRFDPWALPDRALFGTREWYFFTPRDRKYPNGSRPNRAAGNGYWKATGADKPVAPRGGRTMGIKKALVFYAGKAPKGVKTDWIMHEYRLADAGRAAASKKGSLRLDDWVLCRLYNKKNEWEKMQLQQQGEEETMMEPKAENTASDMVVTSHSHSQSQSHSHSWGEARTPESEIVDNDPSLFQQATAAAFQAQSPAAAAAHQEMMATLMVPKKEAADEAGRNDLFVDLSYDDIQSMYNGLDMMPPGDDLLYSSLFASPRVRGSQPSAGGMPAPF

SEQ ID NO: 16212 - protein, 329 aa, Triticum aestivum
  peptide (1)..(329): Ceres Seq. ID no. 14302357
  misc_feature (19)..(146): Pfam Name: NAM Pfam Description: No apical meristem
  misc_feature (1)..(329): NCBI GI NO: 40786563 NR Description: putative NAC-domain protein
  misc_feature (11)..(184): NCBI GI NO: 34909234 NR Description: development regulation gene OsNAC4
  misc_feature (3)..(233): NCBI GI NO: 34900404 NR Description: OsNAC3 protein
  misc_feature (1)..(200): NCBI GI NO: 4218535 NR Description: GRAB1 protein [Triticum sp.]
  misc_feature (14)..(233): NCBI GI NO: 31322570 NR Description: NAC-domain protein 5-1 [Brassica napus]
  misc_feature (15)..(184): NCBI GI NO: 21105748 NR Description: nam-like protein 10 [Petunia x hybrida]
  misc_feature (14)..(234): NCBI GI NO: 22326685 NR Description: No apical meristem (NAM) protein family
  misc_feature (14)..(234): NCBI GI NO: 31322568 NR Description: NAC-domain protein 3 [Brassica napus]
  misc_feature (14)..(234): NCBI GI NO: 31322572 NR Description: NAC-domain protein 5-7 [Brassica napus]
  misc_feature (14)..(234): NCBI GI NO: 31322574 NR Description: NAC-domain protein 5-8 [Brassica napus]
MGMPAVRRRERDAEAELNLPPGFRFHPTDDELVEHYLCRKAAGQRLPVPIIVEVDLYRFDPWALPDRALFGTREWYFFTPRDRKYPNGSRPNRAAGNGYWKATGADKPVAPRGGRTMGIKKALVFYAGKAPKGVKTDWIMHEYRLADAGRAAASKKGSLRLDDWVLCRLYNKKNEWEKMQLQQQGEEETMMEPKAENTASDMVVTSHSHSQSQSHSHSWGEARTPESEIVDNDPSLFQQATAAAFQAQSPAAAAAHQEMMATLMVPKKEAADEAGRNDLFVDLSYDDIQSMYNGLDMMPPGDDLLYSSLFASPRVRGSQPSAGGMPAPF

SEQ ID NO: 16213 - protein, 327 aa, Triticum aestivum
  peptide (1)..(327): Ceres Seq. ID no. 14302358
  misc_feature (17)..(144): Pfam Name: NAM Pfam Description: No apical meristem
  misc_feature (1)..(327): NCBI GI NO: 40786563 NR Description: putative NAC-domain protein
  misc_feature (9)..(182): NCBI GI NO: 34909234 NR Description: development regulation gene OsNAC4
  misc_feature (1)..(231): NCBI GI NO: 34900404 NR Description: OsNAC3 protein
  misc_feature (1)..(198): NCBI GI NO: 4218535 NR Description: GRAB1 protein [Triticum sp.]
  misc_feature (12)..(231): NCBI GI NO: 31322570 NR Description: NAC-domain protein 5-1 [Brassica napus]
  misc_feature (13)..(182): NCBI GI NO: 21105748 NR Description: nam-like protein 10 [Petunia x hybrida]
  misc_feature (12)..(232): NCBI GI NO: 22326685 NR Description: No apical meristem (NAM) protein family
  misc_feature (12)..(232): NCBI GI NO: 31322568 NR Description: NAC-domain protein 3 [Brassica napus]
  misc_feature (12)..(232): NCBI GI NO: 31322572 NR Description: NAC-domain protein 5-7 [Brassica napus]
  misc_feature (12)..(232): NCBI GI NO: 31322574 NR Description: NAC-domain protein 5-8 [Brassica napus]
MPAVRRRERDAEAELNLPPGFRFHPTDDELVEHYLCRKAAGQRLPVPIIVEVDLYRFDPWALPDRALFGTREWYFFTPRDRKYPNGSRPNRAAGNGYWKATGADKPVAPRGGRTMGIKKALVFYAGKAPKGVKTDWIMHEYRLADAGRAAASKKGSLRLDDWVLCRLYNKKNEWEKMQLQQQGEEETMMEPKAENTASDMVVTSHSHSQSQSHSHSWGEARTPESEIVDNDPSLFQQATAAAFQAQSPAAAAAHQEMMATLMVPKKEAADEAGRNDLFVDLSYDDIQSMYNGLDMMPPGDDLLYSSLFASPRVRGSQPSAGGMPAPF

SEQ ID NO: 16214 - DNA, 1292 bp, Triticum aestivum
  misc_feature (1)..(1292): Ceres Seq. ID no. 13656671
ctcgcgggtccggtccacaatttttttcctcgcataaatcatcctccgtcaccggcggggcgagggagacgcggtcggcgggcgagacgccagagacaaacccaacggagtttcccccccctgccgccgaccccaaaccctagccgctcctaccagccccagcctctcctaccgaccccagccagccgcgccggaattctcctgggtgttctattggcttttctcaagcctgtagcttcatcgcggcagcatgagctctgctggttctgcaagggttccaaagaggagacggactaccaagacgtcggaggctgcagaccggcaacttcaggagcgacagtttctggacctaaacttgtttccagctgttgaagtagccagcactgggggttcactctccatcaatgagcctgtctcacacaggcagccccctcctacggtggctgccctgctttacgagaccacacaggtcatggtgtcatctgctgctgcagagtcaaacattggcatgaatagtttccccatcaacgtggaagtgattgatgatgatgttgtgatttatacctcagggccgccccctcaagctaggcaacagtcgtccaggacaggacctatcactgtgataatagatgatgattctgaaactactgctggaccagcaggggaaggtcttgatgagcatgtgaacactctgctgtctctggggatgaaccctaggcacaatccctcgagagcacaacccaacaccgaccttgtaataaacatagtagacacacctgaaaccaacagcataccgcccaaggtggcgcaggctgtccctgaacctgtgaaggagatcccaaaggaaacaaagttcagctgcccagtctgcatgaatgagctggtcaatgcatcatcgaccatctgcggccacatcttctgccagaaatgcatcaaggcctccattcaggctcagaagaagtgccctacctgccggaggaagctgaccatgagcaacttccaccgggtctacctcccgacggcagataattaaacctatccgcaatacttggagctttagagccgtggcagctgtgacccttttttggcactggcattgtggtgattgtatctgagctattcttcacagggtcatcatgaacattcagttttccccccaacaatttaacaagtgctcgagacgtgattaccaatctgcatacctggtggtagtggacactgttagtagtcttccttgtgggaaagtggaaacctgtgcttggtactgtgagattaatgcttgaaaatatttg

SEQ ID NO: 16215 - protein, 260 aa, Triticum aestivum
  peptide (1)..(260): Ceres Seq. ID no. 13656672
  misc_feature (208)..(241): Pfam Name: RING finger Pfam Description: Zinc finger, C3HC4 type
  misc_feature (208)..(259): NCBI GI NO: 19386727 NR Description: P0678F11.16
  misc_feature (173)..(257): NCBI GI NO: 15231414 NR Description: RING zinc finger protein -related
  misc_feature (173)..(257): NCBI GI NO: 26451887 NR Description: putative RING finger protein
  misc_feature (92)..(257): NCBI GI NO: 21537318 NR Description: unknown [Arabidopsis thaliana]
  misc_feature (92)..(257): NCBI GI NO: 18422940 NR Description: zinc finger
  misc_feature (92)..(257): NCBI GI NO: 21954077 NR Description: unknown protein [Arabidopsis thaliana]
  misc_feature (95)..(255): NCBI GI NO: 24644441 NR Description: CG10981-PB [Drosophila melanogaster]
  misc_feature (95)..(255): NCBI GI NO: 21357313 NR Description: CG10981-PA [Drosophila melanogaster]
  misc_feature (155)..(255): NCBI GI NO: 33859620 NR Description: ring finger protein 4 [Mus musculus]
  misc_feature (203)..(255): NCBI GI NO: 4506561 NR Description: ring finger protein 4 [Homo sapiens]
MSSAGSARVPKRRRTTKTSEAADRQLQERQFLDLNLFPAVEVASTGGSLSINEPVSHRQPPPTVAALLYETTQVMVSSAAAESNIGMNSFPINVEVIDDDVVIYTSGPPPQARQQSSRTGPITVIIDDDSETTAGPAGEGLDEHVNTLLSLGMNPRHNPSRAQPNTDLVINIVDTPETNSIPPKVAQAVPEPVKEIPKETKFSCPVCMNELVNASSTICGHIFCQKCIKASIQAQKKCPTCRRKLTMSNFHRVYLPTADN

SEQ ID NO: 16216 - protein, 186 aa, Triticum aestivum
  peptide (1)..(186): Ceres Seq. ID no. 13656673
  misc_feature (134)..(167): Pfam Name: RING finger Pfam Description: Zinc finger, C3HC4 type
  misc_feature (134)..(185): NCBI GI NO: 19386727 NR Description: P0678F11.16
  misc_feature (99)..(183): NCBI GI NO: 15231414 NR Description: RING zinc finger protein -related
  misc_feature (99)..(183): NCBI GI NO: 26451887 NR Description: putative RING finger protein
  misc_feature (18)..(183): NCBI GI NO: 21537318 NR Description: unknown [Arabidopsis thaliana]
  misc_feature (18)..(183): NCBI GI NO: 18422940 NR Description: zinc finger
  misc_feature (18)..(183): NCBI GI NO: 21954077 NR Description: unknown protein [Arabidopsis thaliana]
  misc_feature (21)..(181): NCBI GI NO: 24644441 NR Description: CG10981-PB [Drosophila melanogaster]
  misc_feature (21)..(181): NCBI GI NO: 21357313 NR Description: CG10981-PA [Drosophila melanogaster]
  misc_feature (81)..(181): NCBI GI NO: 33859620 NR Description: ring finger protein 4 [Mus musculus]
  misc_feature (129)..(181): NCBI GI NO: 4506561 NR Description: ring finger protein 4 [Homo sapiens]
MVSSAAAESNIGMNSFPINVEVIDDDVVIYTSGPPPQARQQSSRTGPITVIIDDDSETTAGPAGEGLDEHVNTLLSLGMNPRHNPSRAQPNTDLVINIVDTPETNSIPPKVAQAVPEPVKEIPKETKFSCPVCMNELVNASSTICGHIFCQKCIKASIQAQKKCPTCRRKLTMSNFHRVYLPTADN

SEQ ID NO: 16217 - protein, 174 aa, Triticum aestivum
  peptide (1)..(174): Ceres Seq. ID no. 13656674
  misc_feature (122)..(155): Pfam Name: RING finger Pfam Description: Zinc finger, C3HC4 type
  misc_feature (122)..(173): NCBI GI NO: 19386727 NR Description: P0678F11.16
  misc_feature (87)..(171): NCBI GI NO: 15231414 NR Description: RING zinc finger protein -related
  misc_feature (87)..(171): NCBI GI NO: 26451887 NR Description: putative RING finger protein
  misc_feature (6)..(171): NCBI GI NO: 21537318 NR Description: unknown [Arabidopsis thaliana]
  misc_feature (6)..(171): NCBI GI NO: 18422940 NR Description: zinc finger
  misc_feature (6)..(171): NCBI GI NO: 21954077 NR Description: unknown protein [Arabidopsis thaliana]
  misc_feature (9)..(169): NCBI GI NO: 24644441 NR Description: CG10981-PB [Drosophila melanogaster]
  misc_feature (9)..(169): NCBI GI NO: 21357313 NR Description: CG10981-PA [Drosophila melanogaster]
  misc_feature (69)..(169): NCBI GI NO: 33859620 NR Description: ring finger protein 4 [Mus musculus]
  misc_feature (117)..(169): NCBI GI NO: 4506561 NR Description: ring finger protein 4 [Homo sapiens]
MNSFPINVEVIDDDVVIYTSGPPPQARQQSSRTGPITVIIDDDSETTAGPAGEGLDEHVNTLLSLGMNPRHNPSRAQPNTDLVINIVDTPETNSIPPKVAQAVPEPVKEIPKETKFSCPVCMNELVNASSTICGHIFCQKCIKASIQAQKKCPTCRRKLTMSNFHRVYLPTADN

SEQ ID NO: 16218 - DNA, 2057 bp, Triticum aestivum
  misc_feature (1)..(2057): Ceres Seq. ID no. 15176081
aaactccacatttccggaggaggcgagccaaaaggacacacagcagccacaacccaattcctatttttttcctggccgccgccgccgcagcttttgtttgatttatatagcccacacacggggcagcgccgagcagagctcctcctccatcctcctctgcatctccgccctcggccacaggaaacagcggcaggcaggaagacacgcacgcacgcacgcacccatggctgcggacagcaagctgcagagcccgctgctgccgccgccggccggtagcgagggcggcggcgacgacgaggggcacggggcggccagcaagcggctggagagcatcctgagtgacgagtcggtgccgtgggcgcggcggatgtgcgcggcgacggcggtggagatgcggatgctggtgcggctggcggcgccggccgtgctggtgtacatgatcaactacctcatgtccatgtccacgcagatcttctccggccacctcggcacgctggagctcgccgccgcctccctcggcaacaccggcatccaggtcttcgcctacggcctcatgcttggcatggggagtgcggtggagactctatgtgggcaggcgtacggcgcgaacaagttcgacatgctgggcatctacatgcaacgttccactgtcctgctcatggccaccggcatcccgctcgccgtcctctacgcgttctcccgccccatcctcatcctcctcggcgagtcccccgagatagccagcgccgcggccatctgcgtgtacggcctcatcccgcagatctttgcctacgccgccaacttccccatccagaagttcatgcaggcgcagagcatcatggcgcccagcgcctacatctcaacggccacgctcgccgtccacctcgtcctcagctacctcgtcgtctacaagtttgggctggggcttctgggcgcctcgctcatgctcagcatcagctggtggattatcgtcattgggcagtttgtatacatcgtcaccagcagccggtgccgcctcacttggactggattctccctccaggcgttctccggcttgcctgagtttttcaagctgtcccttgcctccgctatcatgctctgcctcgagacttggtacttccagatactggtgctcattgctggcctcctcaaggaccccgaaatggctctcgcatcgctctctgtctgcatgaccatttcaggatgggtgttcatgatctcagttggattcaatgcagcagctagcgtgagggtgagcaatgagcttggagccggcaaccccaagtcagcggcgttctcggtggtggtggtgacggtgctgtcgttcatcttggcggcgataatctcgatagtcatcctgttcttccgtgactacatcagttacatttacacggggggcgacgatgtggcagcggcggtgtccaagctgacgcctctcctggcgatcaccctcatcctcaacggcatccagccagtattatcaggggtggccgtggggtgtgggtggcaagcgttcgtcgcctacgtcaacgtcggctgctactacgtcgtcggcatccctcttggctgcctcctcggcttctacttcgaccttggtgcggcgggcatatggagcggcatgattggaggcacctttatgcagaccgtgatcctggtgtgggttaccgtgaggaccgactggaacaaagaggtggccgaagcgaggaaaagattgaacaagtgggaaggcaacaagatgcctctattagcaggccaagaatgaaacggtggatcctgtatatgatcaacagaaatgtggttcgttcgcaagttgatctccctaaaatgtgtaaagtgcatttgttcatcgtgcaattcaccattgaaattccgtacttccgttctgctattccggcttcgcaagcacggtagcagcggcgatcttgtcatgttactactagctagtataacgggattctatggcgatgatagattagtgtgggtggatgagatcactttttgtgtgagatatcaatattgttggacagcggtcaataaaagttcatcctttggtcttc

SEQ ID NO: 16219 - protein, 586 aa, Triticum aestivum
  peptide (1)..(586): Ceres Seq. ID no. 15176082
  misc_feature (140)..(300): Pfam Name: Pfam Description:  MatE
  misc_feature (108)..(582): NCBI GI NO: 15233127 NR Description: MATE efflux protein family [Arabidopsis thaliana]
  misc_feature (108)..(582): NCBI GI NO: 20466556 NR Description: integral membrane protein, putative
  misc_feature (104)..(582): NCBI GI NO: 15221073 NR Description: MATE efflux protein family [Arabidopsis thaliana]
  misc_feature (104)..(582): NCBI GI NO: 22655139 NR Description: unknown protein [Arabidopsis thaliana]
  misc_feature (107)..(582): NCBI GI NO: 18407368 NR Description: MATE efflux protein family [Arabidopsis thaliana]
  misc_feature (107)..(582): NCBI GI NO: 15081773 NR Description: At1g61890/F8K4_9 [Arabidopsis thaliana]
  misc_feature (81)..(581): NCBI GI NO: 18415793 NR Description: MATE efflux protein family [Arabidopsis thaliana]
  misc_feature (81)..(581): NCBI GI NO: 21553843 NR Description: unknown [Arabidopsis thaliana]
  misc_feature (123)..(532): NCBI GI NO: 34901880 NR Description: putative Multidrug resistance protein norM
  misc_feature (151)..(573): NCBI GI NO: 15234633 NR Description: MATE efflux protein family [Arabidopsis thaliana]
NSTFPEEASQKDTQQPQPNSYFFPGRRRRSFCLIYIAHTRGSAEQSSSSILLCISALGHRKQRQAGRHARTHAPMAADSKLQSPLLPPPAGSEGGGDDEGHGAASKRLESILSDESVPWARRMCAATAVEMRMLVRLAAPAVLVYMINYLMSMSTQIFSGHLGTLELAAASLGNTGIQVFAYGLMLGMGSAVETLCGQAYGANKFDMLGIYMQRSTVLLMATGIPLAVLYAFSRPILILLGESPEIASAAAICVYGLIPQIFAYAANFPIQKFMQAQSIMAPSAYISTATLAVHLVLSYLVVYKFGLGLLGASLMLSISWWIIVIGQFVYIVTSSRCRLTWTGFSLQAFSGLPEFFKLSLASAIMLCLETWYFQILVLIAGLLKDPEMALASLSVCMTISGWVFMISVGFNAAASVRVSNELGAGNPKSAAFSVVVVTVLSFILAAIISIVILFFRDYISYIYTGGDDVAAAVSKLTPLLAITLILNGIQPVLSGVAVGCGWQAFVAYVNVGCYYVVGIPLGCLLGFYFDLGAAGIWSGMIGGTFMQTVILVWVTVRTDWNKEVAEARKRLNKWEGNKMPLLAGQE

SEQ ID NO: 16220 - protein, 512 aa, Triticum aestivum
  peptide (1)..(512): Ceres Seq. ID no. 15176083
  misc_feature (66)..(226): Pfam Name: Pfam Description:  MatE
  misc_feature (34)..(508): NCBI GI NO: 15233127 NR Description: MATE efflux protein family [Arabidopsis thaliana]
  misc_feature (34)..(508): NCBI GI NO: 20466556 NR Description: integral membrane protein, putative
  misc_feature (30)..(508): NCBI GI NO: 15221073 NR Description: MATE efflux protein family [Arabidopsis thaliana]
  misc_feature (30)..(508): NCBI GI NO: 22655139 NR Description: unknown protein [Arabidopsis thaliana]
  misc_feature (33)..(508): NCBI GI NO: 18407368 NR Description: MATE efflux protein family [Arabidopsis thaliana]
  misc_feature (33)..(508): NCBI GI NO: 15081773 NR Description: At1g61890/F8K4_9 [Arabidopsis thaliana]
  misc_feature (7)..(507): NCBI GI NO: 18415793 NR Description: MATE efflux protein family [Arabidopsis thaliana]
  misc_feature (7)..(507): NCBI GI NO: 21553843 NR Description: unknown [Arabidopsis thaliana]
  misc_feature (49)..(458): NCBI GI NO: 34901880 NR Description: putative Multidrug resistance protein norM
  misc_feature (77)..(499): NCBI GI NO: 15234633 NR Description: MATE efflux protein family [Arabidopsis thaliana]
MAADSKLQSPLLPPPAGSEGGGDDEGHGAASKRLESILSDESVPWARRMCAATAVEMRMLVRLAAPAVLVYMINYLMSMSTQIFSGHLGTLELAAASLGNTGIQVFAYGLMLGMGSAVETLCGQAYGANKFDMLGIYMQRSTVLLMATGIPLAVLYAFSRPILILLGESPEIASAAAICVYGLIPQIFAYAANFPIQKFMQAQSIMAPSAYISTATLAVHLVLSYLVVYKFGLGLLGASLMLSISWWIIVIGQFVYIVTSSRCRLTWTGFSLQAFSGLPEFFKLSLASAIMLCLETWYFQILVLIAGLLKDPEMALASLSVCMTISGWVFMISVGFNAAASVRVSNELGAGNPKSAAFSVVVVTVLSFILAAIISIVILFFRDYISYIYTGGDDVAAAVSKLTPLLAITLILNGIQPVLSGVAVGCGWQAFVAYVNVGCYYVVGIPLGCLLGFYFDLGAAGIWSGMIGGTFMQTVILVWVTVRTDWNKEVAEARKRLNKWEGNKMPLLAGQE

SEQ ID NO: 16221 - protein, 464 aa, Triticum aestivum
  peptide (1)..(464): Ceres Seq. ID no. 15176084
  misc_feature (18)..(178): Pfam Name: Pfam Description:  MatE
  misc_feature (1)..(460): NCBI GI NO: 15233127 NR Description: MATE efflux protein family [Arabidopsis thaliana]
  misc_feature (1)..(460): NCBI GI NO: 20466556 NR Description: integral membrane protein, putative
  misc_feature (1)..(460): NCBI GI NO: 15221073 NR Description: MATE efflux protein family [Arabidopsis thaliana]
  misc_feature (1)..(460): NCBI GI NO: 22655139 NR Description: unknown protein [Arabidopsis thaliana]
  misc_feature (1)..(460): NCBI GI NO: 18407368 NR Description: MATE efflux protein family [Arabidopsis thaliana]
  misc_feature (1)..(460): NCBI GI NO: 15081773 NR Description: At1g61890/F8K4_9 [Arabidopsis thaliana]
  misc_feature (1)..(459): NCBI GI NO: 18415793 NR Description: MATE efflux protein family [Arabidopsis thaliana]
  misc_feature (1)..(459): NCBI GI NO: 21553843 NR Description: unknown [Arabidopsis thaliana]
  misc_feature (1)..(410): NCBI GI NO: 34901880 NR Description: putative Multidrug resistance protein norM
  misc_feature (29)..(451): NCBI GI NO: 15234633 NR Description: MATE efflux protein family [Arabidopsis thaliana]
MCAATAVEMRMLVRLAAPAVLVYMINYLMSMSTQIFSGHLGTLELAAASLGNTGIQVFAYGLMLGMGSAVETLCGQAYGANKFDMLGIYMQRSTVLLMATGIPLAVLYAFSRPILILLGESPEIASAAAICVYGLIPQIFAYAANFPIQKFMQAQSIMAPSAYISTATLAVHLVLSYLVVYKFGLGLLGASLMLSISWWIIVIGQFVYIVTSSRCRLTWTGFSLQAFSGLPEFFKLSLASAIMLCLETWYFQILVLIAGLLKDPEMALASLSVCMTISGWVFMISVGFNAAASVRVSNELGAGNPKSAAFSVVVVTVLSFILAAIISIVILFFRDYISYIYTGGDDVAAAVSKLTPLLAITLILNGIQPVLSGVAVGCGWQAFVAYVNVGCYYVVGIPLGCLLGFYFDLGAAGIWSGMIGGTFMQTVILVWVTVRTDWNKEVAEARKRLNKWEGNKMPLLAGQE

SEQ ID NO: 16222 - DNA, 1258 bp, Triticum aestivum
  misc_feature (1)..(1258): Ceres Seq. ID no. 13656983
aacctcgcaacgcaccagcgccaagtacatccattggccacccacccaccccacacacgacctccacccccactacactccactccgcgagtagctagctagcaagagagtcccagctgccactgctcctctcctagaggcactcaggcgagctactctgcctgcggcggcctgccggcgcgcggggagggggagttggccggccagtgggggcgcgtgaggacaatgcatggcatgtgttaacatgtacaacccggagcaccaccagtcgtccttcatggcgccgcggatgtccttctccagcgacttcgcgctggagccgccgcccgcgtcggcgccgtcggcgcgcgggcccggggacgccgacttcgagttctccgtcggcagccgccccatgatggccgccgacgagctcttctccaagggccgcctcctgccgctccgggaggccccgcacggccagagcggccggcccacgacgctgcgcgaggagctgcgcaccgacgaccgccacgggcgcgcgccccgcgcgcccaacatccggtggaaggagctgctcggcttcaagaaggcgaacaagaaggccgcggccgcagccgccgacgccggcgccagcacgtcgtcggccgaggccgcagccgccgacgccggcgccagcacgtcgtcggccgaggcccacacggatcttggaggtcacggaggcacgagagagtgaagcagcgagcgctcattcaccaaacgagacgggggcatggttaggcaactagtttgtgtgattgggtggtgatttgcctttcagcttcacgtccatcacctacccgcggtgaagatggatctgccaggaacccaacatccatcagcgcttcattggagaagcagcaagcaaattgaagctgtagctagctctggaggccatgcatgcatgaatgtgcatttcattttactgcctgctgcttgttaccctttttttgttattattattattatttcggtgtagtaaaagggaatttttgctcctgctttagctcttggtctggtcgtcgacgggtggttccattgcatcgcatgtagatgtagtagtagtggtcaaggtaactcctctctagtctctagtctctagtctctagtctaggtgtggctctgaatgttttgtatcggaggaaggggccagttaaatgcagtagcagtatttacaaaaaaaaaaaaaaaaaagcttatcgataccgtcgacctccgagggggggggcccgggtaccca

SEQ ID NO: 16223 - protein, 161 aa, Triticum aestivum
  peptide (1)..(161): Ceres Seq. ID no. 15219857
  misc_feature (1)..(104): NCBI GI NO: 15240098 NR Description: expressed protein [Arabidopsis thaliana]
  misc_feature (1)..(104): NCBI GI NO: 21536542 NR Description: unknown [Arabidopsis thaliana]
  misc_feature (1)..(118): NCBI GI NO: 22329158 NR Description: hypothetical protein [Arabidopsis thaliana]
MACVNMYNPEHHQSSFMAPRMSFSSDFALEPPPASAPSARGPGDADFEFSVGSRPMMAADELFSKGRLLPLREAPHGQSGRPTTLREELRTDDRHGRAPRAPNIRWKELLGFKKANKKAAAAAADAGASTSSAEAAAADAGASTSSAEAHTDLGGHGGTRE

SEQ ID NO: 16224 - protein, 156 aa, Triticum aestivum
  peptide (1)..(156): Ceres Seq. ID no. 15219858
  misc_feature (1)..(99): NCBI GI NO: 15240098 NR Description: expressed protein [Arabidopsis thaliana]
  misc_feature (1)..(99): NCBI GI NO: 21536542 NR Description: unknown [Arabidopsis thaliana]
  misc_feature (1)..(113): NCBI GI NO: 22329158 NR Description: hypothetical protein [Arabidopsis thaliana]
MYNPEHHQSSFMAPRMSFSSDFALEPPPASAPSARGPGDADFEFSVGSRPMMAADELFSKGRLLPLREAPHGQSGRPTTLREELRTDDRHGRAPRAPNIRWKELLGFKKANKKAAAAAADAGASTSSAEAAAADAGASTSSAEAHTDLGGHGGTRE

SEQ ID NO: 16225 - protein, 145 aa, Triticum aestivum
  peptide (1)..(145): Ceres Seq. ID no. 15219859
  misc_feature (1)..(88): NCBI GI NO: 15240098 NR Description: expressed protein [Arabidopsis thaliana]
  misc_feature (1)..(88): NCBI GI NO: 21536542 NR Description: unknown [Arabidopsis thaliana]
  misc_feature (1)..(102): NCBI GI NO: 22329158 NR Description: hypothetical protein [Arabidopsis thaliana]
MAPRMSFSSDFALEPPPASAPSARGPGDADFEFSVGSRPMMAADELFSKGRLLPLREAPHGQSGRPTTLREELRTDDRHGRAPRAPNIRWKELLGFKKANKKAAAAAADAGASTSSAEAAAADAGASTSSAEAHTDLGGHGGTRE

SEQ ID NO: 16226 - DNA, 633 bp, Triticum aestivum
  misc_feature (1)..(633): Ceres Seq. ID no. 12618740
  misc_feature (512)..(512): n is a, c, t, g, unknown, or other
cctcattcctcagccaccacaccgatctagggtttcctgctagggttttagtccttcgtttccagcggcggctacggcagcggtggcggcagctacggcggcggtggcggctatggaggtggtggcggcggcggccgctacggaggaggcggcggcggcggccgtgagtgctacaagtgcggcgaggagggccacatctccagggactgcccccagggcggcggcggcggtggcggtggctacggaggtggtggcggccgtggcggtggtggtggcggtggcggctgcttctcctgcggcgagtccggccacttctcgcgcgagtgccccaacaagaccaactagacggctttgcccgtcagatctgagtgccccgttccccttcgctccttttcctaccgcctgactctgcagcaagtcatacctatacctatcagtattagtatatgtcgccgtagtgttccccgtgcttctcgtaggaagaagaatcgacgatgcgagcttggttccanaagtattgttggtggcgtgttgttcgtttgaagttatcttgtgtcgtctgatggggacagaccttatatctttatgtattggattgaatggactaagttatgcaagtcaagttatgctgcc

SEQ ID NO: 16227 - protein, 97 aa, Triticum aestivum
  peptide (1)..(97): Ceres Seq. ID no. 12618741
  misc_feature (1)..(97): NCBI GI NO: 39580676 NR Description: Hypothetical protein CBG05199
MEVVAAAAATEEAAAAAVSATSAARRATSPGTAPRAAAAVAVATEVVAAVAVVVAVAAASPAASPATSRASAPTRPTRRLCPSDLSAPFPFAPFPTA

SEQ ID NO: 16228 - protein, 54 aa, Triticum aestivum
  peptide (1)..(54): Ceres Seq. ID no. 12618742
SFLSHHTDLGFPARVLVLRFQRRLRQRWRQLRRRWRLWRWWRRRPLRRRRRRRP

SEQ ID NO: 16229 - DNA, 1964 bp, Triticum aestivum
  misc_feature (1)..(1964): Ceres Seq. ID no. 14308019
accctcttacaacacatcaacctgaaacctgcactgcacagtccagaatactccaagaaaaaaagttagagcttttagtttgagaaccaataaatggtggacctgtccatgatcgacatggaatggctccaagagccattgagatggctgttcgttgcctcggtcatcttcgtgttgctgcagcggcggcgtggcaaggcgccgccgctgcccccaggaccgtattcgccgccgattgtcggcaatatcttcatgatggaccagctgacccaccggggcttcgcggggctggccaagcagtacggcggccttctccacctccgcctcggcaaggtccacaccttcgccgtatcgacgccggagtacgcccagcaggtgctgcaggcccaggacgccgccttctcgcaccggcctgccaccatcgccaccacctacctcacctacaaccgcgccgacatggtgttcgcccgctacgggcccttctggcgccagatgcgcaagctgtgcgtgatgaagctcttcagccggcgccgtcccgggacgtggctcgccgtgcgcgacgagtccgcggcgctcgtccgtgccgtggcccggcggagcggcgagcctgtcaacctcggcgacctcatcttcaacctcagcatgaacgtcaccttccgcgcggcgttcggcgctgaagccgccggtgacggcaatggccggaagcgggacgagttcatcgctatcatgcaggagttctccaagctcttcggcgcgttcagcatcggcgacttcatcccatggctgggatgggcggacccgcagggcatcagcgtgcgcctccgagctgcgggcgcagccctagacgatttcatggtcaagatcatggacgagcacataaagaggggcaagaaccctgacgacatggacgccgacatggtagacgccatgctcgcctacctccctgaagcgaagccggagaaggccgctggcgacgacctgcagcacacgctccgcctcaaccgtgacaacatcaaggccattatcatggacgtgatgtttggtgggacggagacggtgtcgtcggcaatagaatgggcaatggccgaaatgatgcatagcccagatgacctcttgcagctgcagcaggagtttgccgataaggtgggactcgaccgaaacgtggacgaggcagacctcaacaacctctccttcctcaaatgtgttatcaaggagacactccggttacacccgcccatcccgctcctccaccgtgagaacgccgaggactgtgtggttggcaactactctgtgccccagggctcgagcgtcaatatcaatgtcttcgcaatgggccgcgacgacagggtgtggaaggacgccgacacattccgtccgtcacggttcatgatgggtgaaggggaggcagccggggtcgacttcaagggcgggtgcttccagttcctgccgtttgggtctggtcgtcgctcgtgcccggggatggcgctcggcctgtactcgctggagctcgttattgcgcggctcgcccatgggttcaactgggcgctgcccgacggtaagaagccgtcggagctcgacatgggtgacattttcggcctcaccgcaccgcgtgccacaaggctctgggtcgtgcccacgccccgacttacctgccctttggttgttgatgtcgacgccgcgtgccagacatgatgtcgtgcgcgcacagctgatggtatctaccagctgcgcaggggtgaaggtgtttgattagcgtgttagttaatctagttgtagctatagctatttcccctttcgtgttagatatttcctagtttcgttcatacaagatcgcacccctataaatcggttgccttgcatgtggaatagcacgacctgttgttggcatcgtggagctgtgggtcacgatcgttcctttcatcatgaataaaaaggagagccctacttcagtgctcccctaacgc

SEQ ID NO: 16230 - protein, 532 aa, Triticum aestivum
  peptide (1)..(532): Ceres Seq. ID no. 14308020
  misc_feature (40)..(510): Pfam Name: Pfam Description:  Cytochrome P450
  misc_feature (12)..(522): NCBI GI NO: 27476080 NR Description: Hypothetical protein
  misc_feature (10)..(522): NCBI GI NO: 5731998 NR Description: aldehyde 5-hydroxylase [Liquidambar styraciflua]
  misc_feature (12)..(522): NCBI GI NO: 12578893 NR Description: ferulate-5-hydroxylase [Arabidopsis thaliana]
  misc_feature (12)..(522): NCBI GI NO: 15234332 NR Description: cytochrome P450 84A1 / ferulate-5-hydroxylase
  misc_feature (19)..(522): NCBI GI NO: 6688937 NR Description: ferulate-5-hydroxylase
  misc_feature (19)..(520): NCBI GI NO: 10197650 NR Description: cytochrome p450-dependent monooxygenase
  misc_feature (12)..(522): NCBI GI NO: 12578901 NR Description: ferulate-5-hydroxylase [Arabidopsis thaliana]
  misc_feature (19)..(520): NCBI GI NO: 10197652 NR Description: cytochrome p450-dependent monooxygenase
  misc_feature (19)..(520): NCBI GI NO: 10197654 NR Description: cytochrome p450-dependent monooxygenase
  misc_feature (9)..(522): NCBI GI NO: 5002354 NR Description: ferulate-5-hydroxylase
MVDLSMIDMEWLQEPLRWLFVASVIFVLLQRRRGKAPPLPPGPYSPPIVGNIFMMDQLTHRGFAGLAKQYGGLLHLRLGKVHTFAVSTPEYAQQVLQAQDAAFSHRPATIATTYLTYNRADMVFARYGPFWRQMRKLCVMKLFSRRRPGTWLAVRDESAALVRAVARRSGEPVNLGDLIFNLSMNVTFRAAFGAEAAGDGNGRKRDEFIAIMQEFSKLFGAFSIGDFIPWLGWADPQGISVRLRAAGAALDDFMVKIMDEHIKRGKNPDDMDADMVDAMLAYLPEAKPEKAAGDDLQHTLRLNRDNIKAIIMDVMFGGTETVSSAIEWAMAEMMHSPDDLLQLQQEFADKVGLDRNVDEADLNNLSFLKCVIKETLRLHPPIPLLHRENAEDCVVGNYSVPQGSSVNINVFAMGRDDRVWKDADTFRPSRFMMGEGEAAGVDFKGGCFQFLPFGSGRRSCPGMALGLYSLELVIARLAHGFNWALPDGKKPSELDMGDIFGLTAPRATRLWVVPTPRLTCPLVVDVDAACQT

SEQ ID NO: 16231 - protein, 527 aa, Triticum aestivum
  peptide (1)..(527): Ceres Seq. ID no. 14308021
  misc_feature (35)..(505): Pfam Name: Pfam Description:  Cytochrome P450
  misc_feature (7)..(517): NCBI GI NO: 27476080 NR Description: Hypothetical protein
  misc_feature (5)..(517): NCBI GI NO: 5731998 NR Description: aldehyde 5-hydroxylase [Liquidambar styraciflua]
  misc_feature (7)..(517): NCBI GI NO: 12578893 NR Description: ferulate-5-hydroxylase [Arabidopsis thaliana]
  misc_feature (7)..(517): NCBI GI NO: 15234332 NR Description: cytochrome P450 84A1 / ferulate-5-hydroxylase
  misc_feature (14)..(517): NCBI GI NO: 6688937 NR Description: ferulate-5-hydroxylase
  misc_feature (14)..(515): NCBI GI NO: 10197650 NR Description: cytochrome p450-dependent monooxygenase
  misc_feature (7)..(517): NCBI GI NO: 12578901 NR Description: ferulate-5-hydroxylase [Arabidopsis thaliana]
  misc_feature (14)..(515): NCBI GI NO: 10197652 NR Description: cytochrome p450-dependent monooxygenase
  misc_feature (14)..(515): NCBI GI NO: 10197654 NR Description: cytochrome p450-dependent monooxygenase
  misc_feature (4)..(517): NCBI GI NO: 5002354 NR Description: ferulate-5-hydroxylase
MIDMEWLQEPLRWLFVASVIFVLLQRRRGKAPPLPPGPYSPPIVGNIFMMDQLTHRGFAGLAKQYGGLLHLRLGKVHTFAVSTPEYAQQVLQAQDAAFSHRPATIATTYLTYNRADMVFARYGPFWRQMRKLCVMKLFSRRRPGTWLAVRDESAALVRAVARRSGEPVNLGDLIFNLSMNVTFRAAFGAEAAGDGNGRKRDEFIAIMQEFSKLFGAFSIGDFIPWLGWADPQGISVRLRAAGAALDDFMVKIMDEHIKRGKNPDDMDADMVDAMLAYLPEAKPEKAAGDDLQHTLRLNRDNIKAIIMDVMFGGTETVSSAIEWAMAEMMHSPDDLLQLQQEFADKVGLDRNVDEADLNNLSFLKCVIKETLRLHPPIPLLHRENAEDCVVGNYSVPQGSSVNINVFAMGRDDRVWKDADTFRPSRFMMGEGEAAGVDFKGGCFQFLPFGSGRRSCPGMALGLYSLELVIARLAHGFNWALPDGKKPSELDMGDIFGLTAPRATRLWVVPTPRLTCPLVVDVDAACQT

SEQ ID NO: 16232 - protein, 524 aa, Triticum aestivum
  peptide (1)..(524): Ceres Seq. ID no. 14308022
  misc_feature (32)..(502): Pfam Name: Pfam Description:  Cytochrome P450
  misc_feature (4)..(514): NCBI GI NO: 27476080 NR Description: Hypothetical protein
  misc_feature (2)..(514): NCBI GI NO: 5731998 NR Description: aldehyde 5-hydroxylase [Liquidambar styraciflua]
  misc_feature (4)..(514): NCBI GI NO: 12578893 NR Description: ferulate-5-hydroxylase [Arabidopsis thaliana]
  misc_feature (4)..(514): NCBI GI NO: 15234332 NR Description: cytochrome P450 84A1 / ferulate-5-hydroxylase
  misc_feature (11)..(514): NCBI GI NO: 6688937 NR Description: ferulate-5-hydroxylase
  misc_feature (11)..(512): NCBI GI NO: 10197650 NR Description: cytochrome p450-dependent monooxygenase
  misc_feature (4)..(514): NCBI GI NO: 12578901 NR Description: ferulate-5-hydroxylase [Arabidopsis thaliana]
  misc_feature (11)..(512): NCBI GI NO: 10197652 NR Description: cytochrome p450-dependent monooxygenase
  misc_feature (11)..(512): NCBI GI NO: 10197654 NR Description: cytochrome p450-dependent monooxygenase
  misc_feature (1)..(514): NCBI GI NO: 5002354 NR Description: ferulate-5-hydroxylase
MEWLQEPLRWLFVASVIFVLLQRRRGKAPPLPPGPYSPPIVGNIFMMDQLTHRGFAGLAKQYGGLLHLRLGKVHTFAVSTPEYAQQVLQAQDAAFSHRPATIATTYLTYNRADMVFARYGPFWRQMRKLCVMKLFSRRRPGTWLAVRDESAALVRAVARRSGEPVNLGDLIFNLSMNVTFRAAFGAEAAGDGNGRKRDEFIAIMQEFSKLFGAFSIGDFIPWLGWADPQGISVRLRAAGAALDDFMVKIMDEHIKRGKNPDDMDADMVDAMLAYLPEAKPEKAAGDDLQHTLRLNRDNIKAIIMDVMFGGTETVSSAIEWAMAEMMHSPDDLLQLQQEFADKVGLDRNVDEADLNNLSFLKCVIKETLRLHPPIPLLHRENAEDCVVGNYSVPQGSSVNINVFAMGRDDRVWKDADTFRPSRFMMGEGEAAGVDFKGGCFQFLPFGSGRRSCPGMALGLYSLELVIARLAHGFNWALPDGKKPSELDMGDIFGLTAPRATRLWVVPTPRLTCPLVVDVDAACQT

SEQ ID NO: 16233 - DNA, 2073 bp, Triticum aestivum
  misc_feature (1)..(2073): Ceres Seq. ID no. 13656435
agaacatcctaatcgaaaaatagctcactctcactaccaccctcgccactcaccagctcgactccaccccactccactcgagccacgcgcacgcggagctgggccgtacagtacgtgagcccgtgagcgagcagggtacggactaaatgccgcacccgtcgtcgtcgtcttcctcggycagtgtggacgcggccgccaagggcgtcaagctggagcggtacgccagcggcggcggcgcgctgctgatgcggcgcgcggggagctccaagatcgtggcggcctcctcgcacctcctcttccgcgccaccgtcctcgccacgctcgcgctcgtctgcctcttcgccgtgcactacccttccctcctgtcccgctccttccggctctccgccgccgccgctgcttcctcctcttcttccccgccgcggcagacgtcgcggcaccggaacctgctcgggtcgtcgtcggcgtacgcgggcgccgcgtgggagcgggaggtgcggcgaagcgccacgccgcggcgggacggggggatgtcggtgctggtcacgggcgccgcggggttcgttggcgcgcactgcgcgctggcgctcagggcgcgcggcgacggcgtgctcggcctcgacaacttcaacgcgtactacgagccgggcctgaaacscscctscvgttccarctttattgtgytkctcagcgtcgcgcggggtggtggtgctcggcgccgacatcaacgacgcggccctgctcgagcggctcttcgccgccgtgcccttcacgcacgtgctgcacctcgccgcgcaggccggcgtgcggtacgcgatgcgggcgccgcagacgtacgtggcctccaacgtcgctggcctcgtcagcgtcttcgaggccgccgcccggcacgccgacccgcagccggcgatcgtgtgggcgtcgtcgtcgtcggtgtacgggctcaataccgacgcgccattctccgaggaccaccgcacggaccgaccggcgtcgctgtacgcggccaccaagaaggccggcgaggccatcgcgcacgcgtacaaccacatctacggtctctcgatcaccggcctccggttcttcacggtgtacggtccgtggggtcgccccgacatggcctacttctccttcgctcgcagcatcgtcgccggcgagcccatcacgctcttccgcgccgccgacggcacagacgtccgccgcgacttcacctacatcgacgacgtcgttaaggggtgcctcggctcgctcgacacggccggcaagagcacgggctccaagtccggcaagtagcgcgggccagcgcccctccgcgtctacaacctcggcaacacctcgccggtgcccgtcacccgcatggtggccatcctcgagaagctcctcggcaagaaagcgaacaagcgcgtcgtcaccatgcctagcaacggcgacgtgccgttcacgcacgccaatgtcagccacgccgcgcgcgacttcgggtaccaccccaccacctccctcgacgccggcctgcggaaattcgtcgaatggttcctccagtactacaagatcgaccccgcgaagctcgccaagggcagcagagtcggtaccaagactaccaagaagaaatccatgggcgccatatccgcggcatcgtgaggagagcgcgcgcgccgcgtgcgtcccggcccggatgtccagtccaccaagtgtgcaatctgttctcctcggaggctggcggttgtgttgcacaactttgtgagtgcatccccattgtttaagccattgccggtgcttttcccccttgatgatgcaaccatgctagagctcggtgggaagggaatcgtggaggtggcaaggcaaaggagaagcgattctttcttcgtagcataagcaaaaccaaactattttagggaaaaggggtggggggtataggtaagatgacatgagccgtggaaaggagcgaggaggacacgataaagatgaagtcctgggcttccttttgggacggttcaggttgtttttgcttagtttcatttttgttttgtcgtcactatcttgttcttgctcatttggttaatttgtcttgtgttt

SEQ ID NO: 16234 - protein, 361 aa, Triticum aestivum
  peptide (1)..(361): Ceres Seq. ID no. 15219220
  misc_feature (1)..(170): NCBI GI NO: 29647497 NR Description: OJ1191_A10.21
  misc_feature (10)..(170): NCBI GI NO: 15229524 NR Description: NAD-dependent epimerase/dehydratase family
  misc_feature (10)..(170): NCBI GI NO: 24417280 NR Description: unknown [Arabidopsis thaliana]
  misc_feature (105)..(175): NCBI GI NO: 15234745 NR Description: nucleotide sugar epimerase family
  misc_feature (90)..(170): NCBI GI NO: 15234486 NR Description: nucleotide sugar epimerase family
  misc_feature (90)..(170): NCBI GI NO: 15293119 NR Description: putative nucleotide sugar epimerase
  misc_feature (90)..(170): NCBI GI NO: 15217591 NR Description: nucleotide sugar epimerase family
  misc_feature (90)..(170): NCBI GI NO: 21536982 NR Description: nucleotide sugar epimerase, putative
  misc_feature (86)..(170): NCBI GI NO: 15236712 NR Description: nucleotide sugar epimerase family
  misc_feature (41)..(170): NCBI GI NO: 15225451 NR Description: nucleotide sugar epimerase family
  misc_feature (11)..(11): Xaa is any aa, unknown or other
  misc_feature (171)..(171): Xaa is any aa, unknown or other
  misc_feature (172)..(172): Xaa is any aa, unknown or other
  misc_feature (173)..(173): Xaa is any aa, unknown or other
  misc_feature (174)..(174): Xaa is any aa, unknown or other
  misc_feature (176)..(176): Xaa is any aa, unknown or other
  misc_feature (180)..(180): Xaa is any aa, unknown or other
MPHPSSSSSSXSVDAAAKGVKLERYASGGGALLMRRAGSSKIVAASSHLLFRATVLATLALVCLFAVHYPSLLSRSFRLSAAAAASSSSSPPRQTSRHRNLLGSSSAYAGAAWEREVRRSATPRRDGGMSVLVTGAAGFVGAHCALALRARGDGVLGLDNFNAYYEPGLKXXXXSXFIVXLSVARGGGARRRHQRRGPARAALRRRALHARAAPRRAGRRAVRDAGAADVRGLQRRWPRQRLRGRRPARRPAAGDRVGVVVVGVRAQYRRAILRGPPHGPTGVAVRGHQEGRRGHRARVQPHLRSLDHRPPVLHGVRSVGSPRHGLLLLRSQHRRRRAHHALPRRRRHRRPPRLHLHRRRR

SEQ ID NO: 16235 - protein, 328 aa, Triticum aestivum
  peptide (1)..(328): Ceres Seq. ID no. 15219221
  misc_feature (1)..(137): NCBI GI NO: 29647497 NR Description: OJ1191_A10.21
  misc_feature (1)..(137): NCBI GI NO: 15229524 NR Description: NAD-dependent epimerase/dehydratase family
  misc_feature (1)..(137): NCBI GI NO: 24417280 NR Description: unknown [Arabidopsis thaliana]
  misc_feature (72)..(142): NCBI GI NO: 15234745 NR Description: nucleotide sugar epimerase family
  misc_feature (57)..(137): NCBI GI NO: 15234486 NR Description: nucleotide sugar epimerase family
  misc_feature (57)..(137): NCBI GI NO: 15293119 NR Description: putative nucleotide sugar epimerase
  misc_feature (57)..(137): NCBI GI NO: 15217591 NR Description: nucleotide sugar epimerase family
  misc_feature (57)..(137): NCBI GI NO: 21536982 NR Description: nucleotide sugar epimerase, putative
  misc_feature (53)..(137): NCBI GI NO: 15236712 NR Description: nucleotide sugar epimerase family
  misc_feature (8)..(137): NCBI GI NO: 15225451 NR Description: nucleotide sugar epimerase family
  misc_feature (138)..(138): Xaa is any aa, unknown or other
  misc_feature (139)..(139): Xaa is any aa, unknown or other
  misc_feature (140)..(140): Xaa is any aa, unknown or other
  misc_feature (141)..(141): Xaa is any aa, unknown or other
  misc_feature (143)..(143): Xaa is any aa, unknown or other
  misc_feature (147)..(147): Xaa is any aa, unknown or other
MRRAGSSKIVAASSHLLFRATVLATLALVCLFAVHYPSLLSRSFRLSAAAAASSSSSPPRQTSRHRNLLGSSSAYAGAAWEREVRRSATPRRDGGMSVLVTGAAGFVGAHCALALRARGDGVLGLDNFNAYYEPGLKXXXXSXFIVXLSVARGGGARRRHQRRGPARAALRRRALHARAAPRRAGRRAVRDAGAADVRGLQRRWPRQRLRGRRPARRPAAGDRVGVVVVGVRAQYRRAILRGPPHGPTGVAVRGHQEGRRGHRARVQPHLRSLDHRPPVLHGVRSVGSPRHGLLLLRSQHRRRRAHHALPRRRRHRRPPRLHLHRRRR

SEQ ID NO: 16236 - protein, 233 aa, Triticum aestivum
  peptide (1)..(233): Ceres Seq. ID no. 15219222
  misc_feature (1)..(42): NCBI GI NO: 29647497 NR Description: OJ1191_A10.21
  misc_feature (1)..(42): NCBI GI NO: 15229524 NR Description: NAD-dependent epimerase/dehydratase family
  misc_feature (1)..(42): NCBI GI NO: 24417280 NR Description: unknown [Arabidopsis thaliana]
  misc_feature (1)..(47): NCBI GI NO: 15234745 NR Description: nucleotide sugar epimerase family
  misc_feature (1)..(42): NCBI GI NO: 15234486 NR Description: nucleotide sugar epimerase family
  misc_feature (1)..(42): NCBI GI NO: 15293119 NR Description: putative nucleotide sugar epimerase
  misc_feature (1)..(42): NCBI GI NO: 15217591 NR Description: nucleotide sugar epimerase family
  misc_feature (1)..(42): NCBI GI NO: 21536982 NR Description: nucleotide sugar epimerase, putative
  misc_feature (1)..(42): NCBI GI NO: 15236712 NR Description: nucleotide sugar epimerase family
  misc_feature (1)..(42): NCBI GI NO: 15225451 NR Description: nucleotide sugar epimerase family
  misc_feature (43)..(43): Xaa is any aa, unknown or other
  misc_feature (44)..(44): Xaa is any aa, unknown or other
  misc_feature (45)..(45): Xaa is any aa, unknown or other
  misc_feature (46)..(46): Xaa is any aa, unknown or other
  misc_feature (48)..(48): Xaa is any aa, unknown or other
  misc_feature (52)..(52): Xaa is any aa, unknown or other
MSVLVTGAAGFVGAHCALALRARGDGVLGLDNFNAYYEPGLKXXXXSXFIVXLSVARGGGARRRHQRRGPARAALRRRALHARAAPRRAGRRAVRDAGAADVRGLQRRWPRQRLRGRRPARRPAAGDRVGVVVVGVRAQYRRAILRGPPHGPTGVAVRGHQEGRRGHRARVQPHLRSLDHRPPVLHGVRSVGSPRHGLLLLRSQHRRRRAHHALPRRRRHRRPPRLHLHRRRR

SEQ ID NO: 16237 - DNA, 691 bp, Triticum aestivum
  misc_feature (1)..(691): Ceres Seq. ID no. 13656456
ccatgctctcacagttcttcctaagtattagttccatcaaatatgaccatgataaaatgccccaaatcaaccgtgccgtggctcatgtaactgatagcatcttgggcacgaggaacccggaaatcaccatccgcaatctcaaaatcagattcattttgatggatcgtgactctctcaccattggaagatctgtcgcccacgccatgtcaacccagaaggttgaagcagctgagtttgagattataacggagaaggcttataggaactgcactcctgccgatctccgccagaatgctaagctgttcaataattttgttggtgcttgtccggatgcatttgctggcctcaggcgcctgtggctgcgtaatatgaggttcggtgaacaggacatcccaaacatcctcagcacttgcaagctcttggagtctttgcgtttaatccattgcgactcagggatccattctgtgctgcaagtagaacatgctcaacttattgagctcgaggttgaccttgggaaatttgagagagttgagttgatatgtctacccaaactccaacgggtgagctataataattggtgctcttctgaacatcctgtgtattttggtcttgtaccacagctttcaagactgagcctcactaaagttggcgtcagttctgataagattcttgagttaagtcagcttcttgc

SEQ ID NO: 16238 - protein, 229 aa, Triticum aestivum
  peptide (1)..(229): Ceres Seq. ID no. 13656457
  misc_feature (23)..(228): NCBI GI NO: 21741445 NR Description: OJ000223_09.1
  misc_feature (1)..(228): NCBI GI NO: 38345335 NR Description: OSJNBa0081L15.8
  misc_feature (19)..(228): NCBI GI NO: 34904800 NR Description: hypothetical protein~predicted by GeneMark
  misc_feature (18)..(212): NCBI GI NO: 34395313 NR Description: hypothetical protein
  misc_feature (1)..(228): NCBI GI NO: 38345336 NR Description: OSJNBa0081L15.9
  misc_feature (18)..(212): NCBI GI NO: 34898872 NR Description: hypothetical protein~similar to Oryza sativachromosome7
  misc_feature (36)..(187): NCBI GI NO: 34904574 NR Description: B1008C01.20
  misc_feature (16)..(228): NCBI GI NO: 34393595 NR Description: unknown protein
MLSQFFLSISSIKYDHDKMPQINRAVAHVTDSILGTRNPEITIRNLKIRFILMDRDSLTIGRSVAHAMSTQKVEAAEFEIITEKAYRNCTPADLRQNAKLFNNFVGACPDAFAGLRRLWLRNMRFGEQDIPNILSTCKLLESLRLIHCDSGIHSVLQVEHAQLIELEVDLGKFERVELICLPKLQRVSYNNWCSSEHPVYFGLVPQLSRLSLTKVGVSSDKILELSQLL

SEQ ID NO: 16239 - protein, 211 aa, Triticum aestivum
  peptide (1)..(211): Ceres Seq. ID no. 13656458
  misc_feature (5)..(210): NCBI GI NO: 21741445 NR Description: OJ000223_09.1
  misc_feature (1)..(210): NCBI GI NO: 38345335 NR Description: OSJNBa0081L15.8
  misc_feature (1)..(210): NCBI GI NO: 34904800 NR Description: hypothetical protein~predicted by GeneMark
  misc_feature (1)..(194): NCBI GI NO: 34395313 NR Description: hypothetical protein
  misc_feature (1)..(210): NCBI GI NO: 38345336 NR Description: OSJNBa0081L15.9
  misc_feature (1)..(194): NCBI GI NO: 34898872 NR Description: hypothetical protein~similar to Oryza sativachromosome7
  misc_feature (18)..(169): NCBI GI NO: 34904574 NR Description: B1008C01.20
  misc_feature (1)..(210): NCBI GI NO: 34393595 NR Description: unknown protein
MPQINRAVAHVTDSILGTRNPEITIRNLKIRFILMDRDSLTIGRSVAHAMSTQKVEAAEFEIITEKAYRNCTPADLRQNAKLFNNFVGACPDAFAGLRRLWLRNMRFGEQDIPNILSTCKLLESLRLIHCDSGIHSVLQVEHAQLIELEVDLGKFERVELICLPKLQRVSYNNWCSSEHPVYFGLVPQLSRLSLTKVGVSSDKILELSQLL

SEQ ID NO: 16240 - protein, 177 aa, Triticum aestivum
  peptide (1)..(177): Ceres Seq. ID no. 13656459
  misc_feature (1)..(176): NCBI GI NO: 21741445 NR Description: OJ000223_09.1
  misc_feature (1)..(176): NCBI GI NO: 38345335 NR Description: OSJNBa0081L15.8
  misc_feature (1)..(176): NCBI GI NO: 34904800 NR Description: hypothetical protein~predicted by GeneMark
  misc_feature (1)..(160): NCBI GI NO: 34395313 NR Description: hypothetical protein
  misc_feature (1)..(176): NCBI GI NO: 38345336 NR Description: OSJNBa0081L15.9
  misc_feature (1)..(160): NCBI GI NO: 34898872 NR Description: hypothetical protein~similar to Oryza sativachromosome7
  misc_feature (1)..(135): NCBI GI NO: 34904574 NR Description: B1008C01.20
  misc_feature (1)..(176): NCBI GI NO: 34393595 NR Description: unknown protein
MDRDSLTIGRSVAHAMSTQKVEAAEFEIITEKAYRNCTPADLRQNAKLFNNFVGACPDAFAGLRRLWLRNMRFGEQDIPNILSTCKLLESLRLIHCDSGIHSVLQVEHAQLIELEVDLGKFERVELICLPKLQRVSYNNWCSSEHPVYFGLVPQLSRLSLTKVGVSSDKILELSQLL

SEQ ID NO: 16241 - DNA, 1120 bp, Triticum aestivum
  misc_feature (1)..(1120): Ceres Seq. ID no. 13656460
atcaggtaaacacacaaccatacacaaggcgcacggttgcaaaacaagggagttatttagaagcaaggagtaaggaaccacctgaagccatgtgtatcgctgcatggatttggcaggctcaccctcagcaccagctcctgctgctgctcaacagagatgagttccatagcaggcctacaaaggcagtaggatggtggggggagggctcaatgaagattcttggtggcagggatgtacttggtggaggaacatggatggggagcaccaaagatggcagacttgccttcctgaccaatgtgctcgagcctgatgtgatgcctggcgcacgcactaggggagacctgcccctcaggttcctgcagggcaacaagagcccactggaggttgcaactgaagtcgcaaaagaagctgatgagtacaatggcttcaaccttatactagctgatctaaccaggaatgtcatggtttatgtgtcaaaccggccaaaggggcagcctgcgacgattcagctcgtctcaccaggactccatgtgttgtccaatgcaaggctagacagcccttggcagaaagcaattcgccttggtaaaaacttcagggagtttataaggaagcatggtgatgatgaagttgaagcgaaggatatagctgatagactaatgactgacaccacgagggctgataaagataggctgccaaacaccggttgtgatcccaactgggagcacggtctgagctccatcttcatcgaggtgcaaactgacgaagggctctatggtacaaggagcacagcagttctttcagtgaactatgatggagaagctagcttatatgagaagtacctcgagagtggtatatggaagaaccacacagtgcattaccagatagaattgccaatgcgcacctaaaggcaggagcctcaaataggaagaaagaatgaatagctaccattgtgcatgctgttatttccacagttgcgctttaagatcacataatgatctctaattatggcaattaaattatttactgtatgcggatctataaattcagagacagatcaagtcaaattgttgaatatatatacataataataatatgatatagtatgtttatttacagactt

SEQ ID NO: 16242 - protein, 300 aa, Triticum aestivum
  peptide (1)..(300): Ceres Seq. ID no. 13656461
  misc_feature (64)..(292): Pfam Name: DUF833 Pfam Description: Protein of unknown function
  misc_feature (42)..(296): NCBI GI NO: 38345399 NR Description: OSJNBa0017B10.5
  misc_feature (30)..(294): NCBI GI NO: 18420207 NR Description: expressed protein [Arabidopsis thaliana]
  misc_feature (64)..(294): NCBI GI NO: 15451202 NR Description: putative protein [Arabidopsis thaliana]
  misc_feature (59)..(272): NCBI GI NO: 7485957 NR Description: hypothetical protein F22I13
  misc_feature (30)..(296): NCBI GI NO: 39995898 NR Description: conserved hypothetical protein
  misc_feature (30)..(289): NCBI GI NO: 21230190 NR Description: conserved hypothetical protein
  misc_feature (30)..(282): NCBI GI NO: 17546499 NR Description: PUTATIVE SIGNAL PEPTIDE PROTEIN
  misc_feature (30)..(282): NCBI GI NO: 22977012 NR Description: hypothetical protein [Ralstonia metallidurans]
  misc_feature (30)..(297): NCBI GI NO: 21241540 NR Description: conserved hypothetical protein
  misc_feature (4)..(278): NCBI GI NO: 33602043 NR Description: conserved hypothetical protein
QVNTQPYTRRTVAKQGSYLEARSKEPPEAMCIAAWIWQAHPQHQLLLLLNRDEFHSRPTKAVGWWGEGSMKILGGRDVLGGGTWMGSTKDGRLAFLTNVLEPDVMPGARTRGDLPLRFLQGNKSPLEVATEVAKEADEYNGFNLILADLTRNVMVYVSNRPKGQPATIQLVSPGLHVLSNARLDSPWQKAIRLGKNFREFIRKHGDDEVEAKDIADRLMTDTTRADKDRLPNTGCDPNWEHGLSSIFIEVQTDEGLYGTRSTAVLSVNYDGEASLYEKYLESGIWKNHTVHYQIELPMRT

SEQ ID NO: 16243 - protein, 271 aa, Triticum aestivum
  peptide (1)..(271): Ceres Seq. ID no. 13656462
  misc_feature (35)..(263): Pfam Name: DUF833 Pfam Description: Protein of unknown function
  misc_feature (13)..(267): NCBI GI NO: 38345399 NR Description: OSJNBa0017B10.5
  misc_feature (1)..(265): NCBI GI NO: 18420207 NR Description: expressed protein [Arabidopsis thaliana]
  misc_feature (35)..(265): NCBI GI NO: 15451202 NR Description: putative protein [Arabidopsis thaliana]
  misc_feature (30)..(243): NCBI GI NO: 7485957 NR Description: hypothetical protein F22I13
  misc_feature (1)..(267): NCBI GI NO: 39995898 NR Description: conserved hypothetical protein
  misc_feature (1)..(260): NCBI GI NO: 21230190 NR Description: conserved hypothetical protein
  misc_feature (1)..(253): NCBI GI NO: 17546499 NR Description: PUTATIVE SIGNAL PEPTIDE PROTEIN
  misc_feature (1)..(253): NCBI GI NO: 22977012 NR Description: hypothetical protein [Ralstonia metallidurans]
  misc_feature (1)..(268): NCBI GI NO: 21241540 NR Description: conserved hypothetical protein
  misc_feature (1)..(249): NCBI GI NO: 33602043 NR Description: conserved hypothetical protein
MCIAAWIWQAHPQHQLLLLLNRDEFHSRPTKAVGWWGEGSMKILGGRDVLGGGTWMGSTKDGRLAFLTNVLEPDVMPGARTRGDLPLRFLQGNKSPLEVATEVAKEADEYNGFNLILADLTRNVMVYVSNRPKGQPATIQLVSPGLHVLSNARLDSPWQKAIRLGKNFREFIRKHGDDEVEAKDIADRLMTDTTRADKDRLPNTGCDPNWEHGLSSIFIEVQTDEGLYGTRSTAVLSVNYDGEASLYEKYLESGIWKNHTVHYQIELPMRT

SEQ ID NO: 16244 - protein, 231 aa, Triticum aestivum
  peptide (1)..(231): Ceres Seq. ID no. 13656463
  misc_feature (1)..(223): Pfam Name: DUF833 Pfam Description: Protein of unknown function
  misc_feature (1)..(227): NCBI GI NO: 38345399 NR Description: OSJNBa0017B10.5
  misc_feature (1)..(225): NCBI GI NO: 18420207 NR Description: expressed protein [Arabidopsis thaliana]
  misc_feature (1)..(225): NCBI GI NO: 15451202 NR Description: putative protein [Arabidopsis thaliana]
  misc_feature (1)..(203): NCBI GI NO: 7485957 NR Description: hypothetical protein F22I13
  misc_feature (1)..(227): NCBI GI NO: 39995898 NR Description: conserved hypothetical protein
  misc_feature (1)..(220): NCBI GI NO: 21230190 NR Description: conserved hypothetical protein
  misc_feature (1)..(213): NCBI GI NO: 17546499 NR Description: PUTATIVE SIGNAL PEPTIDE PROTEIN
  misc_feature (1)..(213): NCBI GI NO: 22977012 NR Description: hypothetical protein [Ralstonia metallidurans]
  misc_feature (1)..(228): NCBI GI NO: 21241540 NR Description: conserved hypothetical protein
  misc_feature (1)..(209): NCBI GI NO: 33602043 NR Description: conserved hypothetical protein
MKILGGRDVLGGGTWMGSTKDGRLAFLTNVLEPDVMPGARTRGDLPLRFLQGNKSPLEVATEVAKEADEYNGFNLILADLTRNVMVYVSNRPKGQPATIQLVSPGLHVLSNARLDSPWQKAIRLGKNFREFIRKHGDDEVEAKDIADRLMTDTTRADKDRLPNTGCDPNWEHGLSSIFIEVQTDEGLYGTRSTAVLSVNYDGEASLYEKYLESGIWKNHTVHYQIELPMRT

SEQ ID NO: 16245 - DNA, 1376 bp, Triticum aestivum
  misc_feature (1)..(1376): Ceres Seq. ID no. 14308023
acggctgggtttcagtgagatagaacctttgatcacacgccttaccagtctcttgtggcatggcggccctgcagcttgccgccctccttgccctgctgctcgcactgtggcgtctcgtgtggcggccgcgcgccatggcgcggtcgttcgtgaggcaggggatccgagggccgccctacacgttcctggccgggtccttgccggaggcgaagcggctgctgatcgctggccggagaggcgtgccgcccctcgacgccgggtgccacgacatcatgcccatcctgctgccgcagttccacagatgggttgccgattatggcaaaacgttcctgttctggatcgggctgatccccgccatcttctctatcgacctgcagctgataaagcaagtgctcacagacatgacgggcctgtatcagaaggacttcatgatccccgtgctcaaatccctcttcggcaacggcgtcatattgataaatggtgacgattggaagcggcaccggaaagtagtccttcctgctttcaactatgagcagatcaagagcatgtcagcggtgacggcagaggtcacaaggcagatgatacagcaatggggcgagcagatacaccaaagcaacagcgacaagaaagcagctgagatagacatgatccacgccttcaacgacctgactgccaagatcaacggccgtgtcgccttcggcactacccaccgggatgtcgaggaggtcatcgtcttgatgcaggagatgcaaaaggtcgccactgcggccatgctcgatgctccaatactctggtatctgccgactcggcgtaacttgcacgttcgacgcctgaacaaacagctgagaagcaagatcatgtcgatcatgcaggcacggctggccgcagatggagccaaatatggtcgaggagacaccggcggctgcggggacgacctgctcgggctgttgttagaggcgtggacaccgcaccggcaagtgaggggcggcgatacgctgacaactgacgaggtgattgatgagtgcaaaaccttcttcgccgcagggcaggaaaccacggccaccctcctcgtctgggccatgttcctgcttgccgtgcacccccagtggcaggacaaggtcagggaagaggtcctccgggagttccccggcggggacagcgacgatgtggtacccaacgcggatgttctcgccaaactgaagctggtgcgtacatttcaactgtcaatgtcatttttcctatattttcgtacgaatgtattcggtatcataaatgctcatattgtttctataaagttgatcaaagtttacaaaatttaactgttgagattttttgtatgtagtgtaattttgcaaagagggaataactaatgtgtt

SEQ ID NO: 16246 - protein, 419 aa, Triticum aestivum
  peptide (1)..(419): Ceres Seq. ID no. 14308024
  misc_feature (6)..(388): NCBI GI NO: 34913362 NR Description: putative cytochrome P450
  misc_feature (6)..(388): NCBI GI NO: 38112707 NR Description: cytochrome P450 [Triticum aestivum]
  misc_feature (6)..(418): NCBI GI NO: 34895168 NR Description: putative cytochrome P450
  misc_feature (1)..(388): NCBI GI NO: 34913354 NR Description: putative cytochrome P450
  misc_feature (1)..(388): NCBI GI NO: 22324446 NR Description: putative cytochrome P450
  misc_feature (2)..(388): NCBI GI NO: 34913346 NR Description: putative cytochrome P450
  misc_feature (2)..(395): NCBI GI NO: 14719280 NR Description: cytochrome P450 [Zea mays]
  misc_feature (1)..(397): NCBI GI NO: 34896952 NR Description: putative cytochrome P450-related protein
  misc_feature (31)..(388): NCBI GI NO: 34913350 NR Description: putative cytochrome P450
  misc_feature (19)..(393): NCBI GI NO: 15226472 NR Description: cytochrome P450 family [Arabidopsis thaliana]
MAALQLAALLALLLALWRLVWRPRAMARSFVRQGIRGPPYTFLAGSLPEAKRLLIAGRRGVPPLDAGCHDIMPILLPQFHRWVADYGKTFLFWIGLIPAIFSIDLQLIKQVLTDMTGLYQKDFMIPVLKSLFGNGVILINGDDWKRHRKVVLPAFNYEQIKSMSAVTAEVTRQMIQQWGEQIHQSNSDKKAAEIDMIHAFNDLTAKINGRVAFGTTHRDVEEVIVLMQEMQKVATAAMLDAPILWYLPTRRNLHVRRLNKQLRSKIMSIMQARLAADGAKYGRGDTGGCGDDLLGLLLEAWTPHRQVRGGDTLTTDEVIDECKTFFAAGQETTATLLVWAMFLLAVHPQWQDKVREEVLREFPGGDSDDVVPNADVLAKLKLVRTFQLSMSFFLYFRTNVFGIINAHIVSIKLIKVYKI

SEQ ID NO: 16247 - protein, 394 aa, Triticum aestivum
  peptide (1)..(394): Ceres Seq. ID no. 14308025
  misc_feature (1)..(363): NCBI GI NO: 34913362 NR Description: putative cytochrome P450
  misc_feature (1)..(363): NCBI GI NO: 38112707 NR Description: cytochrome P450 [Triticum aestivum]
  misc_feature (1)..(393): NCBI GI NO: 34895168 NR Description: putative cytochrome P450
  misc_feature (1)..(363): NCBI GI NO: 34913354 NR Description: putative cytochrome P450
  misc_feature (1)..(363): NCBI GI NO: 22324446 NR Description: putative cytochrome P450
  misc_feature (1)..(363): NCBI GI NO: 34913346 NR Description: putative cytochrome P450
  misc_feature (1)..(370): NCBI GI NO: 14719280 NR Description: cytochrome P450 [Zea mays]
  misc_feature (1)..(372): NCBI GI NO: 34896952 NR Description: putative cytochrome P450-related protein
  misc_feature (6)..(363): NCBI GI NO: 34913350 NR Description: putative cytochrome P450
  misc_feature (1)..(368): NCBI GI NO: 15226472 NR Description: cytochrome P450 family [Arabidopsis thaliana]
MARSFVRQGIRGPPYTFLAGSLPEAKRLLIAGRRGVPPLDAGCHDIMPILLPQFHRWVADYGKTFLFWIGLIPAIFSIDLQLIKQVLTDMTGLYQKDFMIPVLKSLFGNGVILINGDDWKRHRKVVLPAFNYEQIKSMSAVTAEVTRQMIQQWGEQIHQSNSDKKAAEIDMIHAFNDLTAKINGRVAFGTTHRDVEEVIVLMQEMQKVATAAMLDAPILWYLPTRRNLHVRRLNKQLRSKIMSIMQARLAADGAKYGRGDTGGCGDDLLGLLLEAWTPHRQVRGGDTLTTDEVIDECKTFFAAGQETTATLLVWAMFLLAVHPQWQDKVREEVLREFPGGDSDDVVPNADVLAKLKLVRTFQLSMSFFLYFRTNVFGIINAHIVSIKLIKVYKI

SEQ ID NO: 16248 - protein, 348 aa, Triticum aestivum
  peptide (1)..(348): Ceres Seq. ID no. 14308026
  misc_feature (1)..(317): NCBI GI NO: 34913362 NR Description: putative cytochrome P450
  misc_feature (1)..(317): NCBI GI NO: 38112707 NR Description: cytochrome P450 [Triticum aestivum]
  misc_feature (1)..(347): NCBI GI NO: 34895168 NR Description: putative cytochrome P450
  misc_feature (1)..(317): NCBI GI NO: 34913354 NR Description: putative cytochrome P450
  misc_feature (1)..(317): NCBI GI NO: 22324446 NR Description: putative cytochrome P450
  misc_feature (1)..(317): NCBI GI NO: 34913346 NR Description: putative cytochrome P450
  misc_feature (1)..(324): NCBI GI NO: 14719280 NR Description: cytochrome P450 [Zea mays]
  misc_feature (1)..(326): NCBI GI NO: 34896952 NR Description: putative cytochrome P450-related protein
  misc_feature (1)..(317): NCBI GI NO: 34913350 NR Description: putative cytochrome P450
  misc_feature (1)..(322): NCBI GI NO: 15226472 NR Description: cytochrome P450 family [Arabidopsis thaliana]
MPILLPQFHRWVADYGKTFLFWIGLIPAIFSIDLQLIKQVLTDMTGLYQKDFMIPVLKSLFGNGVILINGDDWKRHRKVVLPAFNYEQIKSMSAVTAEVTRQMIQQWGEQIHQSNSDKKAAEIDMIHAFNDLTAKINGRVAFGTTHRDVEEVIVLMQEMQKVATAAMLDAPILWYLPTRRNLHVRRLNKQLRSKIMSIMQARLAADGAKYGRGDTGGCGDDLLGLLLEAWTPHRQVRGGDTLTTDEVIDECKTFFAAGQETTATLLVWAMFLLAVHPQWQDKVREEVLREFPGGDSDDVVPNADVLAKLKLVRTFQLSMSFFLYFRTNVFGIINAHIVSIKLIKVYKI

SEQ ID NO: 16249 - DNA, 848 bp, Triticum aestivum
  misc_feature (1)..(848): Ceres Seq. ID no. 12626306
cggtctcaccccaaacccattgtgcatctccatccccacctcctccgatcccatccacccccaccctcaccgccaccaagtcaaagatccaaccttcactccaccaccatgacgaagccatcgccatccccatcgccggcgccggccaagggcgcggggtcgctgcggggcagccagctgaagcagctgcgctccctcttcgaccgcttcgacatggacggcgacggcagcctcacccagctcgagctggcggccctgctccgctccctcggcctgcgccccacgggcgacgagtcgcgggccctcctcctcgccatcgacgccgacggcagcggcaccgtggagttcgacgagctggcgcgggccatcgcgccggtgctcaccgcccacgcgccgcggctcgtcgaccaggcgcagctgctcgaggtcttccgcgccttcgaccgcgacggcaacggctacatctccgccgccgagctcgcgcgttccatggccaagctgggccagccgctcacgttcgaggagctgcggaccatgatgcgggacgcggacgcggatggggacggcgtgattagctttggggagttcgccgccgtcatggccaggtccgcgctcgacttcctcggcgtccccgccgcctgagatgtgagatgatgaccggccgggctccggctggctctgatcggatggactggtagtatgattcttcttctttggtagaactagtcgtagtagggtggttcaaggcccggactggatcaactgtgacgaactcacacggagttgcaacgttgacctggaatgtgtataaattttggtaatttggtcaatcgatgcgtccgctgctg

SEQ ID NO: 16250 - protein, 213 aa, Triticum aestivum
  peptide (1)..(213): Ceres Seq. ID no. 12626307
  misc_feature (139)..(167): Pfam Name: Pfam Description:  EF hand
  misc_feature (43)..(212): NCBI GI NO: 34912426 NR Description: P0681B11.17
  misc_feature (59)..(210): NCBI GI NO: 15221797 NR Description: calmodulin, putative; protein id: At1g18530.1
  misc_feature (59)..(213): NCBI GI NO: 28393082 NR Description: putative calmodulin [Arabidopsis thaliana]
  misc_feature (59)..(213): NCBI GI NO: 15230858 NR Description: calmodulin, putative; protein id: At3g25600.1
  misc_feature (55)..(206): NCBI GI NO: 13359053 NR Description: P0436D06.14
  misc_feature (46)..(206): NCBI GI NO: 15228441 NR Description: putative calmodulin; protein id: At3g03000
  misc_feature (50)..(206): NCBI GI NO: 15222618 NR Description: calmodulin, putative; protein id: At1g32250.1
  misc_feature (52)..(200): NCBI GI NO: 4959171 NR Description: calmodulin mutant SYNCAM64B [synthetic construct]
  misc_feature (52)..(200): NCBI GI NO: 4959148 NR Description: calmodulin mutant SYNCAM35 [synthetic construct]
  misc_feature (52)..(200): NCBI GI NO: 4959162 NR Description: calmodulin mutant SYNCAM57A [synthetic construct]
RSHPKPIVHLHPHLLRSHPPPPSPPPSQRSNLHSTTMTKPSPSPSPAPAKGAGSLRGSQLKQLRSLFDRFDMDGDGSLTQLELAALLRSLGLRPTGDESRALLLAIDADGSGTVEFDELARAIAPVLTAHAPRLVDQAQLLEVFRAFDRDGNGYISAAELARSMAKLGQPLTFEELRTMMRDADADGDGVISFGEFAAVMARSALDFLGVPAA

SEQ ID NO: 16251 - protein, 190 aa, Triticum aestivum
  peptide (1)..(190): Ceres Seq. ID no. 12626308
VSPQTHCASPSPPPPIPSTPTLTATKSKIQPSLHHHDEAIAIPIAGAGQGRGVAAGQPAEAAALPLRPLRHGRRRQPHPARAGGPAPLPRPAPHGRRVAGPPPRHRRRRQRHRGVRRAGAGHRAGAHRPRAAARRPGAAARGLPRLRPRRQRLHLRRRARAFHGQAGPAAHVRGAADHDAGRGRGWGRRD

SEQ ID NO: 16252 - protein, 177 aa, Triticum aestivum
  peptide (1)..(177): Ceres Seq. ID no. 12626309
  misc_feature (103)..(131): Pfam Name: Pfam Description:  EF hand
  misc_feature (7)..(176): NCBI GI NO: 34912426 NR Description: P0681B11.17
  misc_feature (23)..(174): NCBI GI NO: 15221797 NR Description: calmodulin, putative; protein id: At1g18530.1
  misc_feature (23)..(177): NCBI GI NO: 28393082 NR Description: putative calmodulin [Arabidopsis thaliana]
  misc_feature (23)..(177): NCBI GI NO: 15230858 NR Description: calmodulin, putative; protein id: At3g25600.1
  misc_feature (19)..(170): NCBI GI NO: 13359053 NR Description: P0436D06.14
  misc_feature (10)..(170): NCBI GI NO: 15228441 NR Description: putative calmodulin; protein id: At3g03000
  misc_feature (14)..(170): NCBI GI NO: 15222618 NR Description: calmodulin, putative; protein id: At1g32250.1
  misc_feature (16)..(164): NCBI GI NO: 4959171 NR Description: calmodulin mutant SYNCAM64B [synthetic construct]
  misc_feature (16)..(164): NCBI GI NO: 4959148 NR Description: calmodulin mutant SYNCAM35 [synthetic construct]
  misc_feature (16)..(164): NCBI GI NO: 4959162 NR Description: calmodulin mutant SYNCAM57A [synthetic construct]
MTKPSPSPSPAPAKGAGSLRGSQLKQLRSLFDRFDMDGDGSLTQLELAALLRSLGLRPTGDESRALLLAIDADGSGTVEFDELARAIAPVLTAHAPRLVDQAQLLEVFRAFDRDGNGYISAAELARSMAKLGQPLTFEELRTMMRDADADGDGVISFGEFAAVMARSALDFLGVPAA

SEQ ID NO: 16253 - DNA, 1161 bp, Triticum aestivum
  misc_feature (1)..(1161): Ceres Seq. ID no. 12598265
agacacgagcggagcaccgagcaggcgcgcagcacatcatctgtcacaccggcggcggcggcggcatggggatgggcggtcgaggtgtggttggcgacaggtggtcgcagcgcgtcctctggatgtgcgccatcggcagcgccgtgagcctgtacttcgtggcggtggagaggcaggcgcagaaccgcgcgcgggcggtgtccgagggctttaagggcctggacggcgcagacggaggtggcagccgtggcggggaggacgtgtgactttggcggcgccgattccactaggttttccagctctcccgcacccgccgccgccacctccccactccccaccaccccctcagccatggcggtcgtcgagccggtgcccgggggcgacgtgaagctattcaaccgctggaccttcgaggatgttcaggtgagcgacatctcgctgaacgactacctcgcggtgacgtcgatgaagcactacaccttcctgccgcactcggccggccgctactcggccaagcgcttccgcaaggcgcagtgccccatcatcgagcgcctcaccaactccctcatgatgcacgggcgcaacaacggtaagaagatcatggccgtccgcatcatcaagcacaccatggagatcatccacctcctcaccgacgccaaccccatccagatcatcgttgacgccatcatcaacagtggtccacgtgaggatgctacccgtattgggtctgctggtgttgtgaggaggcaggctgtggatatctcccccctgaggagggtgaaccaggccatctaccttctgaccactggtgccagggagagcgccttcaggaatgtcaagaccattgctgagtgcctcgctgatgagctgatcaatgctgccaagggctcatccaacagctatgccatcaagaagaaggacgagattgagcgtgttgccaaggctaaccgttaagatggatgtgcatctgagggtctcatgcttttggctggagattttggactgaatgtgttttacaagatatctagaactgttttagctatgctttaagtttgtgatgaaagaacatttcgatgtagcggcaaggacttgcctgtctttatgaaaccaattcctgttcagacaaatttggagatgttgaatgtgtcgttgtgttctctc

SEQ ID NO: 16254 - protein, 200 aa, Triticum aestivum
  peptide (1)..(200): Ceres Seq. ID no. 12598266
  misc_feature (47)..(200): Pfam Name: Pfam Description:  Ribosomal protein S7p/S5e
  misc_feature (1)..(200): NCBI GI NO: 34893994 NR Description: putative 40S ribosomal protein S5
  misc_feature (11)..(200): NCBI GI NO: 6831665 NR Description: 40S RIBOSOMAL PROTEIN S5
  misc_feature (1)..(200): NCBI GI NO: 15229897 NR Description: 40S ribosomal protein S5, putative
  misc_feature (11)..(200): NCBI GI NO: 15228111 NR Description: 40S ribosomal protein S5; protein id: At2g37270
  misc_feature (11)..(200): NCBI GI NO: 21617886 NR Description: 40S ribosomal protein S5 [Arabidopsis thaliana]
  misc_feature (11)..(200): NCBI GI NO: 40748265 NR Description: 40S ribosomal protein S5 [Capsicum annuum]
  misc_feature (1)..(200): NCBI GI NO: 29825585 NR Description: 40S ribosomal protein S5 [Dermacentor variabilis]
  misc_feature (1)..(200): NCBI GI NO: 13904870 NR Description: ribosomal protein S5; 40S ribosomal protein S5
  misc_feature (1)..(200): NCBI GI NO: 3717978 NR Description: 5S ribosomal protein [Mus musculus]
  misc_feature (1)..(200): NCBI GI NO: 34854534 NR Description: similar to ribosomal protein S5
MAVVEPVPGGDVKLFNRWTFEDVQVSDISLNDYLAVTSMKHYTFLPHSAGRYSAKRFRKAQCPIIERLTNSLMMHGRNNGKKIMAVRIIKHTMEIIHLLTDANPIQIIVDAIINSGPREDATRIGSAGVVRRQAVDISPLRRVNQAIYLLTTGARESAFRNVKTIAECLADELINAAKGSSNSYAIKKKDEIERVAKANR

SEQ ID NO: 16255 - protein, 162 aa, Triticum aestivum
  peptide (1)..(162): Ceres Seq. ID no. 12598267
  misc_feature (9)..(162): Pfam Name: Pfam Description:  Ribosomal protein S7p/S5e
  misc_feature (1)..(162): NCBI GI NO: 34893994 NR Description: putative 40S ribosomal protein S5
  misc_feature (1)..(162): NCBI GI NO: 6831665 NR Description: 40S RIBOSOMAL PROTEIN S5
  misc_feature (1)..(162): NCBI GI NO: 15229897 NR Description: 40S ribosomal protein S5, putative
  misc_feature (1)..(162): NCBI GI NO: 15228111 NR Description: 40S ribosomal protein S5; protein id: At2g37270
  misc_feature (1)..(162): NCBI GI NO: 21617886 NR Description: 40S ribosomal protein S5 [Arabidopsis thaliana]
  misc_feature (1)..(162): NCBI GI NO: 40748265 NR Description: 40S ribosomal protein S5 [Capsicum annuum]
  misc_feature (1)..(162): NCBI GI NO: 29825585 NR Description: 40S ribosomal protein S5 [Dermacentor variabilis]
  misc_feature (1)..(162): NCBI GI NO: 13904870 NR Description: ribosomal protein S5; 40S ribosomal protein S5
  misc_feature (1)..(162): NCBI GI NO: 3717978 NR Description: 5S ribosomal protein [Mus musculus]
  misc_feature (1)..(162): NCBI GI NO: 34854534 NR Description: similar to ribosomal protein S5
MKHYTFLPHSAGRYSAKRFRKAQCPIIERLTNSLMMHGRNNGKKIMAVRIIKHTMEIIHLLTDANPIQIIVDAIINSGPREDATRIGSAGVVRRQAVDISPLRRVNQAIYLLTTGARESAFRNVKTIAECLADELINAAKGSSNSYAIKKKDEIERVAKANR

SEQ ID NO: 16256 - protein, 128 aa, Triticum aestivum
  peptide (1)..(128): Ceres Seq. ID no. 12598268
  misc_feature (1)..(128): Pfam Name: Pfam Description:  Ribosomal protein S7p/S5e
  misc_feature (1)..(128): NCBI GI NO: 34893994 NR Description: putative 40S ribosomal protein S5
  misc_feature (1)..(128): NCBI GI NO: 6831665 NR Description: 40S RIBOSOMAL PROTEIN S5
  misc_feature (1)..(128): NCBI GI NO: 15229897 NR Description: 40S ribosomal protein S5, putative
  misc_feature (1)..(128): NCBI GI NO: 15228111 NR Description: 40S ribosomal protein S5; protein id: At2g37270
  misc_feature (1)..(128): NCBI GI NO: 21617886 NR Description: 40S ribosomal protein S5 [Arabidopsis thaliana]
  misc_feature (1)..(128): NCBI GI NO: 40748265 NR Description: 40S ribosomal protein S5 [Capsicum annuum]
  misc_feature (1)..(128): NCBI GI NO: 29825585 NR Description: 40S ribosomal protein S5 [Dermacentor variabilis]
  misc_feature (1)..(128): NCBI GI NO: 13904870 NR Description: ribosomal protein S5; 40S ribosomal protein S5
  misc_feature (1)..(128): NCBI GI NO: 3717978 NR Description: 5S ribosomal protein [Mus musculus]
  misc_feature (1)..(128): NCBI GI NO: 34854534 NR Description: similar to ribosomal protein S5
MMHGRNNGKKIMAVRIIKHTMEIIHLLTDANPIQIIVDAIINSGPREDATRIGSAGVVRRQAVDISPLRRVNQAIYLLTTGARESAFRNVKTIAECLADELINAAKGSSNSYAIKKKDEIERVAKANR

SEQ ID NO: 16257 - DNA, 787 bp, Triticum aestivum
  misc_feature (1)..(787): Ceres Seq. ID no. 12780295
tttgattgtcggtactgccccctaatcactagaggaggaggtgcaacccgctttagggagcaccttggaggtataccaggtgatgtgaaacagagtatcacagcatactttgacaaggaattgtcgaccaacaaagtatcaatgcagccaaagatcagcactgctttgaatgttgagtcaaaagatgtacttggccaagcttgggaaaagttttttcatgctaatgacattgctggtctgaaagcaaattgtccctattttcgttcggctgtcaagataactcaaaaccttggcccagctcctgttccaactgccaaggagattgatgggatatatttggacaagaattatgaagaagctgagcagtggctgaagatgttcaagcaagactggaggaactatggtgtaactgtgatgtgtgactcatggacagggcctactggtatgagtctcatcaatttcatggtgtattgcaatgcacggatgttctttcataaatccattgatgcttctggtcaaactcagactgcagatacgtgctgaagaagaacaaggccctgcaggcagggtgaagagaaagaaccagaagaaggcaagtggtggcggcgacgccggtggtgatgaggaagaggaatgaggaactagtagctatcaccttatatttatcaaatgttggtgttatgagtactttagctgagaggcctgagactttcatgggttatcctcttgtcattttgtcactttatcactgttgttagcatgtatgcacttctttatgtttggagct

SEQ ID NO: 16258 - protein, 180 aa, Triticum aestivum
  peptide (1)..(180): Ceres Seq. ID no. 12780296
  misc_feature (103)..(178): Pfam Name: DUF 659 Pfam Description: Protein of unknown function
  misc_feature (38)..(178): NCBI GI NO: 15451569 NR Description: Putative transposable element [Oryza sativa]
  misc_feature (38)..(171): NCBI GI NO: 5852176 NR Description: zhb0006.1 [Oryza sativa (indica cultivar-group)]
  misc_feature (64)..(119): NCBI GI NO: 37530924 NR Description: unknown protein
  misc_feature (52)..(177): NCBI GI NO: 4538624 NR Description: hypothetical protein [Nicotiana tabacum]
  misc_feature (47)..(177): NCBI GI NO: 15229049 NR Description: unknown protein; protein id: At3g17450.1
  misc_feature (47)..(177): NCBI GI NO: 11994683 NR Description: emb|CAB39405
  misc_feature (101)..(144): NCBI GI NO: 20805053 NR Description: B1108H10.13
FDCRYCPLITRGGGATRFREHLGGIPGDVKQSITAYFDKELSTNKVSMQPKISTALNVESKDVLGQAWEKFFHANDIAGLKANCPYFRSAVKITQNLGPAPVPTAKEIDGIYLDKNYEEAEQWLKMFKQDWRNYGVTVMCDSWTGPTGMSLINFMVYCNARMFFHKSIDASGQTQTADTC

SEQ ID NO: 16259 - protein, 133 aa, Triticum aestivum
  peptide (1)..(133): Ceres Seq. ID no. 12780297
  misc_feature (56)..(131): Pfam Name: DUF 659 Pfam Description: Protein of unknown function
  misc_feature (1)..(131): NCBI GI NO: 15451569 NR Description: Putative transposable element [Oryza sativa]
  misc_feature (1)..(124): NCBI GI NO: 5852176 NR Description: zhb0006.1 [Oryza sativa (indica cultivar-group)]
  misc_feature (17)..(72): NCBI GI NO: 37530924 NR Description: unknown protein
  misc_feature (5)..(130): NCBI GI NO: 4538624 NR Description: hypothetical protein [Nicotiana tabacum]
  misc_feature (1)..(130): NCBI GI NO: 15229049 NR Description: unknown protein; protein id: At3g17450.1
  misc_feature (1)..(130): NCBI GI NO: 11994683 NR Description: emb|CAB39405
  misc_feature (54)..(97): NCBI GI NO: 20805053 NR Description: B1108H10.13
MQPKISTALNVESKDVLGQAWEKFFHANDIAGLKANCPYFRSAVKITQNLGPAPVPTAKEIDGIYLDKNYEEAEQWLKMFKQDWRNYGVTVMCDSWTGPTGMSLINFMVYCNARMFFHKSIDASGQTQTADTC

SEQ ID NO: 16260 - DNA, 1281 bp, Triticum aestivum
  misc_feature (1)..(1281): Ceres Seq. ID no. 12780298
ccaccttatgcaagaggggtttcatcatttaggcatctcattgctagattgcctgcaagggcccactctatttattacagagatgaaatcggtaatatttcaacatcacacttatggagtgattcgaagaagacccaactggaaattgaaccgaggtttcccttgtttggtggttggcaaacaacctttactattggttatggtttacctcttcaagactttgttttcagtgctgatggaaagagatttctcaatatcacatttggttctccaatggaggagattctcatagaaaagctcatcgtaaaggtggttctacctgaaggttcaaaggatattgatgtttcagctccatttccaacaaatcaatggcaagaggtgaagtattcacaccttgacattgctggaaggccagttcttgtcttggaaaagcctgatgttattccagagcataatttgcatttccaggtgtactacaaattcaataacatctcgttgctcatagagccgatgatgttgattactggcttcttcctcctgtttgttgcatgtattgcctacatgcacactgacatgtcaatctctaagaactctccttcttatctggcaaagctgcaatgggatgaggtgcaagccactgttcagcaaatccagggcatctttcaccagtgcttagctgttcatgataagctagagacatcattgcacgatttgtctaggtctggagacgctaaatcttgcaaagcagctcgtaaagccgctgatgcacagtttaaggaattagcgaaagagctgaagccgctgttgttatctgtacagtcatcccctcagtcttatcagatatggccaaagctagaggacttggttgcgaaggagagggagatgcaggagaagctcatggcgaggcatgccaccgtggttgacagcgtcgagaagaagcagcgcgggcaagacatagaaaaccggatttcctcccagcagcagaagatcgctgcgctgaggcaagaggtcgaatctcttctagagtaccttagcgagatatgagcgaatccggtctcatcttacatgattagtgattagactgaaggtcatcttctgcactttgtgtagatgttgtgttggtaacccattatcctagttcctgaggctaggtttcctagactctgtaatgtgatataagcgccttaatcattttggaactgattaatttttttgcatcatctaaaaagaaatcatggggaaccacccccttgggactccttttgcttaagtggttattgt

SEQ ID NO: 16261 - protein, 347 aa, Triticum aestivum
  peptide (1)..(347): Ceres Seq. ID no. 12780299
  misc_feature (2)..(189): Pfam Name: Pfam Description:  Ribophorin I
  misc_feature (83)..(347): NCBI GI NO: 5918187 NR Description: ribophorin I [Hordeum vulgare]
  misc_feature (2)..(347): NCBI GI NO: 15223039 NR Description: putative ribophorin I
  misc_feature (2)..(209): NCBI GI NO: 7489438 NR Description: ribophorin I homolog - barley (fragment)
  misc_feature (6)..(194): NCBI GI NO: 15226341 NR Description: putative ribophorin I; protein id: At2g01720.1
  misc_feature (172)..(347): NCBI GI NO: 24417456 NR Description: unknown [Arabidopsis thaliana]
  misc_feature (6)..(344): NCBI GI NO: 4506675 NR Description: ribophorin I [Homo sapiens]
  misc_feature (6)..(344): NCBI GI NO: 14124942 NR Description: Similar to ribophorin I [Homo sapiens]
  misc_feature (6)..(344): NCBI GI NO: 9857227 NR Description: ribophorin I [Sus scrofa]
  misc_feature (6)..(344): NCBI GI NO: 38512106 NR Description: Ribophorin I [Rattus norvegicus]
  misc_feature (6)..(330): NCBI GI NO: 28175644 NR Description: Similar to ribophorin I [Xenopus laevis]
PPYARGVSSFRHLIARLPARAHSIYYRDEIGNISTSHLWSDSKKTQLEIEPRFPLFGGWQTTFTIGYGLPLQDFVFSADGKRFLNITFGSPMEEILIEKLIVKVVLPEGSKDIDVSAPFPTNQWQEVKYSHLDIAGRPVLVLEKPDVIPEHNLHFQVYYKFNNISLLIEPMMLITGFFLLFVACIAYMHTDMSISKNSPSYLAKLQWDEVQATVQQIQGIFHQCLAVHDKLETSLHDLSRSGDAKSCKAARKAADAQFKELAKELKPLLLSVQSSPQSYQIWPKLEDLVAKEREMQEKLMARHATVVDSVEKKQRGQDIENRISSQQQKIAALRQEVESLLEYLSEI

SEQ ID NO: 16262 - protein, 256 aa, Triticum aestivum
  peptide (1)..(256): Ceres Seq. ID no. 12780300
  misc_feature (1)..(98): Pfam Name: Pfam Description:  Ribophorin I
  misc_feature (1)..(256): NCBI GI NO: 5918187 NR Description: ribophorin I [Hordeum vulgare]
  misc_feature (1)..(256): NCBI GI NO: 15223039 NR Description: putative ribophorin I
  misc_feature (1)..(118): NCBI GI NO: 7489438 NR Description: ribophorin I homolog - barley (fragment)
  misc_feature (1)..(103): NCBI GI NO: 15226341 NR Description: putative ribophorin I; protein id: At2g01720.1
  misc_feature (81)..(256): NCBI GI NO: 24417456 NR Description: unknown [Arabidopsis thaliana]
  misc_feature (1)..(253): NCBI GI NO: 4506675 NR Description: ribophorin I [Homo sapiens]
  misc_feature (1)..(253): NCBI GI NO: 14124942 NR Description: Similar to ribophorin I [Homo sapiens]
  misc_feature (1)..(253): NCBI GI NO: 9857227 NR Description: ribophorin I [Sus scrofa]
  misc_feature (1)..(253): NCBI GI NO: 38512106 NR Description: Ribophorin I [Rattus norvegicus]
  misc_feature (1)..(239): NCBI GI NO: 28175644 NR Description: Similar to ribophorin I [Xenopus laevis]
MEEILIEKLIVKVVLPEGSKDIDVSAPFPTNQWQEVKYSHLDIAGRPVLVLEKPDVIPEHNLHFQVYYKFNNISLLIEPMMLITGFFLLFVACIAYMHTDMSISKNSPSYLAKLQWDEVQATVQQIQGIFHQCLAVHDKLETSLHDLSRSGDAKSCKAARKAADAQFKELAKELKPLLLSVQSSPQSYQIWPKLEDLVAKEREMQEKLMARHATVVDSVEKKQRGQDIENRISSQQQKIAALRQEVESLLEYLSEI

SEQ ID NO: 16263 - protein, 177 aa, Triticum aestivum
  peptide (1)..(177): Ceres Seq. ID no. 12780301
  misc_feature (1)..(177): NCBI GI NO: 5918187 NR Description: ribophorin I [Hordeum vulgare]
  misc_feature (1)..(177): NCBI GI NO: 15223039 NR Description: putative ribophorin I
  misc_feature (1)..(39): NCBI GI NO: 7489438 NR Description: ribophorin I homolog - barley (fragment)
  misc_feature (1)..(24): NCBI GI NO: 15226341 NR Description: putative ribophorin I; protein id: At2g01720.1
  misc_feature (2)..(177): NCBI GI NO: 24417456 NR Description: unknown [Arabidopsis thaliana]
  misc_feature (1)..(174): NCBI GI NO: 4506675 NR Description: ribophorin I [Homo sapiens]
  misc_feature (1)..(174): NCBI GI NO: 14124942 NR Description: Similar to ribophorin I [Homo sapiens]
  misc_feature (1)..(174): NCBI GI NO: 9857227 NR Description: ribophorin I [Sus scrofa]
  misc_feature (1)..(174): NCBI GI NO: 38512106 NR Description: Ribophorin I [Rattus norvegicus]
  misc_feature (1)..(160): NCBI GI NO: 28175644 NR Description: Similar to ribophorin I [Xenopus laevis]
MMLITGFFLLFVACIAYMHTDMSISKNSPSYLAKLQWDEVQATVQQIQGIFHQCLAVHDKLETSLHDLSRSGDAKSCKAARKAADAQFKELAKELKPLLLSVQSSPQSYQIWPKLEDLVAKEREMQEKLMARHATVVDSVEKKQRGQDIENRISSQQQKIAALRQEVESLLEYLSEI

SEQ ID NO: 16264 - DNA, 826 bp, Triticum aestivum
  misc_feature (1)..(826): Ceres Seq. ID no. 13656871
tagaacatcataatcgaaaacccgatcgcatcctggtcacggactcacgggcccttgtgacgcgatgctgcgcagcttccctcaggcccgtccgctcctcaggaggatggggttcgacaagagggatgcctacttctttaagcagattggcaagggcatgctctgcacctacgcgcttttcggcgcagcatggctctggaatgagacgtcgccgcttggttggtggacgctcaagccactccccaaggaagaaaaagaaatggcacatctttatgagcgcagggagtttccctaccctggtgatgaagaggcagttgaggagttcataaaaagtgagggtgctctaggtaccacgatcgggcccaaaggttttgcggatacaaatgtggactctgataaaatgcagaagcaactacagtcgaaaaagtttgaccaggaggcacaaaacctctggttccgaatgaggaatgaggttgcacatgaactacaagagaagggatttggtgttgaatgaagttttattcttctgaaaggagaagtgaaatggtgtcatgctagagttatctttggaccgtctcagctctgctaattgacacatcagctagtaacttagaataaatgcaaataggaaacatggagcttatgctacgattatcctcctttttcccgctctctgcctgggctctatcttattctatggcaaatgtctttgcagagcatctacgttgtgtcatgtcatgccaatattaatcttgttggcttgttccatttcttctgttactgatttctgatctttaagacatgttatcaaccagttgttgagtcc

SEQ ID NO: 16265 - protein, 149 aa, Triticum aestivum
  peptide (1)..(149): Ceres Seq. ID no. 15220594
  misc_feature (1)..(149): NCBI GI NO: 14587335 NR Description: P0460H02.16
  misc_feature (2)..(149): NCBI GI NO: 21592650 NR Description: unknown [Arabidopsis thaliana]
  misc_feature (2)..(149): NCBI GI NO: 15237778 NR Description: expressed protein [Arabidopsis thaliana]
MLRSFPQARPLLRRMGFDKRDAYFFKQIGKGMLCTYALFGAAWLWNETSPLGWWTLKPLPKEEKEMAHLYERREFPYPGDEEAVEEFIKSEGALGTTIGPKGFADTNVDSDKMQKQLQSKKFDQEAQNLWFRMRNEVAHELQEKGFGVE

SEQ ID NO: 16266 - protein, 135 aa, Triticum aestivum
  peptide (1)..(135): Ceres Seq. ID no. 15220595
  misc_feature (1)..(135): NCBI GI NO: 14587335 NR Description: P0460H02.16
  misc_feature (1)..(135): NCBI GI NO: 21592650 NR Description: unknown [Arabidopsis thaliana]
  misc_feature (1)..(135): NCBI GI NO: 15237778 NR Description: expressed protein [Arabidopsis thaliana]
MGFDKRDAYFFKQIGKGMLCTYALFGAAWLWNETSPLGWWTLKPLPKEEKEMAHLYERREFPYPGDEEAVEEFIKSEGALGTTIGPKGFADTNVDSDKMQKQLQSKKFDQEAQNLWFRMRNEVAHELQEKGFGVE

SEQ ID NO: 16267 - protein, 118 aa, Triticum aestivum
  peptide (1)..(118): Ceres Seq. ID no. 15220596
  misc_feature (1)..(118): NCBI GI NO: 14587335 NR Description: P0460H02.16
  misc_feature (1)..(118): NCBI GI NO: 21592650 NR Description: unknown [Arabidopsis thaliana]
  misc_feature (1)..(118): NCBI GI NO: 15237778 NR Description: expressed protein [Arabidopsis thaliana]
MLCTYALFGAAWLWNETSPLGWWTLKPLPKEEKEMAHLYERREFPYPGDEEAVEEFIKSEGALGTTIGPKGFADTNVDSDKMQKQLQSKKFDQEAQNLWFRMRNEVAHELQEKGFGVE

SEQ ID NO: 16268 - DNA, 943 bp, Triticum aestivum
  misc_feature (1)..(943): Ceres Seq. ID no. 12619560
acatacgctaaaaaaaaacacatgcgccgtaatggcccttaggtgcgcggccggcggcggcggcggcggcggcgcctacctgacgccgcggaggagcagatgctgcggcgtcggctctgcgcgaccctcagccacgaccagggggacacgagggctcagcctcctcctgaggatcccgtcctcacaatactccgaagctccatgggcgttgcgctgctcgcctgattcccctcctctggagggtgaccagcattcagatcgaactggggcgctgggggcgctgaaggccatggtgtgcgacatgttcaggcccctggcgcgcaacatctcggatatccgatcccttcgcactgtctttgacctcgaggattatcaagtcggcatgctgtttggtgcttttcttggctgcgtcgggtgctaccagctgtggaaggctgctccttccatctttgttgatgctgcccttgcctatgcattctataaactgagcgttatgtcctcggaggtgcgccggcagggcaaatgcaatgatttgctgactcgcttgaaatttggtattgtggttattatggctactaaggacttcaggaagaactatgaactcttggatattgtcaagatgcctgttttctttctttatctttcgacattcatctttgatgtggcacgcatgaagaaatatgcaaagcattatctgattctcacagttaatttattgagaatgaagggcggagctcaagaattgttcagaataatgttttatccgagctatacatctccatatgatgattgcttccgtaggaaataaaatgtagacccctgagattgtgtggatctgtttatgtgagatttttatataagaatttttagtataatgtgtaataacatttatgtaatgctagtttacttgcccatggttgtgtacagttttgcggcattcttc

SEQ ID NO: 16269 - protein, 268 aa, Triticum aestivum
  peptide (1)..(268): Ceres Seq. ID no. 12619561
  misc_feature (13)..(244): NCBI GI NO: 38344913 NR Description: OSJNBb0079B02.16
HTLKKNTCAVMALRCAAGGGGGGGAYLTPRRSRCCGVGSARPSATTRGTRGLSLLLRIPSSQYSEAPWALRCSPDSPPLEGDQHSDRTGALGALKAMVCDMFRPLARNISDIRSLRTVFDLEDYQVGMLFGAFLGCVGCYQLWKAAPSIFVDAALAYAFYKLSVMSSEVRRQGKCNDLLTRLKFGIVVIMATKDFRKNYELLDIVKMPVFFLYLSTFIFDVARMKKYAKHYLILTVNLLRMKGGAQELFRIMFYPSYTSPYDDCFRRK

SEQ ID NO: 16270 - protein, 258 aa, Triticum aestivum; identical to SEQ ID NO: 15128
  peptide (1)..(258): Ceres Seq. ID no. 12619562
  misc_feature (3)..(234): NCBI GI NO: 38344913 NR Description: OSJNBb0079B02.16

SEQ ID NO: 16271 - protein, 172 aa, Triticum aestivum; identical to SEQ ID NO: 15129
  peptide (1)..(172): Ceres Seq. ID no. 12619563
  misc_feature (1)..(148): NCBI GI NO: 38344913 NR Description: OSJNBb0079B02.16

SEQ ID NO: 16272 - DNA, 1504 bp, Triticum aestivum
  misc_feature (1)..(1504): Ceres Seq. ID no. 14303664
ataaaatcggagaaacccagaaaaaaaaggactaaacgagatactgagagccgaagacctaaattccgtagagaaaactcgcatcgccgccgctgcctagatcgccgggcgccgccatgtcgaccccgggcgccgcctactacgcttccctcgcgcgcaagcagtacttctgctaccaatgcaaccgcaccgtcctcatcgccgcctccgccgcggccgccggcgagctctcatgccccgactgccgcggcgacttcctggaggaggtcaccgtccccgcccccaccatcctccccttcccctttgccttcccccctatgatgcccaccgcctcctccccgtcccgatcctcctcctcctccaccgccgcgcccccctccagcgacctctccaacttcctcaccagcatcctcgacctccaggagggccgccgcgttaggtccaggagcgggagcggtgccgcctcggccgctggcacggccacgcctgagaacgagccggagtccttcgacccgctcgtgtttttccagaactacatccacaccctcatggaggggggcgccaacatccaggtgctcctcgacgacgccagcgtcaacctcgcccccggcctaggcggccgtgccggtgggacaagctacggggactacttcgtcggcccgggactggagcaactcatcgagcagctcgccgagaacgatcccaaccgctatggcacgccgccggctgccaagtccgccctgaccactcttcctgacgtcgttgtcaccgatgccatggttgcggcggcagagggcgccgagtgtgctgtgtgcaaggaagatttctcacctggagatggggccaagcagatgccctgcaagcatatctaccacgcagattgcatcgtaccctggttggagctccacaattcgtgccccatttgtcgctttgagctgcccaccgatgatcctgattatgagggcaataaggcctcaaacgcacagtcagctgttggtatcgctgctgctgctgcatctgggagctctggtgctgctgaggaaggaggggaggagagtggggaggctgcaagggtggtggaaaggagattcaatgtgtcattggcttggccgtttggtggattggcaggtcaaacaccacagcaagatgggaacaatgccggtgctggcagtagctcacaggacagcggttcgcaggatggagctggtggcagtaacaaaaattgaacacaaatctgtgatcagttggaggtctccttgtcggcgatgcgtccagaggtcgacaatgttgatgcgccaccgtgagttatactacagacaatcgaaagaccaaaggaatttacagcctgtttatttggtggaacaaaacagtgttggttttagttgtcgttgtcgctgtccgttagggcgtgtacgcaaggcacagagactgccgtggcaggaagttgtgcgttgcgtagactctttgtgcagatttgttaaattgattctcgtttatggacccc

SEQ ID NO: 16273 - protein, 369 aa, Triticum aestivum
  peptide (1)..(369): Ceres Seq. ID no. 14303665
  misc_feature (230)..(270): Pfam Name: RING finger Pfam Description: Zinc finger, C3HC4 type
  misc_feature (1)..(368): NCBI GI NO: 37535546 NR Description: putative zinc finger protein
  misc_feature (28)..(292): NCBI GI NO: 11994207 NR Description: gene_id:MPN9.20~unknown protein
  misc_feature (28)..(292): NCBI GI NO: 15231003 NR Description: expressed protein [Arabidopsis thaliana]
  misc_feature (173)..(368): NCBI GI NO: 15241188 NR Description: expressed protein [Arabidopsis thaliana]
  misc_feature (136)..(311): NCBI GI NO: 34903272 NR Description: unnamed protein product
  misc_feature (17)..(51): NCBI GI NO: 34903272 NR Description: unnamed protein product
  misc_feature (90)..(356): NCBI GI NO: 18405518 NR Description: RING-H2 finger protein (RHC1a)
  misc_feature (75)..(276): NCBI GI NO: 18410530 NR Description: expressed protein [Arabidopsis thaliana]
  misc_feature (174)..(353): NCBI GI NO: 18405411 NR Description: expressed protein [Arabidopsis thaliana]
  misc_feature (174)..(304): NCBI GI NO: 15231238 NR Description: expressed protein [Arabidopsis thaliana]
MSTPGAAYYASLARKQYFCYQCNRTVLIAASAAAAGELSCPDCRGDFLEEVTVPAPTILPFPFAFPPMMPTASSPSRSSSSSTAAPPSSDLSNFLTSILDLQEGRRVRSRSGSGAASAAGTATPENEPESFDPLVFFQNYIHTLMEGGANIQVLLDDASVNLAPGLGGRAGGTSYGDYFVGPGLEQLIEQLAENDPNRYGTPPAAKSALTTLPDVVVTDAMVAAAEGAECAVCKEDFSPGDGAKQMPCKHIYHADCIVPWLELHNSCPICRFELPTDDPDYEGNKASNAQSAVGIAAAAASGSSGAAEEGGEESGEAARVVERRFNVSLAWPFGGLAGQTPQQDGNNAGAGSSSQDSGSQDGAGGSNKN

SEQ ID NO: 16274 - protein, 302 aa, Triticum aestivum
  peptide (1)..(302): Ceres Seq. ID no. 14303666
  misc_feature (163)..(203): Pfam Name: RING finger Pfam Description: Zinc finger, C3HC4 type
  misc_feature (1)..(301): NCBI GI NO: 37535546 NR Description: putative zinc finger protein
  misc_feature (1)..(225): NCBI GI NO: 11994207 NR Description: gene_id:MPN9.20~unknown protein
  misc_feature (1)..(225): NCBI GI NO: 15231003 NR Description: expressed protein [Arabidopsis thaliana]
  misc_feature (106)..(301): NCBI GI NO: 15241188 NR Description: expressed protein [Arabidopsis thaliana]
  misc_feature (69)..(244): NCBI GI NO: 34903272 NR Description: unnamed protein product
  misc_feature (23)..(289): NCBI GI NO: 18405518 NR Description: RING-H2 finger protein (RHC1a)
  misc_feature (8)..(209): NCBI GI NO: 18410530 NR Description: expressed protein [Arabidopsis thaliana]
  misc_feature (107)..(286): NCBI GI NO: 18405411 NR Description: expressed protein [Arabidopsis thaliana]
  misc_feature (107)..(237): NCBI GI NO: 15231238 NR Description: expressed protein [Arabidopsis thaliana]
  misc_feature (107)..(237): NCBI GI NO: 38454178 NR Description: At3g13430 [Arabidopsis thaliana]
MMPTASSPSRSSSSSTAAPPSSDLSNFLTSILDLQEGRRVRSRSGSGAASAAGTATPENEPESFDPLVFFQNYIHTLMEGGANIQVLLDDASVNLAPGLGGRAGGTSYGDYFVGPGLEQLIEQLAENDPNRYGTPPAAKSALTTLPDVVVTDAMVAAAEGAECAVCKEDFSPGDGAKQMPCKHIYHADCIVPWLELHNSCPICRFELPTDDPDYEGNKASNAQSAVGIAAAAASGSSGAAEEGGEESGEAARVVERRFNVSLAWPFGGLAGQTPQQDGNNAGAGSSSQDSGSQDGAGGSNKN

SEQ ID NO: 16275 - protein, 301 aa, Triticum aestivum
  peptide (1)..(301): Ceres Seq. ID no. 14303667
  misc_feature (162)..(202): Pfam Name: RING finger Pfam Description: Zinc finger, C3HC4 type
  misc_feature (1)..(300): NCBI GI NO: 37535546 NR Description: putative zinc finger protein
  misc_feature (1)..(224): NCBI GI NO: 11994207 NR Description: gene_id:MPN9.20~unknown protein
  misc_feature (1)..(224): NCBI GI NO: 15231003 NR Description: expressed protein [Arabidopsis thaliana]
  misc_feature (105)..(300): NCBI GI NO: 15241188 NR Description: expressed protein [Arabidopsis thaliana]
  misc_feature (68)..(243): NCBI GI NO: 34903272 NR Description: unnamed protein product
  misc_feature (22)..(288): NCBI GI NO: 18405518 NR Description: RING-H2 finger protein (RHC1a)
  misc_feature (7)..(208): NCBI GI NO: 18410530 NR Description: expressed protein [Arabidopsis thaliana]
  misc_feature (106)..(285): NCBI GI NO: 18405411 NR Description: expressed protein [Arabidopsis thaliana]
  misc_feature (106)..(236): NCBI GI NO: 15231238 NR Description: expressed protein [Arabidopsis thaliana]
  misc_feature (106)..(236): NCBI GI NO: 38454178 NR Description: At3g13430 [Arabidopsis thaliana]
MPTASSPSRSSSSSTAAPPSSDLSNFLTSILDLQEGRRVRSRSGSGAASAAGTATPENEPESFDPLVFFQNYIHTLMEGGANIQVLLDDASVNLAPGLGGRAGGTSYGDYFVGPGLEQLIEQLAENDPNRYGTPPAAKSALTTLPDVVVTDAMVAAAEGAECAVCKEDFSPGDGAKQMPCKHIYHADCIVPWLELHNSCPICRFELPTDDPDYEGNKASNAQSAVGIAAAAASGSSGAAEEGGEESGEAARVVERRFNVSLAWPFGGLAGQTPQQDGNNAGAGSSSQDSGSQDGAGGSNKN

SEQ ID NO: 16276 - DNA, 759 bp, Triticum aestivum
  misc_feature (1)..(759): Ceres Seq. ID no. 13657166
cttagaggtttaccgagtatcggacatggagctggtaagagttcttcctagtgctgaagatgaagtcaatgttgcatgctttcatccttcccctggaggtggtcttgtttatgggactaaggaagggaagctcaggatcctacaacacaatggcgcagacgctgcaagcatggcgctgaattgctttatcgaggaaaatatgcttgaggttcagaggtatgcgttggaaggctgaatgatcatttgcgtcatgagcttatatgtgtccttccctgcaggaacttttgtctgcaagctccatttttgtttaggagagcctcatggactaaattacaagatatcatcagggcctccgactaaatctttcgagcggcagatgattctccacgagtttgttcaagtgcaatgtactgatctattgctggtttccagagaatgctgtgggccgactctaatcgtgcatcgttttgcaacttttaactcaggtctgtgcacaggcggtgtgatgatgtaaatttggcatggtcatcgttgctgtcaagttcccacgaccctgtaattataaaactgtacatgtaatctccaatcagcttaaaacaaccgctgttgtattttagaaagctcgcaatcctaatcctcaagtttcttttacgtgggaaatgtttgtactatttctgtcctgaccaatgccagtgatttgcattaagatgaatgaaaaaaaaaaaaaccaaccgctaccaaagaaggaagagaatgacg

SEQ ID NO: 16277 - protein, 92 aa, Triticum aestivum
  peptide (1)..(92): Ceres Seq. ID no. 13657167
MIICVMSLYVSFPAGTFVCKLHFCLGEPHGLNYKISSGPPTKSFERQMILHEFVQVQCTDLLLVSRECCGPTLIVHRFATFNSGLCTGGVMM

SEQ ID NO: 16278 - protein, 87 aa, Triticum aestivum
  peptide (1)..(87): Ceres Seq. ID no. 13657168
MSLYVSFPAGTFVCKLHFCLGEPHGLNYKISSGPPTKSFERQMILHEFVQVQCTDLLLVSRECCGPTLIVHRFATFNSGLCTGGVMM

SEQ ID NO: 16279 - protein, 77 aa, Triticum aestivum
  peptide (1)..(77): Ceres Seq. ID no. 13657169
  misc_feature (1)..(76): NCBI GI NO: 18379250 NR Description: transducin / WD-40 repeat protein family
  misc_feature (1)..(71): NCBI GI NO: 30678798 NR Description: transducin / WD-40 repeat protein family
  misc_feature (1)..(69): NCBI GI NO: 7485877 NR Description: hypothetical protein F20D22
  misc_feature (1)..(52): NCBI GI NO: 15240053 NR Description: transducin / WD-40 repeat protein family
  misc_feature (1)..(52): NCBI GI NO: 9758552 NR Description: contains similarity to unknownprotein~gene_id:MRH10
LEVYRVSDMELVRVLPSAEDEVNVACFHPSPGGGLVYGTKEGKLRILQHNGADAASMALNCFIEENMLEVQRYALEG

SEQ ID NO: 16280 - DNA, 1349 bp, Triticum aestivum
  misc_feature (1)..(1349): Ceres Seq. ID no. 13657515
atcggttagatattttctaggccacaaaaaaaaggttggtcgcaaaattagagaaggttgaggcgggcgtctggcatggaggcggaggcaaaggcgacctgggcggcggcgcctggctcgggagcggcgactgccgacgggggcttccctgtagatccggtgtgcagcgaaggttgccaatcttcccaggcgtggcggtctcggcgggttcggtccaagatgaagtcagcgatggtgctggctggaggagacgttgggttgttgcctcttctgtggctgcccatgacagctgtgccgccggcgctgccgaatgcagtggagagagcgccccagcggagtcgggagagtcagctgtgaaacctgatccgaaatctgtaggctggataagaagggtgcgagtgggcgcaaatccgatagagcgtatgccttgccctggcaggatgggagcgcttgagaagactatcaggggcttcgtggacagggagggtgatgaagtagtcaagccagagttagggaccactttcgattccctgacagaggcttatgatttttacaatatgtattcgtgggaacatggcttcggcattagatacgggaaaaccaggctaaatcctgataagaggaagaccatgcaggagattgtgtgcggatgctcggggaaaccccttcgagaaaatacaagaccgtgtaggtgcaagtgccctgcaatgattaggctgttgaggacatcggacaacgggtggtacatcacagagcatcgtgtcaagcataatcatgtcatgacgccaaattgtggtgaaatgttgcactggccgtcacacaagcacattgacgtgtacacgagagaccttgttcgtaacctaaggaagaacaacatcaacctgagcaaggtgtacaacataattggagggttctttgggacagtggagaatgtgccttttacgaaaagatctcttcggagcctgtgtgggcaaattagcagggacgaggcagaggacgacgtgaggaatacaagttttcgatgaactaggtgcaaaggacccggctaaatggcccaactccgcgatggacggccctcttaaacaccgtaacgggaggaccgtactgaaccttgcccccctgggcctcatcaatgagtacagacaacacactcatgcactgttcaaaaaagcctgcactaattgaatacatgggccaatacattcatgagctcgaatctccaggaggaccaaccgctgggataatagtaccatatgccagtacaacccatatgtaattttcgtatttgttgacatataaacaaactattgagacgataacgttctaaaagcatgtagtcaaacttttgt

SEQ ID NO: 16281 - protein, 200 aa, Triticum aestivum
  peptide (1)..(200): Ceres Seq. ID no. 13657516
  misc_feature (42)..(197): Pfam Name: Pfam Description:  FAR1 family
  misc_feature (6)..(141): NCBI GI NO: 37533034 NR Description: hypothetical protein
  misc_feature (25)..(197): NCBI GI NO: 34394693 NR Description: far-red impaired response protein-like protein
  misc_feature (24)..(197): NCBI GI NO: 38346868 NR Description: OSJNBb0002N06.8
  misc_feature (24)..(197): NCBI GI NO: 34894408 NR Description: P0702D12.15
  misc_feature (25)..(200): NCBI GI NO: 34902304 NR Description: Unknown protein
  misc_feature (24)..(147): NCBI GI NO: 32490045 NR Description: OSJNBa0063C18.5
  misc_feature (25)..(161): NCBI GI NO: 38346788 NR Description: OSJNBa0095H06.13
  misc_feature (23)..(194): NCBI GI NO: 34899212 NR Description: similar to FAR1 domain
  misc_feature (13)..(118): NCBI GI NO: 18397514 NR Description: expressed protein [Arabidopsis thaliana]
  misc_feature (79)..(197): NCBI GI NO: 34904846 NR Description: OJ1484_G09.16
MPCPGRMGALEKTIRGFVDREGDEVVKPELGTTFDSLTEAYDFYNMYSWEHGFGIRYGKTRLNPDKRKTMQEIVCGCSGKPLRENTRPCRCKCPAMIRLLRTSDNGWYITEHRVKHNHVMTPNCGEMLHWPSHKHIDVYTRDLVRNLRKNNINLSKVYNIIGGFFGTVENVPFTKRSLRSLCGQISRDEAEDDVRNTSFR

SEQ ID NO: 16282 - protein, 194 aa, Triticum aestivum
  peptide (1)..(194): Ceres Seq. ID no. 13657517
  misc_feature (36)..(191): Pfam Name: Pfam Description:  FAR1 family
  misc_feature (1)..(135): NCBI GI NO: 37533034 NR Description: hypothetical protein
  misc_feature (19)..(191): NCBI GI NO: 34394693 NR Description: far-red impaired response protein-like protein
  misc_feature (18)..(191): NCBI GI NO: 38346868 NR Description: OSJNBb0002N06.8
  misc_feature (18)..(191): NCBI GI NO: 34894408 NR Description: P0702D12.15
  misc_feature (19)..(194): NCBI GI NO: 34902304 NR Description: Unknown protein
  misc_feature (18)..(141): NCBI GI NO: 32490045 NR Description: OSJNBa0063C18.5
  misc_feature (19)..(155): NCBI GI NO: 38346788 NR Description: OSJNBa0095H06.13
  misc_feature (17)..(188): NCBI GI NO: 34899212 NR Description: similar to FAR1 domain
  misc_feature (7)..(112): NCBI GI NO: 18397514 NR Description: expressed protein [Arabidopsis thaliana]
  misc_feature (73)..(191): NCBI GI NO: 34904846 NR Description: OJ1484_G09.16
MGALEKTIRGFVDREGDEVVKPELGTTFDSLTEAYDFYNMYSWEHGFGIRYGKTRLNPDKRKTMQEIVCGCSGKPLRENTRPCRCKCPAMIRLLRTSDNGWYITEHRVKHNHVMTPNCGEMLHWPSHKHIDVYTRDLVRNLRKNNINLSKVYNIIGGFFGTVENVPFTKRSLRSLCGQISRDEAEDDVRNTSFR

SEQ ID NO: 16283 - protein, 155 aa, Triticum aestivum
  peptide (1)..(155): Ceres Seq. ID no. 13657518
  misc_feature (1)..(152): Pfam Name: Pfam Description:  FAR1 family
  misc_feature (1)..(96): NCBI GI NO: 37533034 NR Description: hypothetical protein
  misc_feature (1)..(152): NCBI GI NO: 34394693 NR Description: far-red impaired response protein-like protein
  misc_feature (1)..(152): NCBI GI NO: 38346868 NR Description: OSJNBb0002N06.8
  misc_feature (1)..(152): NCBI GI NO: 34894408 NR Description: P0702D12.15
  misc_feature (1)..(155): NCBI GI NO: 34902304 NR Description: Unknown protein
  misc_feature (1)..(102): NCBI GI NO: 32490045 NR Description: OSJNBa0063C18.5
  misc_feature (1)..(116): NCBI GI NO: 38346788 NR Description: OSJNBa0095H06.13
  misc_feature (1)..(149): NCBI GI NO: 34899212 NR Description: similar to FAR1 domain
  misc_feature (1)..(73): NCBI GI NO: 18397514 NR Description: expressed protein [Arabidopsis thaliana]
  misc_feature (34)..(152): NCBI GI NO: 34904846 NR Description: OJ1484_G09.16
MYSWEHGFGIRYGKTRLNPDKRKTMQEIVCGCSGKPLRENTRPCRCKCPAMIRLLRTSDNGWYITEHRVKHNHVMTPNCGEMLHWPSHKHIDVYTRDLVRNLRKNNINLSKVYNIIGGFFGTVENVPFTKRSLRSLCGQISRDEAEDDVRNTSFR

SEQ ID NO: 16284 - DNA, 1452 bp, Triticum aestivum
  misc_feature (1)..(1452): Ceres Seq. ID no. 13591273
ccagtccacctccccccctatccccaccgcctccacaaccccaccccccccctccgctgcccctcccatcgcattcgcatccacctccgcgccccaagcacagcacaggggaagaagcgatcggcaatggcgtcctccacccagggccaggtcatcacctgcaaagcggcggtggcgtacgaggcgaacaagccgctggtggtggaggacgtgcaggtggcgccgccgcaggccggcgaggtccgcatcaagatcctctccaccgcgctctgccacaccgactactacacctggagcggcaaggatcctgagggtctctttccttgcattctcggtcatgaggctgctggaatcgttgagagcgttggcgaaggggtgaccgatgtgcagcctggggaccatgtcatcccttgctaccaagcggaatgcaagaactgcaagatgtgcaacagcgggaagaccaacctctgcggcaaagttcgtggcgccacaggggtaggggtcatgatgagcgaccgcaagagccgcttctcggtgaatgggaagcccatctaccatttcatggggacgtcgacgttcagtcagtacactgttgtgcatgacgtcagtgttgcgaagatcaacccgcaggcgcccctggataaggtctgcctgctcggctgtggtgtttccactggtcttggagcagtatggaatactgcaaaggttgaagcaggttcagttgttgctgtttttgggcttggcacagttggacttgcagttgctgagggggcaaaatcagctggtgcttctcggattattggcattgacattgatgccaagaagtttgatgttgctaagaactttggagtcacagagtttgtgaacccaaaagaccatgacaaaccaatccagcaggtcctagttgaccttacagatggtggtgtggattacagttttgagtgcatcggaaatgtttctatcatgagggctgcactcgaatgctgccacaagggctggggtacctctgttgtcgttggtgtagctgcatctggccaggagattgccacacggccattccagcttgtcactggccgtgtctggaagggaacagcttttggtggcttcaagagtcggagccaggttccatggctcgtcgagaagtacatgaacaaggaaatcaaggtggacgagtacatcacccacaacatgaaccttaccgatatcaacaaggcgttcgacctgctgcacgaaggcggctgcctgcggtgcgtgctggccatggagcactgaggatcctgctatgtgtctcgccctgcctcgaagcggagcagtttgtgtcgtgtgaagttgtaatgcagatctatcctccgccctgggactatagaactcgtttggcctagaaactcttgaacacgaaccgctgctataataatatgttgtgttggatggttgcctctggttggggtcatt

SEQ ID NO: 16285 - protein, 423 aa, Triticum aestivum
  peptide (1)..(423): Ceres Seq. ID no. 13591274
  misc_feature (43)..(422): NCBI GI NO: 3023271 NR Description: ALCOHOL DEHYDROGENASE CLASS III
  misc_feature (43)..(422): NCBI GI NO: 6225010 NR Description: ALCOHOL DEHYDROGENASE CLASS III
  misc_feature (46)..(419): NCBI GI NO: 2129562 NR Description: alcohol dehydrogenase (EC 1
  misc_feature (46)..(419): NCBI GI NO: 15240054 NR Description: alcohol dehydrogenase class III
  misc_feature (46)..(419): NCBI GI NO: 1498024 NR Description: glutathione-dependent formaldehyde dehydrogenase
  misc_feature (46)..(421): NCBI GI NO: 3121727 NR Description: ALCOHOL DEHYDROGENASE CLASS III
  misc_feature (47)..(419): NCBI GI NO: 18858257 NR Description: alcohol dehydrogenase 5 [Danio rerio]
  misc_feature (47)..(419): NCBI GI NO: 25283011 NR Description: alcohol dehydrogenase (EC 1.1.1.1) 3 - zebra fish
  misc_feature (47)..(419): NCBI GI NO: 5902742 NR Description: ALCOHOL DEHYDROGENASE CLASS III
  misc_feature (46)..(419): NCBI GI NO: 5902740 NR Description: ALCOHOL DEHYDROGENASE CLASS III H CHAIN
PVHLPPYPHRLHNPTPPLRCPSHRIRIHLRAPSTAQGKKRSAMASSTQGQVITCKAAVAYEANKPLVVEDVQVAPPQAGEVRIKILSTALCHTDYYTWSGKDPEGLFPCILGHEAAGIVESVGEGVTDVQPGDHVIPCYQAECKNCKMCNSGKTNLCGKVRGATGVGVMMSDRKSRFSVNGKPIYHFMGTSTFSQYTVVHDVSVAKINPQAPLDKVCLLGCGVSTGLGAVWNTAKVEAGSVVAVFGLGTVGLAVAEGAKSAGASRIIGIDIDAKKFDVAKNFGVTEFVNPKDHDKPIQQVLVDLTDGGVDYSFECIGNVSIMRAALECCHKGWGTSVVVGVAASGQEIATRPFQLVTGRVWKGTAFGGFKSRSQVPWLVEKYMNKEIKVDEYITHNMNLTDINKAFDLLHEGGCLRCVLAMEH

SEQ ID NO: 16286 - protein, 381 aa, Triticum aestivum
  peptide (1)..(381): Ceres Seq. ID no. 13591275
  misc_feature (1)..(380): NCBI GI NO: 3023271 NR Description: ALCOHOL DEHYDROGENASE CLASS III
  misc_feature (1)..(380): NCBI GI NO: 6225010 NR Description: ALCOHOL DEHYDROGENASE CLASS III
  misc_feature (4)..(377): NCBI GI NO: 2129562 NR Description: alcohol dehydrogenase (EC 1
  misc_feature (4)..(377): NCBI GI NO: 15240054 NR Description: alcohol dehydrogenase class III
  misc_feature (4)..(377): NCBI GI NO: 1498024 NR Description: glutathione-dependent formaldehyde dehydrogenase
  misc_feature (4)..(379): NCBI GI NO: 3121727 NR Description: ALCOHOL DEHYDROGENASE CLASS III
  misc_feature (5)..(377): NCBI GI NO: 18858257 NR Description: alcohol dehydrogenase 5 [Danio rerio]
  misc_feature (5)..(377): NCBI GI NO: 25283011 NR Description: alcohol dehydrogenase (EC 1.1.1.1) 3 - zebra fish
  misc_feature (5)..(377): NCBI GI NO: 5902742 NR Description: ALCOHOL DEHYDROGENASE CLASS III
  misc_feature (4)..(377): NCBI GI NO: 5902740 NR Description: ALCOHOL DEHYDROGENASE CLASS III H CHAIN
MASSTQGQVITCKAAVAYEANKPLVVEDVQVAPPQAGEVRIKILSTALCHTDYYTWSGKDPEGLFPCILGHEAAGIVESVGEGVTDVQPGDHVIPCYQAECKNCKMCNSGKTNLCGKVRGATGVGVMMSDRKSRFSVNGKPIYHFMGTSTFSQYTVVHDVSVAKINPQAPLDKVCLLGCGVSTGLGAVWNTAKVEAGSVVAVFGLGTVGLAVAEGAKSAGASRIIGIDIDAKKFDVAKNFGVTEFVNPKDHDKPIQQVLVDLTDGGVDYSFECIGNVSIMRAALECCHKGWGTSVVVGVAASGQEIATRPFQLVTGRVWKGTAFGGFKSRSQVPWLVEKYMNKEIKVDEYITHNMNLTDINKAFDLLHEGGCLRCVLAMEH

SEQ ID NO: 16287 - protein, 276 aa, Triticum aestivum
  peptide (1)..(276): Ceres Seq. ID no. 13591276
  misc_feature (1)..(275): NCBI GI NO: 3023271 NR Description: ALCOHOL DEHYDROGENASE CLASS III
  misc_feature (1)..(275): NCBI GI NO: 6225010 NR Description: ALCOHOL DEHYDROGENASE CLASS III
  misc_feature (1)..(272): NCBI GI NO: 2129562 NR Description: alcohol dehydrogenase (EC 1
  misc_feature (1)..(272): NCBI GI NO: 15240054 NR Description: alcohol dehydrogenase class III
  misc_feature (1)..(272): NCBI GI NO: 1498024 NR Description: glutathione-dependent formaldehyde dehydrogenase
  misc_feature (1)..(274): NCBI GI NO: 3121727 NR Description: ALCOHOL DEHYDROGENASE CLASS III
  misc_feature (1)..(272): NCBI GI NO: 18858257 NR Description: alcohol dehydrogenase 5 [Danio rerio]
  misc_feature (1)..(272): NCBI GI NO: 25283011 NR Description: alcohol dehydrogenase (EC 1.1.1.1) 3 - zebra fish
  misc_feature (1)..(272): NCBI GI NO: 5902742 NR Description: ALCOHOL DEHYDROGENASE CLASS III
  misc_feature (1)..(272): NCBI GI NO: 5902740 NR Description: ALCOHOL DEHYDROGENASE CLASS III H CHAIN
MCNSGKTNLCGKVRGATGVGVMMSDRKSRFSVNGKPIYHFMGTSTFSQYTVVHDVSVAKINPQAPLDKVCLLGCGVSTGLGAVWNTAKVEAGSVVAVFGLGTVGLAVAEGAKSAGASRIIGIDIDAKKFDVAKNFGVTEFVNPKDHDKPIQQVLVDLTDGGVDYSFECIGNVSIMRAALECCHKGWGTSVVVGVAASGQEIATRPFQLVTGRVWKGTAFGGFKSRSQVPWLVEKYMNKEIKVDEYITHNMNLTDINKAFDLLHEGGCLRCVLAMEH

SEQ ID NO: 16288 - DNA, 802 bp, Triticum aestivum
  misc_feature (1)..(802): Ceres Seq. ID no. 13657519
ccgtgtcctttttgaagaggaacaatcagcatataaccaagccatgcttcagaatatttgtgatgggaagatgcacccacttacatctatgcaccatacctccacatataatgcttctctatgcaaactgatggaatactgcttgagccctgctataactgtgcttcaggaccgtgtgaaagaaaacgaacttcggttagctatgctagtggaggaggctaaacaactggaggccgagcagagcacgaaaactggctctcctcgccgtgcgatgcccggagggactaccagtggcatcacttcgccaaggggccaggacaagtacccttccggcagacaagggggccctataagccctagcagcagcggccggaggaaggctccttgactcggaccttgctcgccattatgtcatgatggatagtccgattctgggccctgcctgatgctttctggaaccccaaacctgtcccttggcgcgaggggtgaagtcgcaatgcaaatgtacatacccatctcctttcagtgcctcgccgccgccgacgtcgacgtcgacggtatgttgcccgtcgtcgactagctcccgagacgctcgcatactacagtagcacaggatggatcatttaactgtgtgatggattcatctgtaacaatgttctaaattatgttcgtttgcgttttattctcagaagaagcgaacctgcgcagtgtgctagagccagcgtcgtcaattcgtcatgtttcgtagatagtgtctgtaatgatgtaatttctgtctctttttccaaggaaagacctaaat

SEQ ID NO: 16289 - protein, 128 aa, Triticum aestivum
  peptide (1)..(128): Ceres Seq. ID no. 13657520
  misc_feature (1)..(104): NCBI GI NO: 19715647 NR Description: AT3g06820/F3E22_4 [Arabidopsis thaliana]
  misc_feature (1)..(104): NCBI GI NO: 30680023 NR Description: expressed protein [Arabidopsis thaliana]
  misc_feature (1)..(97): NCBI GI NO: 20147355 NR Description: At1g80210/F18B13_28 [Arabidopsis thaliana]
RVLFEEEQSAYNQAMLQNICDGKMHPLTSMHHTSTYNASLCKLMEYCLSPAITVLQDRVKENELRLAMLVEEAKQLEAEQSTKTGSPRRAMPGGTTSGITSPRGQDKYPSGRQGGPISPSSSGRRKAP

SEQ ID NO: 16290 - protein, 114 aa, Triticum aestivum
  peptide (1)..(114): Ceres Seq. ID no. 13657521
  misc_feature (1)..(90): NCBI GI NO: 19715647 NR Description: AT3g06820/F3E22_4 [Arabidopsis thaliana]
  misc_feature (1)..(90): NCBI GI NO: 30680023 NR Description: expressed protein [Arabidopsis thaliana]
  misc_feature (1)..(83): NCBI GI NO: 20147355 NR Description: At1g80210/F18B13_28 [Arabidopsis thaliana]
MLQNICDGKMHPLTSMHHTSTYNASLCKLMEYCLSPAITVLQDRVKENELRLAMLVEEAKQLEAEQSTKTGSPRRAMPGGTTSGITSPRGQDKYPSGRQGGPISPSSSGRRKAP

SEQ ID NO: 16291 - protein, 105 aa, Triticum aestivum
  peptide (1)..(105): Ceres Seq. ID no. 13657522
  misc_feature (1)..(81): NCBI GI NO: 19715647 NR Description: AT3g06820/F3E22_4 [Arabidopsis thaliana]
  misc_feature (1)..(81): NCBI GI NO: 30680023 NR Description: expressed protein [Arabidopsis thaliana]
  misc_feature (1)..(74): NCBI GI NO: 20147355 NR Description: At1g80210/F18B13_28 [Arabidopsis thaliana]
MHPLTSMHHTSTYNASLCKLMEYCLSPAITVLQDRVKENELRLAMLVEEAKQLEAEQSTKTGSPRRAMPGGTTSGITSPRGQDKYPSGRQGGPISPSSSGRRKAP

SEQ ID NO: 16292 - DNA, 757 bp, Triticum aestivum
  misc_feature (1)..(757): Ceres Seq. ID no. 12443653
  misc_feature (753)..(753): n is a, c, t, g, unknown, or other
aatggagcttctccggcggcagatgctgaagcacccggcaggagagccccagcgctgggagaagatcgctgcagtgttcggcggccgccgcacgccggagagcgtcatccgcgcagcaaagtcgggcggcgccacggcggctggtggctcgttcgagcagttcctgcgcaagcgaaagccgctggacccaagggccggggccgctgacgcagacacaggtggcaatgctggaggaggggacggtggttggagtgctggcgaggaccgttctctgctgaacgcgctcaaggagttccctaaggacacggcaatgaggtgggagaaggtggccgcagcagtgcctgggaagacaaaggctgggtgcatgaagagggtcactgagctcaagcgtgactttcggagcagcaaggagccataggaggcagcgccatagcttgaacgttgtcttccttgcctggtaccggacttgatgcagcaaatcattgtgatcatttcccttcctgaagaagaagcgaatcaccattggtctcgctgaatcgggaatcatgatgatgttggatgaaggaaacaataccgttaaacaacatatggtgtagttttattgttttatataccagaatcaagattcgccaaacagaacaacactaacctgtagaaaaaacggtccatacggaaaaggaacagcagtccctgatggtttgggtgttaatgtcaagctccaaattttatgctagtcagttgtcgatgtgtcantgtc

SEQ ID NO: 16293 - protein, 138 aa, Triticum aestivum
  peptide (1)..(138): Ceres Seq. ID no. 12443654
  misc_feature (83)..(129): Pfam Name: Pfam Description:  Myb-like DNA-binding domain
  misc_feature (1)..(138): NCBI GI NO: 34905190 NR Description: P0498E12.13
  misc_feature (1)..(138): NCBI GI NO: 9758732 NR Description: gene_id:MFC19.9~unknown protein
  misc_feature (1)..(138): NCBI GI NO: 18422552 NR Description: expressed protein; protein id: At5g45420
  misc_feature (59)..(136): NCBI GI NO: 39546277 NR Description: OSJNBa0083D01.10
  misc_feature (1)..(60): NCBI GI NO: 39546277 NR Description: OSJNBa0083D01.10
  misc_feature (65)..(136): NCBI GI NO: 15229761 NR Description: putative cell division related protein
  misc_feature (1)..(60): NCBI GI NO: 15229761 NR Description: putative cell division related protein
  misc_feature (76)..(136): NCBI GI NO: 15239928 NR Description: cell division related protein-like
  misc_feature (1)..(60): NCBI GI NO: 15239928 NR Description: cell division related protein-like
  misc_feature (1)..(136): NCBI GI NO: 32481976 NR Description: zuotin related factor 2 [Rattus norvegicus]
MELLRRQMLKHPAGEPQRWEKIAAVFGGRRTPESVIRAAKSGGATAAGGSFEQFLRKRKPLDPRAGAADADTGGNAGGGDGGWSAGEDRSLLNALKEFPKDTAMRWEKVAAAVPGKTKAGCMKRVTELKRDFRSSKEP

SEQ ID NO: 16294 - protein, 131 aa, Triticum aestivum
  peptide (1)..(131): Ceres Seq. ID no. 12443655
  misc_feature (76)..(122): Pfam Name: Pfam Description:  Myb-like DNA-binding domain
  misc_feature (1)..(131): NCBI GI NO: 34905190 NR Description: P0498E12.13
  misc_feature (1)..(131): NCBI GI NO: 9758732 NR Description: gene_id:MFC19.9~unknown protein
  misc_feature (1)..(131): NCBI GI NO: 18422552 NR Description: expressed protein; protein id: At5g45420
  misc_feature (52)..(129): NCBI GI NO: 39546277 NR Description: OSJNBa0083D01.10
  misc_feature (1)..(53): NCBI GI NO: 39546277 NR Description: OSJNBa0083D01.10
  misc_feature (58)..(129): NCBI GI NO: 15229761 NR Description: putative cell division related protein
  misc_feature (1)..(53): NCBI GI NO: 15229761 NR Description: putative cell division related protein
  misc_feature (69)..(129): NCBI GI NO: 15239928 NR Description: cell division related protein-like
  misc_feature (1)..(53): NCBI GI NO: 15239928 NR Description: cell division related protein-like
  misc_feature (1)..(129): NCBI GI NO: 32481976 NR Description: zuotin related factor 2 [Rattus norvegicus]
MLKHPAGEPQRWEKIAAVFGGRRTPESVIRAAKSGGATAAGGSFEQFLRKRKPLDPRAGAADADTGGNAGGGDGGWSAGEDRSLLNALKEFPKDTAMRWEKVAAAVPGKTKAGCMKRVTELKRDFRSSKEP

SEQ ID NO: 16295 - DNA, 955 bp, Triticum aestivum
  misc_feature (1)..(955): Ceres Seq. ID no. 13657523
aaaagaaaacaagtaagggcccaaatgcaaacgaggaaaccaacctcctcctcccctgtaacaactccgccgcgcgcccacctcccctcgccggtatcgtgtcctcgttcacgcccaacccaacccaccccatttccccgacctccgatgccggagcgccgcaacgtagccggagacccgccgtactggtgatccccggataacaacgatggaccgcctcttgctgtcccgccccccgatgcccacccccgtccacggcgctgccacggccgcagatggcgacctcctcgagctcgacgtcctctggcccgcctcttcagctccgggactcctcgccgcgcttcccgatgacgaggctaagaagaagcagaagcgcgcgggcggccctgccgtccgatccgccgcccgcgccgtcccggagaaggccgcgttgaccccgtcttcggtggcgaggtcggctccggtgcgcataccttcggatgctgcggcgcggagagggaggtggccccacgtcgtcggtggcggcgacgacggggacgccatggtcccgccgcacgagatcgtcgcgcggcgcgcggcagcgcacagctcggtgctggagggagccgggaggacgctcaagggccgcgacctccgccgcgtacgcaacaccgtcctgcgccgcaccggcttcctcgactgagaggcggaggcgagtcgcctcgtcgctttcgcgataaagttttgacttctgttaattcctccctttagttccatccgttgcgtttccggcagttttgatttcattccccgatgggaaggggatgaaaagtaaagtggtgaggtgagatgagtgaccgaggattataacacgacaataacagtgctgttccattccatcacattatatatatggaatttttggccattaaaaaaaaaataaaaaaaaaaaaaaaaaagcttatcgataccgtcg

SEQ ID NO: 16296 - protein, 157 aa, Triticum aestivum
  peptide (1)..(157): Ceres Seq. ID no. 13657524
  misc_feature (82)..(157): Pfam Name: Pfam Description:  Protein of unknown function, DUF584
  misc_feature (82)..(157): NCBI GI NO: 34902966 NR Description: unnamed protein product
  misc_feature (56)..(157): NCBI GI NO: 27476087 NR Description: Hypothetical protein
  misc_feature (33)..(157): NCBI GI NO: 21741306 NR Description: OSJNBb0103I08.8
  misc_feature (64)..(157): NCBI GI NO: 38346328 NR Description: OJ000126_13.10
  misc_feature (12)..(157): NCBI GI NO: 37535426 NR Description: hypothetical protein
  misc_feature (50)..(157): NCBI GI NO: 21594619 NR Description: unknown [Arabidopsis thaliana]
  misc_feature (82)..(157): NCBI GI NO: 15983450 NR Description: AT3g15040/K15M2_18 [Arabidopsis thaliana]
  misc_feature (82)..(157): NCBI GI NO: 18400614 NR Description: expressed protein [Arabidopsis thaliana]
  misc_feature (48)..(157): NCBI GI NO: 15230636 NR Description: expressed protein [Arabidopsis thaliana]
  misc_feature (64)..(155): NCBI GI NO: 15234679 NR Description: hypothetical protein [Arabidopsis thaliana]
MDRLLLSRPPMPTPVHGAATAADGDLLELDVLWPASSAPGLLAALPDDEAKKKQKRAGGPAVRSAARAVPEKAALTPSSVARSAPVRIPSDAAARRGRWPHVVGGGDDGDAMVPPHEIVARRAAAHSSVLEGAGRTLKGRDLRRVRNTVLRRTGFLD

SEQ ID NO: 16297 - protein, 147 aa, Triticum aestivum
  peptide (1)..(147): Ceres Seq. ID no. 13657525
  misc_feature (72)..(147): Pfam Name: Pfam Description:  Protein of unknown function, DUF584
  misc_feature (72)..(147): NCBI GI NO: 34902966 NR Description: unnamed protein product
  misc_feature (46)..(147): NCBI GI NO: 27476087 NR Description: Hypothetical protein
  misc_feature (23)..(147): NCBI GI NO: 21741306 NR Description: OSJNBb0103I08.8
  misc_feature (54)..(147): NCBI GI NO: 38346328 NR Description: OJ000126_13.10
  misc_feature (2)..(147): NCBI GI NO: 37535426 NR Description: hypothetical protein
  misc_feature (40)..(147): NCBI GI NO: 21594619 NR Description: unknown [Arabidopsis thaliana]
  misc_feature (72)..(147): NCBI GI NO: 15983450 NR Description: AT3g15040/K15M2_18 [Arabidopsis thaliana]
  misc_feature (72)..(147): NCBI GI NO: 18400614 NR Description: expressed protein [Arabidopsis thaliana]
  misc_feature (38)..(147): NCBI GI NO: 15230636 NR Description: expressed protein [Arabidopsis thaliana]
  misc_feature (54)..(145): NCBI GI NO: 15234679 NR Description: hypothetical protein [Arabidopsis thaliana]
MPTPVHGAATAADGDLLELDVLWPASSAPGLLAALPDDEAKKKQKRAGGPAVRSAARAVPEKAALTPSSVARSAPVRIPSDAAARRGRWPHVVGGGDDGDAMVPPHEIVARRAAAHSSVLEGAGRTLKGRDLRRVRNTVLRRTGFLD

SEQ ID NO: 16298 - protein, 79 aa, Triticum aestivum
  peptide (1)..(79): Ceres Seq. ID no. 13657526
MLRRGEGGGPTSSVAATTGTPWSRRTRSSRGARQRTARCWREPGGRSRAATSAAYATPSCAAPASSTERRRRVASSLSR

SEQ ID NO: 16299 - DNA, 1695 bp, Triticum aestivum
  misc_feature (1)..(1695): Ceres Seq. ID no. 14308003
acacccaaaataagatcacatttttttgctcttcccttctccaattcaaggagccggggcagccatggacgccgccacgggcacgggcatggaggagctgtcatggtgcgcgcggtgcgtcggcctggcattccttgtcttctccgtgtgcgtggtggcgctcggcgcggcgctcttcctcgcccgccggtggccgtggtgcagctgccacgtctgccgttcgtacctcacgggatcgtgggcgcgggacttcaccaacctcggcgactggtacgcacacctgctccgctgctccccgaccggcaccgtggccgtccacgtcctcggctgtaccatcaccgccaacccggccaacgtcgagcacatgctccacacccgcttcgacaacttccccaaagggaagcccttcgccgccgtcctcggcgacctcctcggcggcggcatcttcaacgtcgacggcgacgcctggcgccaccagcgcaagatggccagcctcgagctcggcagcgtcgcggtgcgctcctacgcgtacggcatcgtcgccgaggaagtggaggcgcgcctcctgccactgctcgccgacgccgccgacaatggcagggtggtcgacctgcaggacgtgttccggcgtttcgctttcgacaccatctgcaagatctccttcggactagaccccggctgcctcgagctcgacatgcccatgtccaagctcgccgccgcgttcgacaccgcctcgcggctatccgccatgcgcggcgcggcggcgtcgcccctggtgtggagggcaaagcggctgctgaacttcggctccgagagggagctcaggaagtccatccacctcgtcgacgagctcgcggcggccatgataaggcagcgccggaagctgggcgtcgccgggagccacgacctcctgtcccggttcatggcctcggaggcgcacggcaccgccgtcgacgacaagtacctccgcgacatcgtggtcagcttcctcctcgccggacgggacacggtgtcctccgcgctcaccaccatcttcatgctgctctccaagaaccccgctgtggcggccgccatgcgctcggaggccgccgccggcgagaagacaaggacatcgtcgaagaccacgtacgagcacctcaagtccctccactacacccacgcggtgctgcacgagaacatgcggctgttcccgcctgtgcagttcgactccaagttctgcgccgccgatgacgtgctcccggacggcacgtacgtgaccgccggggctcgtgtgatgtaccacccctacgccatggggcgcatgccccgcatttggggcgacgactgcgagaagttccgaccggagcggtggctgacgggccccggggggacgttcgtgccggagagcctgtacaggtacccggtgttccaggccgggctccgcgtgtgcctcggcaaggagctcgccgtgatggagatgaaggcggtgaccgtggccgtggtgaagcagttcgacgtggaggtggttgggcaaaagggcgccgtgcccaggttcgcgccgggtctgacggcgtccatcagcggcgggctcccggtgagggtcaggcgcatctagagacatgttgagtactgtagtagctagacactgtttctgtactgtacatagggatattataagagaagaaattaatgagaagggaagttgtttgtggcgac

SEQ ID NO: 16300 - protein, 509 aa, Triticum aestivum
  peptide (1)..(509): Ceres Seq. ID no. 14308004
  misc_feature (19)..(508): NCBI GI NO: 34908446 NR Description: putative cytochrome P450
  misc_feature (26)..(507): NCBI GI NO: 15226228 NR Description: cytochrome P450, putative [Arabidopsis thaliana]
  misc_feature (58)..(508): NCBI GI NO: 15228396 NR Description: cytochrome P450 family [Arabidopsis thaliana]
  misc_feature (47)..(506): NCBI GI NO: 18000072 NR Description: cytochrome P450-dependent fatty acid hydroxylase
  misc_feature (58)..(508): NCBI GI NO: 15242759 NR Description: cytochrome P450, putative [Arabidopsis thaliana]
  misc_feature (58)..(508): NCBI GI NO: 26452145 NR Description: putative cytochrome P450 [Arabidopsis thaliana]
  misc_feature (58)..(508): NCBI GI NO: 21536522 NR Description: cytochrome P450-like protein
  misc_feature (47)..(506): NCBI GI NO: 18000066 NR Description: cytochrome P450-dependent fatty acid hydroxylase
  misc_feature (69)..(506): NCBI GI NO: 34909022 NR Description: cytochrome P450-like protein
  misc_feature (68)..(507): NCBI GI NO: 15228981 NR Description: cytochrome P450, putative [Arabidopsis thaliana]
MDAATGTGMEELSWCARCVGLAFLVFSVCVVALGAALFLARRWPWCSCHVCRSYLTGSWARDFTNLGDWYAHLLRCSPTGTVAVHVLGCTITANPANVEHMLHTRFDNFPKGKPFAAVLGDLLGGGIFNVDGDAWRHQRKMASLELGSVAVRSYAYGIVAEEVEARLLPLLADAADNGRVVDLQDVFRRFAFDTICKISFGLDPGCLELDMPMSKLAAAFDTASRLSAMRGAAASPLVWRAKRLLNFGSERELRKSIHLVDELAAAMIRQRRKLGVAGSHDLLSRFMASEAHGTAVDDKYLRDIVVSFLLAGRDTVSSALTTIFMLLSKNPAVAAAMRSEAAAGEKTRTSSKTTYEHLKSLHYTHAVLHENMRLFPPVQFDSKFCAADDVLPDGTYVTAGARVMYHPYAMGRMPRIWGDDCEKFRPERWLTGPGGTFVPESLYRYPVFQAGLRVCLGKELAVMEMKAVTVAVVKQFDVEVVGQKGAVPRFAPGLTASISGGLPVRVRRI

SEQ ID NO: 16301 - protein, 501 aa, Triticum aestivum
  peptide (1)..(501): Ceres Seq. ID no. 14308005
  misc_feature (11)..(500): NCBI GI NO: 34908446 NR Description: putative cytochrome P450
  misc_feature (18)..(499): NCBI GI NO: 15226228 NR Description: cytochrome P450, putative [Arabidopsis thaliana]
  misc_feature (50)..(500): NCBI GI NO: 15228396 NR Description: cytochrome P450 family [Arabidopsis thaliana]
  misc_feature (39)..(498): NCBI GI NO: 18000072 NR Description: cytochrome P450-dependent fatty acid hydroxylase
  misc_feature (50)..(500): NCBI GI NO: 15242759 NR Description: cytochrome P450, putative [Arabidopsis thaliana]
  misc_feature (50)..(500): NCBI GI NO: 21536522 NR Description: cytochrome P450-like protein
  misc_feature (50)..(500): NCBI GI NO: 26452145 NR Description: putative cytochrome P450 [Arabidopsis thaliana]
  misc_feature (39)..(498): NCBI GI NO: 18000066 NR Description: cytochrome P450-dependent fatty acid hydroxylase
  misc_feature (61)..(498): NCBI GI NO: 34909022 NR Description: cytochrome P450-like protein
  misc_feature (60)..(499): NCBI GI NO: 15228981 NR Description: cytochrome P450, putative [Arabidopsis thaliana]
MEELSWCARCVGLAFLVFSVCVVALGAALFLARRWPWCSCHVCRSYLTGSWARDFTNLGDWYAHLLRCSPTGTVAVHVLGCTITANPANVEHMLHTRFDNFPKGKPFAAVLGDLLGGGIFNVDGDAWRHQRKMASLELGSVAVRSYAYGIVAEEVEARLLPLLADAADNGRVVDLQDVFRRFAFDTICKISFGLDPGCLELDMPMSKLAAAFDTASRLSAMRGAAASPLVWRAKRLLNFGSERELRKSIHLVDELAAAMIRQRRKLGVAGSHDLLSRFMASEAHGTAVDDKYLRDIVVSFLLAGRDTVSSALTTIFMLLSKNPAVAAAMRSEAAAGEKTRTSSKTTYEHLKSLHYTHAVLHENMRLFPPVQFDSKFCAADDVLPDGTYVTAGARVMYHPYAMGRMPRIWGDDCEKFRPERWLTGPGGTFVPESLYRYPVFQAGLRVCLGKELAVMEMKAVTVAVVKQFDVEVVGQKGAVPRFAPGLTASISGGLPVRVRRI

SEQ ID NO: 16302 - protein, 409 aa, Triticum aestivum
  peptide (1)..(409): Ceres Seq. ID no. 14308006
  misc_feature (1)..(408): NCBI GI NO: 34908446 NR Description: putative cytochrome P450
  misc_feature (1)..(407): NCBI GI NO: 15226228 NR Description: cytochrome P450, putative [Arabidopsis thaliana]
  misc_feature (1)..(408): NCBI GI NO: 15228396 NR Description: cytochrome P450 family [Arabidopsis thaliana]
  misc_feature (1)..(406): NCBI GI NO: 18000072 NR Description: cytochrome P450-dependent fatty acid hydroxylase
  misc_feature (1)..(408): NCBI GI NO: 15242759 NR Description: cytochrome P450, putative [Arabidopsis thaliana]
  misc_feature (1)..(408): NCBI GI NO: 21536522 NR Description: cytochrome P450-like protein
  misc_feature (1)..(408): NCBI GI NO: 26452145 NR Description: putative cytochrome P450 [Arabidopsis thaliana]
  misc_feature (1)..(406): NCBI GI NO: 18000066 NR Description: cytochrome P450-dependent fatty acid hydroxylase
  misc_feature (1)..(406): NCBI GI NO: 34909022 NR Description: cytochrome P450-like protein
  misc_feature (1)..(407): NCBI GI NO: 15228981 NR Description: cytochrome P450, putative [Arabidopsis thaliana]
MLHTRFDNFPKGKPFAAVLGDLLGGGIFNVDGDAWRHQRKMASLELGSVAVRSYAYGIVAEEVEARLLPLLADAADNGRVVDLQDVFRRFAFDTICKISFGLDPGCLELDMPMSKLAAAFDTASRLSAMRGAAASPLVWRAKRLLNFGSERELRKSIHLVDELAAAMIRQRRKLGVAGSHDLLSRFMASEAHGTAVDDKYLRDIVVSFLLAGRDTVSSALTTIFMLLSKNPAVAAAMRSEAAAGEKTRTSSKTTYEHLKSLHYTHAVLHENMRLFPPVQFDSKFCAADDVLPDGTYVTAGARVMYHPYAMGRMPRIWGDDCEKFRPERWLTGPGGTFVPESLYRYPVFQAGLRVCLGKELAVMEMKAVTVAVVKQFDVEVVGQKGAVPRFAPGLTASISGGLPVRVRRI

SEQ ID NO: 16303 - DNA, 1507 bp, Triticum aestivum
  misc_feature (1)..(1507): Ceres Seq. ID no. 13657138
gttacgtagcactctgtctgacgcatcaatagccccccagccacttcctacaccacttcgtctccctccacttccttccctccctagtctgagtctctacccgagaccagagctcgcacgcgtcgccggcgcgccgatcagtcaagaagccgcgcaacggcgttggcgcattgccccggagaggccggccggccgatgaagccgctgtacctgcggggcagcggcagcttcaagaggctgctgctctccctctcgccccaccgcgccaagcgcgtccacgcgccccccggggacgcgcacgccgagtcgccgcagtcaccgccgccgacggagcggaggcccgagtgggagtgcttctcgtacgaggaggtccggcgcgccacggacggcttccgcgcggccaacctggtgggccggggcgggtcgtcggaggtgtaccgcggcgagctggcggacgggcgcgccgtggcggtgaagcggctcatgggcgcgtccgcctgcgagcgccgggagcgggacttcctggcggagctcggcaccgtgggccacgccaggcaccccaacgtgtgcccgctcctcggctgctgcgtcgaccgcgacctctacctcgtcttcgccttctccgcccgcggctccgtctccgccaacctccacgacggcgaggagggggcgccggcgatggggtgggaggcgcggtacggcgtggcggtgggcacggcgagggggctggagtacctgcacaaggggtgccggcggcggatcatccaccgggacatcaaggcctccaacgtgctgctcaccgacgacttccagccccagatctccgacttcgggctggccaagtggctgccgacggagtggacgcaccgggcgatcgcgccgatcgagggcaccttcgggtgcctggcgccggagtactacacgcgcggcatcgtggacgagaagacggacgtgttcgccttcggcgtcttcctgctggagctcatggccggccggaagccggtggacggcacccacaggagcctcctcggctgggcgaggcccctgctcaacgagggcaagacggaggcgctgctggacccgaggatcgtcgccggcggcgatggcggctacgacgccgagcaggcccggcggctggcgttcgtggcgtcgctctgcgtccgcgcgtcggcgacgtggaggccgtccatgacagaggtcctggagctgctggagggcgtggagatcaaggaggagcggtgggcgatgccggagccggcggccggcgacgacgagggggaggaaatgtggggcttcgacgacctcgacgacgacgacgatgaggaatccggcacgccgtcccctttgtcaacatcctcagccttgagcacttagcacgggctaagattgcgtcagacgagtgtgatgcttgctgaaatttttgctccttcccacctgccccgccccacatgtaaaggcttttcgttgtcgaggttgtgaatacaaaggttatctgtgagaggcaagt

SEQ ID NO: 16304 - protein, 392 aa, Triticum aestivum
  peptide (1)..(392): Ceres Seq. ID no. 13657139
  misc_feature (66)..(269): Pfam Name: Pfam Description:  Protein kinase domain
  misc_feature (5)..(335): NCBI GI NO: 38343967 NR Description: OSJNBb0022F16.6
  misc_feature (47)..(392): NCBI GI NO: 15224251 NR Description: protein kinase family [Arabidopsis thaliana]
  misc_feature (46)..(358): NCBI GI NO: 40253745 NR Description: SERK1 protein-like
  misc_feature (36)..(369): NCBI GI NO: 15242821 NR Description: protein kinase family [Arabidopsis thaliana]
  misc_feature (48)..(341): NCBI GI NO: 30687061 NR Description: protein kinase family [Arabidopsis thaliana]
  misc_feature (48)..(378): NCBI GI NO: 26452369 NR Description: unknown protein [Arabidopsis thaliana]
  misc_feature (48)..(378): NCBI GI NO: 30698132 NR Description: protein kinase, putative [Arabidopsis thaliana]
  misc_feature (54)..(343): NCBI GI NO: 22330852 NR Description: protein kinase family [Arabidopsis thaliana]
  misc_feature (48)..(341): NCBI GI NO: 15810235 NR Description: putative Pto kinase interactor
  misc_feature (48)..(341): NCBI GI NO: 18416299 NR Description: protein kinase family [Arabidopsis thaliana]
MKPLYLRGSGSFKRLLLSLSPHRAKRVHAPPGDAHAESPQSPPPTERRPEWECFSYEEVRRATDGFRAANLVGRGGSSEVYRGELADGRAVAVKRLMGASACERRERDFLAELGTVGHARHPNVCPLLGCCVDRDLYLVFAFSARGSVSANLHDGEEGAPAMGWEARYGVAVGTARGLEYLHKGCRRRIIHRDIKASNVLLTDDFQPQISDFGLAKWLPTEWTHRAIAPIEGTFGCLAPEYYTRGIVDEKTDVFAFGVFLLELMAGRKPVDGTHRSLLGWARPLLNEGKTEALLDPRIVAGGDGGYDAEQARRLAFVASLCVRASATWRPSMTEVLELLEGVEIKEERWAMPEPAAGDDEGEEMWGFDDLDDDDDEESGTPSPLSTSSALST

SEQ ID NO: 16305 - protein, 296 aa, Triticum aestivum
  peptide (1)..(296): Ceres Seq. ID no. 13657140
  misc_feature (1)..(173): Pfam Name: Pfam Description:  Protein kinase domain
  misc_feature (1)..(239): NCBI GI NO: 38343967 NR Description: OSJNBb0022F16.6
  misc_feature (1)..(296): NCBI GI NO: 15224251 NR Description: protein kinase family [Arabidopsis thaliana]
  misc_feature (1)..(262): NCBI GI NO: 40253745 NR Description: SERK1 protein-like
  misc_feature (1)..(273): NCBI GI NO: 15242821 NR Description: protein kinase family [Arabidopsis thaliana]
  misc_feature (1)..(245): NCBI GI NO: 30687061 NR Description: protein kinase family [Arabidopsis thaliana]
  misc_feature (1)..(282): NCBI GI NO: 26452369 NR Description: unknown protein [Arabidopsis thaliana]
  misc_feature (1)..(282): NCBI GI NO: 30698132 NR Description: protein kinase, putative [Arabidopsis thaliana]
  misc_feature (1)..(247): NCBI GI NO: 22330852 NR Description: protein kinase family [Arabidopsis thaliana]
  misc_feature (1)..(245): NCBI GI NO: 15810235 NR Description: putative Pto kinase interactor
  misc_feature (1)..(245): NCBI GI NO: 18416299 NR Description: protein kinase family [Arabidopsis thaliana]
MGASACERRERDFLAELGTVGHARHPNVCPLLGCCVDRDLYLVFAFSARGSVSANLHDGEEGAPAMGWEARYGVAVGTARGLEYLHKGCRRRIIHRDIKASNVLLTDDFQPQISDFGLAKWLPTEWTHRAIAPIEGTFGCLAPEYYTRGIVDEKTDVFAFGVFLLELMAGRKPVDGTHRSLLGWARPLLNEGKTEALLDPRIVAGGDGGYDAEQARRLAFVASLCVRASATWRPSMTEVLELLEGVEIKEERWAMPEPAAGDDEGEEMWGFDDLDDDDDEESGTPSPLSTSSALST

SEQ ID NO: 16306 - protein, 231 aa, Triticum aestivum
  peptide (1)..(231): Ceres Seq. ID no. 13657141
  misc_feature (1)..(108): Pfam Name: Pfam Description:  Protein kinase domain
  misc_feature (1)..(174): NCBI GI NO: 38343967 NR Description: OSJNBb0022F16.6
  misc_feature (1)..(231): NCBI GI NO: 15224251 NR Description: protein kinase family [Arabidopsis thaliana]
  misc_feature (1)..(197): NCBI GI NO: 40253745 NR Description: SERK1 protein-like
  misc_feature (1)..(208): NCBI GI NO: 15242821 NR Description: protein kinase family [Arabidopsis thaliana]
  misc_feature (1)..(180): NCBI GI NO: 30687061 NR Description: protein kinase family [Arabidopsis thaliana]
  misc_feature (1)..(217): NCBI GI NO: 26452369 NR Description: unknown protein [Arabidopsis thaliana]
  misc_feature (1)..(217): NCBI GI NO: 30698132 NR Description: protein kinase, putative [Arabidopsis thaliana]
  misc_feature (1)..(182): NCBI GI NO: 22330852 NR Description: protein kinase family [Arabidopsis thaliana]
  misc_feature (1)..(180): NCBI GI NO: 15810235 NR Description: putative Pto kinase interactor
  misc_feature (1)..(180): NCBI GI NO: 18416299 NR Description: protein kinase family [Arabidopsis thaliana]
MGWEARYGVAVGTARGLEYLHKGCRRRIIHRDIKASNVLLTDDFQPQISDFGLAKWLPTEWTHRAIAPIEGTFGCLAPEYYTRGIVDEKTDVFAFGVFLLELMAGRKPVDGTHRSLLGWARPLLNEGKTEALLDPRIVAGGDGGYDAEQARRLAFVASLCVRASATWRPSMTEVLELLEGVEIKEERWAMPEPAAGDDEGEEMWGFDDLDDDDDEESGTPSPLSTSSALST

SEQ ID NO: 16307 - DNA, 1863 bp, Triticum aestivum
  misc_feature (1)..(1863): Ceres Seq. ID no. 15169511
ttactggtagtacatctgttccgtctttcgccgaacacgcctcgcgcgccgaagcacgctacctggaactggaaggtgttcttcctcctccgctctactgtgctcccgtggcgcggagatccaaccggagctggaccgactccttttgccgaaccagtgtgctagctactgaagcggccatggaagtggtttcttccagtcactcttgcttggcatttcatcaaacacctaccagtgctcggaggtctctgggcactggtcttggtctgcggcataccaagtttgctcggccaagaaaaagcgcagttctctgtgttgggagagcttcaaatcctggtgattcaggaaagctgcatgtcagccgcagcttcgatgtaagcgatgtcgatgctgccctccagggcatctccaagaaggtaggccagatcgagaaagtgtccattcctggtctgccagaagggccagacagttctcaaatcagcactggtttgtgggagtggaagccgaagctgacggtatactacgagaagtctggcaccaagaatagcaaggcgccagcagtgctttttctaccaggttttggggtgggcacgttccattttgagaagcaattgatggatcttggccgtgattacaaggtgtggacgatggattttctgggacagggaatgtcattggcgtgtgaagatcccgctcctaaggccatggcggaggaggatgaggaatcatattggggttttggacaagattcacaaccatgggcagatgaattggtgtactctgtagacttgtggcgtgaccaggtccagcacttcattgaagaggttatcggtgagccagtttatatcgtgggaaactctcttggaggttttgttgctctatatttagctgcatccagcccacaccttgtaaagggggtcacattgcttaacgcaacgccattttggggtttccttcccaatcctgcaagatctcctcgtttgtcaaagatttttccatgggctgggacatttcctcttccatcagttgtgaggaaacttactgaaacagtgtggcagaagataagcgacccaagaagtatacagaagatactcaggcaagtatatgctgaccactcaacaaatgttgacaaggtgttctcgcgtattatagagacaacagaacacccggcagctgctgcatcatttgcctccattatgtttgctccaatgggccagatatcctttcaggaggcactgtctaggtgccaaaggcaggacattcccatttcccttatgtatgggaaagaagacccgtgggttacaccttattggggtatcagagtcaagcaacaggtgccagaagcaccctattatgaaattagccctgccggtcactgtcctcacgacgaggttcctgaggttataaactatttgctccgaggatggcttaagaatgtggagtctgagggttcagttgacctcccatttcttgaagattccagctttcaagaacatggtgtgtcgaaggagctggagtttgtcaggacagggtccaagaaatcagttagtgtgcggctcttcggttcccaaatttccctgtggagccaactgagctcattcttgaagcggcatgcctccaacataagggtagtgtccagatgattcgtccgtagttcgttagatagtagaagcttcaattgtatattgtattcattattctttatgtaaagtagtcaggttgatgcctagatgtacgaaatagagacaagttcaaatattttagtgaatgtgaatatgtgtagtacagagttagcattgggcgtcaaacatctgtcgtggttgtattcataggaattcaagatcacatattttcctgctcggt

SEQ ID NO: 16308 - protein, 546 aa, Triticum aestivum
  peptide (1)..(546): Ceres Seq. ID no. 15169512
  misc_feature (211)..(474): Pfam Name: Pfam Description:  alpha/beta hydrolase fold
  misc_feature (92)..(543): NCBI GI NO: 15240707 NR Description: hydrolase, alpha/beta fold family
  misc_feature (245)..(479): NCBI GI NO: 37521904 NR Description: hypothetical protein gll2335
  misc_feature (164)..(222): NCBI GI NO: 37521904 NR Description: hypothetical protein gll2335
  misc_feature (245)..(476): NCBI GI NO: 23040754 NR Description: hypothetical protein
  misc_feature (164)..(224): NCBI GI NO: 23040754 NR Description: hypothetical protein
  misc_feature (245)..(479): NCBI GI NO: 16330114 NR Description: unknown protein [Synechocystis sp. PCC 6803]
  misc_feature (156)..(224): NCBI GI NO: 16330114 NR Description: unknown protein [Synechocystis sp. PCC 6803]
  misc_feature (245)..(481): NCBI GI NO: 23126297 NR Description: hypothetical protein [Nostoc punctiforme]
  misc_feature (154)..(224): NCBI GI NO: 23126297 NR Description: hypothetical protein [Nostoc punctiforme]
  misc_feature (245)..(479): NCBI GI NO: 17229548 NR Description: hypothetical protein [Nostoc sp. PCC 7120]
TGSTSVPSFAEHASRAEARYLELEGVLPPPLYCAPVARRSNRSWTDSFCRTSVLATEAAMEVVSSSHSCLAFHQTPTSARRSLGTGLGLRHTKFARPRKSAVLCVGRASNPGDSGKLHVSRSFDVSDVDAALQGISKKVGQIEKVSIPGLPEGPDSSQISTGLWEWKPKLTVYYEKSGTKNSKAPAVLFLPGFGVGTFHFEKQLMDLGRDYKVWTMDFLGQGMSLACEDPAPKAMAEEDEESYWGFGQDSQPWADELVYSVDLWRDQVQHFIEEVIGEPVYIVGNSLGGFVALYLAASSPHLVKGVTLLNATPFWGFLPNPARSPRLSKIFPWAGTFPLPSVVRKLTETVWQKISDPRSIQKILRQVYADHSTNVDKVFSRIIETTEHPAAAASFASIMFAPMGQISFQEALSRCQRQDIPISLMYGKEDPWVTPYWGIRVKQQVPEAPYYEISPAGHCPHDEVPEVINYLLRGWLKNVESEGSVDLPFLEDSSFQEHGVSKELEFVRTGSKKSVSVRLFGSQISLWSQLSSFLKRHASNIRVVSR

SEQ ID NO: 16309 - protein, 487 aa, Triticum aestivum
  peptide (1)..(487): Ceres Seq. ID no. 15169513
  misc_feature (152)..(415): Pfam Name: Pfam Description:  alpha/beta hydrolase fold
  misc_feature (33)..(484): NCBI GI NO: 15240707 NR Description: hydrolase, alpha/beta fold family
  misc_feature (186)..(420): NCBI GI NO: 37521904 NR Description: hypothetical protein gll2335
  misc_feature (105)..(163): NCBI GI NO: 37521904 NR Description: hypothetical protein gll2335
  misc_feature (186)..(417): NCBI GI NO: 23040754 NR Description: hypothetical protein
  misc_feature (105)..(165): NCBI GI NO: 23040754 NR Description: hypothetical protein
  misc_feature (186)..(420): NCBI GI NO: 16330114 NR Description: unknown protein [Synechocystis sp. PCC 6803]
  misc_feature (97)..(165): NCBI GI NO: 16330114 NR Description: unknown protein [Synechocystis sp. PCC 6803]
  misc_feature (186)..(422): NCBI GI NO: 23126297 NR Description: hypothetical protein [Nostoc punctiforme]
  misc_feature (95)..(165): NCBI GI NO: 23126297 NR Description: hypothetical protein [Nostoc punctiforme]
  misc_feature (186)..(420): NCBI GI NO: 17229548 NR Description: hypothetical protein [Nostoc sp. PCC 7120]
MEVVSSSHSCLAFHQTPTSARRSLGTGLGLRHTKFARPRKSAVLCVGRASNPGDSGKLHVSRSFDVSDVDAALQGISKKVGQIEKVSIPGLPEGPDSSQISTGLWEWKPKLTVYYEKSGTKNSKAPAVLFLPGFGVGTFHFEKQLMDLGRDYKVWTMDFLGQGMSLACEDPAPKAMAEEDEESYWGFGQDSQPWADELVYSVDLWRDQVQHFIEEVIGEPVYIVGNSLGGFVALYLAASSPHLVKGVTLLNATPFWGFLPNPARSPRLSKIFPWAGTFPLPSVVRKLTETVWQKISDPRSIQKILRQVYADHSTNVDKVFSRIIETTEHPAAAASFASIMFAPMGQISFQEALSRCQRQDIPISLMYGKEDPWVTPYWGIRVKQQVPEAPYYEISPAGHCPHDEVPEVINYLLRGWLKNVESEGSVDLPFLEDSSFQEHGVSKELEFVRTGSKKSVSVRLFGSQISLWSQLSSFLKRHASNIRVVSR

SEQ ID NO: 16310 - protein, 342 aa, Triticum aestivum
  peptide (1)..(342): Ceres Seq. ID no. 15169514
  misc_feature (7)..(270): Pfam Name: Pfam Description:  alpha/beta hydrolase fold
  misc_feature (1)..(339): NCBI GI NO: 15240707 NR Description: hydrolase, alpha/beta fold family
  misc_feature (41)..(275): NCBI GI NO: 37521904 NR Description: hypothetical protein gll2335
  misc_feature (1)..(18): NCBI GI NO: 37521904 NR Description: hypothetical protein gll2335
  misc_feature (41)..(272): NCBI GI NO: 23040754 NR Description: hypothetical protein
  misc_feature (1)..(20): NCBI GI NO: 23040754 NR Description: hypothetical protein
  misc_feature (41)..(275): NCBI GI NO: 16330114 NR Description: unknown protein [Synechocystis sp. PCC 6803]
  misc_feature (1)..(20): NCBI GI NO: 16330114 NR Description: unknown protein [Synechocystis sp. PCC 6803]
  misc_feature (41)..(277): NCBI GI NO: 23126297 NR Description: hypothetical protein [Nostoc punctiforme]
  misc_feature (1)..(20): NCBI GI NO: 23126297 NR Description: hypothetical protein [Nostoc punctiforme]
  misc_feature (41)..(275): NCBI GI NO: 17229548 NR Description: hypothetical protein [Nostoc sp. PCC 7120]
MDLGRDYKVWTMDFLGQGMSLACEDPAPKAMAEEDEESYWGFGQDSQPWADELVYSVDLWRDQVQHFIEEVIGEPVYIVGNSLGGFVALYLAASSPHLVKGVTLLNATPFWGFLPNPARSPRLSKIFPWAGTFPLPSVVRKLTETVWQKISDPRSIQKILRQVYADHSTNVDKVFSRIIETTEHPAAAASFASIMFAPMGQISFQEALSRCQRQDIPISLMYGKEDPWVTPYWGIRVKQQVPEAPYYEISPAGHCPHDEVPEVINYLLRGWLKNVESEGSVDLPFLEDSSFQEHGVSKELEFVRTGSKKSVSVRLFGSQISLWSQLSSFLKRHASNIRVVSR

SEQ ID NO: 16311 - DNA, 1344 bp, Triticum aestivum
  misc_feature (1)..(1344): Ceres Seq. ID no. 13657142
ccattacctagaacatcctagtcgaaaattcgaccaaacctcccacctcgcacctcgccgcccgatccgacgcgccggcgacccgccgccgctctcgagcgtcgccgatccgcggcgcagatccctcacgaggttttctcaccttattagctcgctggtgcaggactgccacggctcgccggctcttgaatttcagcgcacgcggatctggtgggaggagccccgtgggcgccgctgccttggcgatgtcgagggtccgggacaggacggaggacttcaaggagtccgttcgcgtcgccgcgctctcccatggctacacggagtcgcaattggccgcgctcatgtcgtctttcatcatccggaagccgtcgcccaaatcgccgttcacaaatgcagcaatcaagacgcttgagagcatcagggagctcgagaagtttatagtgaagcacaggagggactatgtggacatgcatcgcaccacggagcaagagagggacaacattgagcatgaagttggtatttttgtaaaagcatgcaaggaacagatagatatcctaaagaacaggatccttgaagatgagaggaatagaagagcgaacacatggcttggcacaagagatgagacttcccggttagacttgatagctcaccagcatggtgtggttttgattttgagcgagcgtctccactcagtaactgcacaatttgatcgccttaggtccctgcgctttcaagaagctattaatagggtgatgccaagaaagaagattaagaagaagccagaaataaaacctactgaaccatccaagtcaaaccttgtattgaaatctgatgtctcgaaggttgaagatcgggaggtatcaactgcgcccttaagagttcaagaacaactcttggacgatgaaacacgagctctccagatggagttgaccaatcttcttgatactgtccaagaaacggagacaaagatgatagagatgtcagcacttaatcatcttatgtcaacacatgttctacagcaagctcagcagattcaatatttatacgaccaggcagtggaagcaacgaacaacgtggagcgtgggaacaaggagctatcccaggcgatccagcggaacaacagcagtagaacctttctcctgcttttcttctttgttcttactttctctgttctgtttcttgactggtacaaaaactgaattagcagctcatgtaaccgtactattgcgcaaatggattgagctattgatgtgtcatctcttgtgggatgattatcacttgtcatgcatattggtcagtgttactctgttaagattctaagattttgccgccgttggcaaacat

SEQ ID NO: 16312 - protein, 317 aa, Triticum aestivum
  peptide (1)..(317): Ceres Seq. ID no. 13657143
  misc_feature (1)..(315): NCBI GI NO: 38346626 NR Description: OSJNBa0074L08.20
  misc_feature (1)..(315): NCBI GI NO: 28380152 NR Description: Syntaxin 81 (AtSYP81)
  misc_feature (1)..(315): NCBI GI NO: 18403653 NR Description: expressed protein [Arabidopsis thaliana]
  misc_feature (1)..(294): NCBI GI NO: 25405495 NR Description: hypothetical protein F19C24.5
  misc_feature (39)..(315): NCBI GI NO: 8394376 NR Description: syntaxin 18 [Homo sapiens]
  misc_feature (39)..(315): NCBI GI NO: 30585223 NR Description: Homo sapiens syntaxin 18 [synthetic construct]
  misc_feature (39)..(315): NCBI GI NO: 18203931 NR Description: Stx18 protein [Mus musculus]
  misc_feature (39)..(260): NCBI GI NO: 34878414 NR Description: similar to Syntaxin 18 [Rattus norvegicus]
  misc_feature (262)..(315): NCBI GI NO: 34878414 NR Description: similar to Syntaxin 18 [Rattus norvegicus]
  misc_feature (39)..(286): NCBI GI NO: 21312682 NR Description: syntaxin 18 [Mus musculus]
MSRVRDRTEDFKESVRVAALSHGYTESQLAALMSSFIIRKPSPKSPFTNAAIKTLESIRELEKFIVKHRRDYVDMHRTTEQERDNIEHEVGIFVKACKEQIDILKNRILEDERNRRANTWLGTRDETSRLDLIAHQHGVVLILSERLHSVTAQFDRLRSLRFQEAINRVMPRKKIKKKPEIKPTEPSKSNLVLKSDVSKVEDREVSTAPLRVQEQLLDDETRALQMELTNLLDTVQETETKMIEMSALNHLMSTHVLQQAQQIQYLYDQAVEATNNVERGNKELSQAIQRNNSSRTFLLLFFFVLTFSVLFLDWYKN

SEQ ID NO: 16313 - protein, 285 aa, Triticum aestivum
  peptide (1)..(285): Ceres Seq. ID no. 13657144
  misc_feature (1)..(283): NCBI GI NO: 38346626 NR Description: OSJNBa0074L08.20
  misc_feature (1)..(283): NCBI GI NO: 28380152 NR Description: Syntaxin 81 (AtSYP81)
  misc_feature (1)..(283): NCBI GI NO: 18403653 NR Description: expressed protein [Arabidopsis thaliana]
  misc_feature (1)..(262): NCBI GI NO: 25405495 NR Description: hypothetical protein F19C24.5
  misc_feature (7)..(283): NCBI GI NO: 8394376 NR Description: syntaxin 18 [Homo sapiens]
  misc_feature (7)..(283): NCBI GI NO: 30585223 NR Description: Homo sapiens syntaxin 18 [synthetic construct]
  misc_feature (7)..(283): NCBI GI NO: 18203931 NR Description: Stx18 protein [Mus musculus]
  misc_feature (7)..(228): NCBI GI NO: 34878414 NR Description: similar to Syntaxin 18 [Rattus norvegicus]
  misc_feature (230)..(283): NCBI GI NO: 34878414 NR Description: similar to Syntaxin 18 [Rattus norvegicus]
  misc_feature (7)..(254): NCBI GI NO: 21312682 NR Description: syntaxin 18 [Mus musculus]
MSSFIIRKPSPKSPFTNAAIKTLESIRELEKFIVKHRRDYVDMHRTTEQERDNIEHEVGIFVKACKEQIDILKNRILEDERNRRANTWLGTRDETSRLDLIAHQHGVVLILSERLHSVTAQFDRLRSLRFQEAINRVMPRKKIKKKPEIKPTEPSKSNLVLKSDVSKVEDREVSTAPLRVQEQLLDDETRALQMELTNLLDTVQETETKMIEMSALNHLMSTHVLQQAQQIQYLYDQAVEATNNVERGNKELSQAIQRNNSSRTFLLLFFFVLTFSVLFLDWYKN

SEQ ID NO: 16314 - protein, 243 aa, Triticum aestivum
  peptide (1)..(243): Ceres Seq. ID no. 13657145
  misc_feature (1)..(241): NCBI GI NO: 38346626 NR Description: OSJNBa0074L08.20
  misc_feature (1)..(241): NCBI GI NO: 28380152 NR Description: Syntaxin 81 (AtSYP81)
  misc_feature (1)..(241): NCBI GI NO: 18403653 NR Description: expressed protein [Arabidopsis thaliana]
  misc_feature (1)..(220): NCBI GI NO: 25405495 NR Description: hypothetical protein F19C24.5
  misc_feature (1)..(241): NCBI GI NO: 8394376 NR Description: syntaxin 18 [Homo sapiens]
  misc_feature (1)..(241): NCBI GI NO: 30585223 NR Description: Homo sapiens syntaxin 18 [synthetic construct]
  misc_feature (1)..(241): NCBI GI NO: 18203931 NR Description: Stx18 protein [Mus musculus]
  misc_feature (1)..(186): NCBI GI NO: 34878414 NR Description: similar to Syntaxin 18 [Rattus norvegicus]
  misc_feature (188)..(241): NCBI GI NO: 34878414 NR Description: similar to Syntaxin 18 [Rattus norvegicus]
  misc_feature (1)..(212): NCBI GI NO: 21312682 NR Description: syntaxin 18 [Mus musculus]
MHRTTEQERDNIEHEVGIFVKACKEQIDILKNRILEDERNRRANTWLGTRDETSRLDLIAHQHGVVLILSERLHSVTAQFDRLRSLRFQEAINRVMPRKKIKKKPEIKPTEPSKSNLVLKSDVSKVEDREVSTAPLRVQEQLLDDETRALQMELTNLLDTVQETETKMIEMSALNHLMSTHVLQQAQQIQYLYDQAVEATNNVERGNKELSQAIQRNNSSRTFLLLFFFVLTFSVLFLDWYKN

SEQ ID NO: 16315 - DNA, 1618 bp, Triticum aestivum
  misc_feature (1)..(1618): Ceres Seq. ID no. 13656547
acataaatcatttgatcagcctctcgcctcttcataaggtagctagctcgctcaatccatactaccactatccctctcgaccgtctccgctttatccaatttaggcacttgtgttcagctatctatcgagaaggataggagtagaaggaaggcgaccatggcaagcagcaccagcatcccagccaccaccttgggcgagatccgtgttgctcagcgtgcggatgggccggcggcgatgctggccatcggcacggctaacccgccccactgcgtgccccaggaagactaccccgactactacttcggcgtcaccaagagcgaccacctcaccgacctcaagcgcaccttcgccaaactatgcgggatgacgggcatcggcaggcgtttcttccaccacacggacgaactgctcgccacacacccggacttgtccctcgacgcccggctggacgtcgtggctactgccgccccagagctcgctgcgtcggctgcggcgaacgccatcgccgagtggggccgtccggcgggcgacatcacccatctcgtcgtcagcacgaacgctgggtcgcatgccccgggcaccgacgtccgcttggtctccctcctcggcctccgccatgatgtcctgcgcactgtgctccagctcaacggctgcgcttccggatgcgccgccctgcgcctagccaaagaccttgccgagaacaaccatggcgcgcgcgtcctcgtggcctgcgtcgagctcactatcaccgccttccgcgggcccgatgaggcggactccttcgacaccctcatcccccaggggctcttcggtgacggtgcaggcgccgccatcgtgggtgctgaaccctacgtccacgagcgcccgctgtttgagatggtgtcagcctcccagtacgtgataccagacaccgagcacatgctcaccatgcagctcggcagcggtggcatcggcgggaccattgccaccggactgccaagactggcggcgggcatcgttgagaagtgcttgctggatgcgtttggcgaccgcctagccggcatcggaggtgtcgtcgaatggaacaacctcttctgggccgtgcatcccggcagcagtgcgatgttggaccacatcgtcagggcactccggcttgctccggcgaagctggcggcgagcagaaccgtggtgagagagtacgggaacatgctgggcgccacggtgatcttcgtgctcgatgaggtcaggcgccaaagagaagatcctgaaggagagggagctagccatgatgaaggttggggggttatgatgggatttggaccggggttcactgtggagacgatgctgctgcatgccgctacctaggtaattagaaagaaggaataaaaaaacacatagcatatatatgttcaataaagtgcatgcaatgcaaccttttatatttccatatccacatatcacctatatatacgtacgtgtaagagatgtgaacatgtggtgtgacagtggtcaagtcctgtaagagtgatctgcagtatatggttataaataccacttcagctacttgtaggtttcaaaaaaaaaaaaaaaaaaaaaaaaaaccaaaaaaaaaaaaaaaaaagcttatcgataccgtcg

SEQ ID NO: 16316 - protein, 395 aa, Triticum aestivum
  peptide (1)..(395): Ceres Seq. ID no. 13656548
  misc_feature (12)..(230): Pfam Name: Pfam Description:  Chalcone and stilbene synthases
  misc_feature (1)..(395): NCBI GI NO: 33146463 NR Description: putative chalcone synthase
  misc_feature (1)..(393): NCBI GI NO: 34393972 NR Description: putative chalcone synthase 1
  misc_feature (1)..(395): NCBI GI NO: 34393320 NR Description: putative Chalcone synthase
  misc_feature (9)..(391): NCBI GI NO: 37531436 NR Description: putative chalcone synthase
  misc_feature (16)..(391): NCBI GI NO: 37531256 NR Description: putative chalcone synthase
  misc_feature (9)..(393): NCBI GI NO: 5921766 NR Description: CHALCONE SYNTHASE 8
  misc_feature (9)..(393): NCBI GI NO: 5921759 NR Description: CHALCONE SYNTHASE 4
  misc_feature (9)..(393): NCBI GI NO: 5921758 NR Description: CHALCONE SYNTHASE 3
  misc_feature (10)..(393): NCBI GI NO: 6684423 NR Description: chalcone synthase [Arabis pauciflora]
  misc_feature (11)..(393): NCBI GI NO: 7433777 NR Description: naringenin-chalcone synthase (EC 2
MASSTSIPATTLGEIRVAQRADGPAAMLAIGTANPPHCVPQEDYPDYYFGVTKSDHLTDLKRTFAKLCGMTGIGRRFFHHTDELLATHPDLSLDARLDVVATAAPELAASAAANAIAEWGRPAGDITHLVVSTNAGSHAPGTDVRLVSLLGLRHDVLRTVLQLNGCASGCAALRLAKDLAENNHGARVLVACVELTITAFRGPDEADSFDTLIPQGLFGDGAGAAIVGAEPYVHERPLFEMVSASQYVIPDTEHMLTMQLGSGGIGGTIATGLPRLAAGIVEKCLLDAFGDRLAGIGGVVEWNNLFWAVHPGSSAMLDHIVRALRLAPAKLAASRTVVREYGNMLGATVIFVLDEVRRQREDPEGEGASHDEGWGVMMGFGPGFTVETMLLHAAT

SEQ ID NO: 16317 - protein, 369 aa, Triticum aestivum
  peptide (1)..(369): Ceres Seq. ID no. 13656549
  misc_feature (1)..(204): Pfam Name: Pfam Description:  Chalcone and stilbene synthases
  misc_feature (1)..(369): NCBI GI NO: 33146463 NR Description: putative chalcone synthase
  misc_feature (1)..(367): NCBI GI NO: 34393972 NR Description: putative chalcone synthase 1
  misc_feature (1)..(369): NCBI GI NO: 34393320 NR Description: putative Chalcone synthase
  misc_feature (1)..(365): NCBI GI NO: 37531436 NR Description: putative chalcone synthase
  misc_feature (1)..(365): NCBI GI NO: 37531256 NR Description: putative chalcone synthase
  misc_feature (1)..(367): NCBI GI NO: 5921766 NR Description: CHALCONE SYNTHASE 8
  misc_feature (1)..(367): NCBI GI NO: 5921759 NR Description: CHALCONE SYNTHASE 4
  misc_feature (1)..(367): NCBI GI NO: 5921758 NR Description: CHALCONE SYNTHASE 3
  misc_feature (1)..(367): NCBI GI NO: 6684423 NR Description: chalcone synthase [Arabis pauciflora]
  misc_feature (1)..(367): NCBI GI NO: 7433777 NR Description: naringenin-chalcone synthase (EC 2
MLAIGTANPPHCVPQEDYPDYYFGVTKSDHLTDLKRTFAKLCGMTGIGRRFFHHTDELLATHPDLSLDARLDVVATAAPELAASAAANAIAEWGRPAGDITHLVVSTNAGSHAPGTDVRLVSLLGLRHDVLRTVLQLNGCASGCAALRLAKDLAENNHGARVLVACVELTITAFRGPDEADSFDTLIPQGLFGDGAGAAIVGAEPYVHERPLFEMVSASQYVIPDTEHMLTMQLGSGGIGGTIATGLPRLAAGIVEKCLLDAFGDRLAGIGGVVEWNNLFWAVHPGSSAMLDHIVRALRLAPAKLAASRTVVREYGNMLGATVIFVLDEVRRQREDPEGEGASHDEGWGVMMGFGPGFTVETMLLHAAT

SEQ ID NO: 16318 - protein, 326 aa, Triticum aestivum
  peptide (1)..(326): Ceres Seq. ID no. 13656550
  misc_feature (1)..(161): Pfam Name: Pfam Description:  Chalcone and stilbene synthases
  misc_feature (1)..(326): NCBI GI NO: 33146463 NR Description: putative chalcone synthase
  misc_feature (1)..(324): NCBI GI NO: 34393972 NR Description: putative chalcone synthase 1
  misc_feature (1)..(326): NCBI GI NO: 34393320 NR Description: putative Chalcone synthase
  misc_feature (1)..(322): NCBI GI NO: 37531436 NR Description: putative chalcone synthase
  misc_feature (1)..(322): NCBI GI NO: 37531256 NR Description: putative chalcone synthase
  misc_feature (1)..(324): NCBI GI NO: 5921766 NR Description: CHALCONE SYNTHASE 8
  misc_feature (1)..(324): NCBI GI NO: 5921759 NR Description: CHALCONE SYNTHASE 4
  misc_feature (1)..(324): NCBI GI NO: 5921758 NR Description: CHALCONE SYNTHASE 3
  misc_feature (1)..(324): NCBI GI NO: 6684423 NR Description: chalcone synthase [Arabis pauciflora]
  misc_feature (1)..(324): NCBI GI NO: 7433777 NR Description: naringenin-chalcone synthase (EC 2
MTGIGRRFFHHTDELLATHPDLSLDARLDVVATAAPELAASAAANAIAEWGRPAGDITHLVVSTNAGSHAPGTDVRLVSLLGLRHDVLRTVLQLNGCASGCAALRLAKDLAENNHGARVLVACVELTITAFRGPDEADSFDTLIPQGLFGDGAGAAIVGAEPYVHERPLFEMVSASQYVIPDTEHMLTMQLGSGGIGGTIATGLPRLAAGIVEKCLLDAFGDRLAGIGGVVEWNNLFWAVHPGSSAMLDHIVRALRLAPAKLAASRTVVREYGNMLGATVIFVLDEVRRQREDPEGEGASHDEGWGVMMGFGPGFTVETMLLHAAT

SEQ ID NO: 16319 - DNA, 1802 bp, Triticum aestivum
  misc_feature (1)..(1802): Ceres Seq. ID no. 15169611
agaacatcctaatcgaaaaatccaatcagtcagccacctcaagacagatccccacagaccacggagcagtcagccatggataaggcatacattgccgtcctctccttcgccttcctcttcctgctccactacattctgggcaagaagagcaatggcagcaagggcgccgtgcagctgccgccgagccctccggccatcccgttcttcggccacctccacctcgtggagaagccgctgcacgccgcgctgtgccgtctgggggcgcgctacgggccggtcttctcgctgcggctcggcgcgcgcaacgccgtggtggtgtcctcgccggcgtgcgccagggagtgcttcacggagcacgacgtggccttcgccaaccggccgcagttcccctcgcagatgctcgtctcctacggcggcacctcgctcgtcagctccagctacggcccgcactggcgcaacctccgccgcgtggccgccgtgcggctgctctccgcgcaccgcgtcgccggcatgtcgggcgtcatcgccgctgaggtgcgcgccatggcgcgccggctgtgccgcgccgccgcggcgtccaccggcggcggcgccgcccgggtggagctcaagcggagtctcttcgagctctccctcagcgtgctcatggagaccatcgcgcagaccaaggggacccgcccggaggcggacggcgacacggacatgtccctggaggcgcaggagttcaagcaggtggtggacgagatcatcccgctcattggcgcggccaacgtgtgggactacctgccggtgatgcggtggttcgacgtgtccggcgtgaggagcaggatcctggccacggtgagcaggagggacgccttcctccatcggctcatcgacgcggagcgacggaggatggacgagggcggcgccggcgacgagggcgagaaaaagagcatgattgccgtgctcctcactctgcagaagacagagccggagctgtacactgatcagatgatcatcgctctgtgtgcgaatctctttgtggccggaacggagaccacctcaaccacgatagaatgggccatgtcgctcctgctgaaccacccggcggcgctcaagaaggcccaggccgagatggacgcgtccatcggggcctcccgcatggtcgccgccgacgacgtgccccgcctcagctacctccagtgcatcatcaacgagacgctacgcctgtacccggcggcgccgctgctgctgccgcacgagtcctccgccgactgcaaggtcggcggctacgacgtgccaagcggcacgatgctgatcgtgaacgcgtacgccatccacagggacccggccgtgtgggaggacccggcggcgttccggccggagcggttcgaggacggcaaggccgacgggctgctgctgatgccgttcgggatggggcggcggaggtgccccggcgagacgctggcgctgcagacggtcggggtggttctcgggacgctggtgcagtgcttcgactgggatcgggtggacggcgcggaggtggacatgacggagggggtggggatcaccatgcccaaggccgtggctttggaggccgtgtgtaggcctcgcgcggccatgggcgatgtccttcagaagctctgaggatcgaacttgttggcatcctatatgtacagtagtttccagtagcatcgtcccgtatgcatggcccgataccgttttgatgtagtactgtagtaccgaataaacttttttttaactacttggcgcactttattaaactcatatcaaagttacatcattcacaatgtccgaac

SEQ ID NO: 16320 - protein, 517 aa, Triticum aestivum
  peptide (1)..(517): Ceres Seq. ID no. 15169612
  misc_feature (35)..(502): Pfam Name: Pfam Description:  Cytochrome P450
  misc_feature (1)..(517): NCBI GI NO: 13661746 NR Description: putative cytochrome P450 [Lolium rigidum]
  misc_feature (1)..(517): NCBI GI NO: 13661748 NR Description: putative cytochrome P450 [Lolium rigidum]
  misc_feature (1)..(517): NCBI GI NO: 13661744 NR Description: putative cytochrome P450 [Lolium rigidum]
  misc_feature (1)..(517): NCBI GI NO: 14488353 NR Description: putative cytochrome P450
  misc_feature (1)..(517): NCBI GI NO: 14488373 NR Description: putative cytochrome P450
  misc_feature (1)..(517): NCBI GI NO: 14488355 NR Description: putative cytochrome P450
  misc_feature (1)..(516): NCBI GI NO: 14488358 NR Description: putative cytochrome P450
  misc_feature (1)..(517): NCBI GI NO: 7430635 NR Description: cytochrome P450 (EC 1
  misc_feature (14)..(517): NCBI GI NO: 3059131 NR Description: cytochrome P450 [Helianthus tuberosus]
  misc_feature (26)..(510): NCBI GI NO: 38344454 NR Description: OSJNBa0017P10.2
MDKAYIAVLSFAFLFLLHYILGKKSNGSKGAVQLPPSPPAIPFFGHLHLVEKPLHAALCRLGARYGPVFSLRLGARNAVVVSSPACARECFTEHDVAFANRPQFPSQMLVSYGGTSLVSSSYGPHWRNLRRVAAVRLLSAHRVAGMSGVIAAEVRAMARRLCRAAAASTGGGAARVELKRSLFELSLSVLMETIAQTKGTRPEADGDTDMSLEAQEFKQVVDEIIPLIGAANVWDYLPVMRWFDVSGVRSRILATVSRRDAFLHRLIDAERRRMDEGGAGDEGEKKSMIAVLLTLQKTEPELYTDQMIIALCANLFVAGTETTSTTIEWAMSLLLNHPAALKKAQAEMDASIGASRMVAADDVPRLSYLQCIINETLRLYPAAPLLLPHESSADCKVGGYDVPSGTMLIVNAYAIHRDPAVWEDPAAFRPERFEDGKADGLLLMPFGMGRRRCPGETLALQTVGVVLGTLVQCFDWDRVDGAEVDMTEGVGITMPKAVALEAVCRPRAAMGDVLQKL

SEQ ID NO: 16321 - protein, 410 aa, Triticum aestivum
  peptide (1)..(410): Ceres Seq. ID no. 15169613
  misc_feature (1)..(395): Pfam Name: Pfam Description:  Cytochrome P450
  misc_feature (1)..(410): NCBI GI NO: 13661746 NR Description: putative cytochrome P450 [Lolium rigidum]
  misc_feature (1)..(410): NCBI GI NO: 13661748 NR Description: putative cytochrome P450 [Lolium rigidum]
  misc_feature (1)..(410): NCBI GI NO: 13661744 NR Description: putative cytochrome P450 [Lolium rigidum]
  misc_feature (1)..(410): NCBI GI NO: 14488353 NR Description: putative cytochrome P450
  misc_feature (1)..(410): NCBI GI NO: 14488373 NR Description: putative cytochrome P450
  misc_feature (1)..(410): NCBI GI NO: 14488355 NR Description: putative cytochrome P450
  misc_feature (1)..(409): NCBI GI NO: 14488358 NR Description: putative cytochrome P450
  misc_feature (1)..(410): NCBI GI NO: 7430635 NR Description: cytochrome P450 (EC 1
  misc_feature (1)..(410): NCBI GI NO: 3059131 NR Description: cytochrome P450 [Helianthus tuberosus]
  misc_feature (1)..(403): NCBI GI NO: 38344454 NR Description: OSJNBa0017P10.2
MLVSYGGTSLVSSSYGPHWRNLRRVAAVRLLSAHRVAGMSGVIAAEVRAMARRLCRAAAASTGGGAARVELKRSLFELSLSVLMETIAQTKGTRPEADGDTDMSLEAQEFKQVVDEIIPLIGAANVWDYLPVMRWFDVSGVRSRILATVSRRDAFLHRLIDAERRRMDEGGAGDEGEKKSMIAVLLTLQKTEPELYTDQMIIALCANLFVAGTETTSTTIEWAMSLLLNHPAALKKAQAEMDASIGASRMVAADDVPRLSYLQCIINETLRLYPAAPLLLPHESSADCKVGGYDVPSGTMLIVNAYAIHRDPAVWEDPAAFRPERFEDGKADGLLLMPFGMGRRRCPGETLALQTVGVVLGTLVQCFDWDRVDGAEVDMTEGVGITMPKAVALEAVCRPRAAMGDVLQKL

SEQ ID NO: 16322 - protein, 372 aa, Triticum aestivum
  peptide (1)..(372): Ceres Seq. ID no. 15169614
  misc_feature (1)..(357): Pfam Name: Pfam Description:  Cytochrome P450
  misc_feature (1)..(372): NCBI GI NO: 13661746 NR Description: putative cytochrome P450 [Lolium rigidum]
  misc_feature (1)..(372): NCBI GI NO: 13661748 NR Description: putative cytochrome P450 [Lolium rigidum]
  misc_feature (1)..(372): NCBI GI NO: 13661744 NR Description: putative cytochrome P450 [Lolium rigidum]
  misc_feature (1)..(372): NCBI GI NO: 14488353 NR Description: putative cytochrome P450
  misc_feature (1)..(372): NCBI GI NO: 14488373 NR Description: putative cytochrome P450
  misc_feature (1)..(372): NCBI GI NO: 14488355 NR Description: putative cytochrome P450
  misc_feature (1)..(371): NCBI GI NO: 14488358 NR Description: putative cytochrome P450
  misc_feature (1)..(372): NCBI GI NO: 7430635 NR Description: cytochrome P450 (EC 1
  misc_feature (1)..(372): NCBI GI NO: 3059131 NR Description: cytochrome P450 [Helianthus tuberosus]
  misc_feature (1)..(365): NCBI GI NO: 38344454 NR Description: OSJNBa0017P10.2
MSGVIAAEVRAMARRLCRAAAASTGGGAARVELKRSLFELSLSVLMETIAQTKGTRPEADGDTDMSLEAQEFKQVVDEIIPLIGAANVWDYLPVMRWFDVSGVRSRILATVSRRDAFLHRLIDAERRRMDEGGAGDEGEKKSMIAVLLTLQKTEPELYTDQMIIALCANLFVAGTETTSTTIEWAMSLLLNHPAALKKAQAEMDASIGASRMVAADDVPRLSYLQCIINETLRLYPAAPLLLPHESSADCKVGGYDVPSGTMLIVNAYAIHRDPAVWEDPAAFRPERFEDGKADGLLLMPFGMGRRRCPGETLALQTVGVVLGTLVQCFDWDRVDGAEVDMTEGVGITMPKAVALEAVCRPRAAMGDVLQKL

SEQ ID NO: 16323 - DNA, 691 bp, Triticum aestivum
  misc_feature (1)..(691): Ceres Seq. ID no. 13597970
acacactgcagacaatggcgtctccagccagaagcgcgagcgcctctccagtcctcctcttgctcgtcgtcctcgccgccggggcaagcgcggcaccgctcaccatcacgaaccggtgccacttcacggtgtggccggcggtggcgctcgtgctccaccaagggggcggcggcaccgagctccacccaggggccagctggagcctcgacacgccggtgatcggctcccagtacatatgggggcgcacgggctgctccttcgaccgggccggcaaggggcggtgccagaccggcgactgcggtggcagctcgctgacttgcgggggcaacccggcggtgccggtgaccatggccgaggtgtccgtgctccaaggcaactatacctacggcgtcacgtcgacgctcaaggggttcaacctgcccatggacctgaagtgcagctccggcgacgcgctcccgtgccggaaggctgggtgcgacgttgtccagccgtacgcgaagagctgcagcgcggctggaagccggctccagatcgtcttctgcccatgatgagcggcagaacatatatagcacgtatacgcatgtaataaccaccgcacgtacgggtagtagtacctccgtataccgtacacgtgtgtcaggtattcccagccgcagtgcatacactcgagcgagattccaataaaggtgcc

SEQ ID NO: 16324 - protein, 194 aa, Triticum aestivum
  peptide (1)..(194): Ceres Seq. ID no. 13597971
HTADNGVSSQKRERLSSPPLARRPRRRGKRGTAHHHEPVPLHGVAGGGARAPPRGRRHRAPPRGQLEPRHAGDRLPVHMGAHGLLLRPGRQGAVPDRRLRWQLADLRGQPGGAGDHGRGVRAPRQLYLRRHVDAQGVQPAHGPEVQLRRRAPVPEGWVRRCPAVREELQRGWKPAPDRLLPMMSGRTYIARIRM

SEQ ID NO: 16325 - protein, 181 aa, Triticum aestivum
  peptide (1)..(181): Ceres Seq. ID no. 13597972
  misc_feature (37)..(181): Pfam Name: Pfam Description:  Thaumatin family
  misc_feature (5)..(181): NCBI GI NO: 401190 NR Description: Thaumatin-like protein precursor
  misc_feature (11)..(181): NCBI GI NO: 14164977 NR Description: thaumatin-like protein TLP4 [Hordeum vulgare]
  misc_feature (12)..(181): NCBI GI NO: 1710786 NR Description: Thaumatin-like pathogenesis-related protein 4precursor
  misc_feature (11)..(181): NCBI GI NO: 444344 NR Description: thaumatin-like protein
  misc_feature (12)..(181): NCBI GI NO: 7442164 NR Description: pathogenesis related protein-5 - maize
  misc_feature (13)..(181): NCBI GI NO: 135917 NR Description: Thaumatin-like protein PWIR2 precursor
  misc_feature (13)..(181): NCBI GI NO: 417525 NR Description: Pathogenesis-related protein 1A/1B precursor
  misc_feature (13)..(181): NCBI GI NO: 417526 NR Description: Pathogenesis-related protein 1C precursor
  misc_feature (12)..(181): NCBI GI NO: 1710783 NR Description: Thaumatin-like pathogenesis-related protein 1precursor
  misc_feature (12)..(181): NCBI GI NO: 1710785 NR Description: Thaumatin-like pathogenesis-related protein 3precursor
TLQTMASPARSASASPVLLLLVVLAAGASAAPLTITNRCHFTVWPAVALVLHQGGGGTELHPGASWSLDTPVIGSQYIWGRTGCSFDRAGKGRCQTGDCGGSSLTCGGNPAVPVTMAEVSVLQGNYTYGVTSTLKGFNLPMDLKCSSGDALPCRKAGCDVVQPYAKSCSAAGSRLQIVFCP

SEQ ID NO: 16326 - protein, 177 aa, Triticum aestivum
  peptide (1)..(177): Ceres Seq. ID no. 13597973
  misc_feature (33)..(177): Pfam Name: Pfam Description:  Thaumatin family
  misc_feature (1)..(177): NCBI GI NO: 401190 NR Description: Thaumatin-like protein precursor
  misc_feature (7)..(177): NCBI GI NO: 14164977 NR Description: thaumatin-like protein TLP4 [Hordeum vulgare]
  misc_feature (8)..(177): NCBI GI NO: 1710786 NR Description: Thaumatin-like pathogenesis-related protein 4precursor
  misc_feature (7)..(177): NCBI GI NO: 444344 NR Description: thaumatin-like protein
  misc_feature (8)..(177): NCBI GI NO: 7442164 NR Description: pathogenesis related protein-5 - maize
  misc_feature (9)..(177): NCBI GI NO: 135917 NR Description: Thaumatin-like protein PWIR2 precursor
  misc_feature (9)..(177): NCBI GI NO: 417525 NR Description: Pathogenesis-related protein 1A/1B precursor
  misc_feature (9)..(177): NCBI GI NO: 417526 NR Description: Pathogenesis-related protein 1C precursor
  misc_feature (8)..(177): NCBI GI NO: 1710783 NR Description: Thaumatin-like pathogenesis-related protein 1precursor
  misc_feature (8)..(177): NCBI GI NO: 1710785 NR Description: Thaumatin-like pathogenesis-related protein 3precursor
MASPARSASASPVLLLLVVLAAGASAAPLTITNRCHFTVWPAVALVLHQGGGGTELHPGASWSLDTPVIGSQYIWGRTGCSFDRAGKGRCQTGDCGGSSLTCGGNPAVPVTMAEVSVLQGNYTYGVTSTLKGFNLPMDLKCSSGDALPCRKAGCDVVQPYAKSCSAAGSRLQIVFCP

SEQ ID NO: 16327 - DNA, 1126 bp, Triticum aestivum
  misc_feature (1)..(1126): Ceres Seq. ID no. 12465091
gagtcgaaccgtccgagaaggcagtgcacgccgccgccgccccctcctcaatcccccggccccgccgccccctcctcaatcccccggccccgccgcccaactccctccgcctctcacgcgcgtcgccgcccaccgcgcccctgctgtctccaccccgtccgcaatctctcgccactgggtttcgaggggaacatggcgagagatggcggacgggctggcggtctggcacgcgatcgagcagtgggtgacagactacctgaccatctactacccgaacgacggcgtgctgcagggcgacgtggagctgcaggcgtggtggaaggaggtgcgggaggtcgggcacggcgacctcaaggacgcggcgtggtggcccaagatgcacaccgtggcggagctgatcaaggcctgcgccaccatcatctggacggggtcggcgctgcacgcggccgtcaacttcgggcagtacccctactcggggtaccaccccaacaagccgtcggcgagccggcggccgatgccgtcgccgggcagcgaggagtacgccctgctggagcgcgccccggagaaggcattcatcctcaccatcaccaaccagttccaggcgctggtgggcatctcgctgatggagatcctgtccaagcactcctccgacgaggtgtacctggggcagcacgacacgccggcgtggacgtcggacgccaaggcgcaggaggcgttcaggcggttcggggcgaggctggagggcatcgagaagcaggtggtggccatgaacggggacccgcggctcaagaaccgcaccgggccggccaagttcccctacatgctgctctaccccaacacctccgaccacacgggccaggccgaggggctcacggccaggggcatccccaacagcatctccatctgaggacctccatctctgcttgcttgcttgcttgcaccggatactagctactagctactgtgggtgttctgccggtgcatatgcttgccatgatctcaataataataaggcaataatgcgtgcgtgcacgacgggtccgatcggcatgcggtgcgtgtgcgtcgtcgtgtagagaaaaattcccttcatttgcccaataataaagtcgatgttgtgatgttc

SEQ ID NO: 16328 - protein, 316 aa, Triticum aestivum
  peptide (1)..(316): Ceres Seq. ID no. 12465092
ESNRPRRQCTPPPPPPQSPGPAAPSSIPRPRRPTPSASHARRRPPRPCCLHPVRNLSPLGFEGNMARDGGRAGGLARDRAVGDRLPDHLLPERRRAAGRRGAAGVVEGGAGGRARRPQGRGVVAQDAHRGGADQGLRHHHLDGVGAARGRQLRAVPLLGVPPQQAVGEPAADAVAGQRGVRPAGARPGEGIHPHHHQPVPGAGGHLADGDPVQALLRRGVPGAARHAGVDVGRQGAGGVQAVRGEAGGHREAGGGHERGPAAQEPHRAGQVPLHAALPQHLRPHGPGRGAHGQGHPQQHLHLRTSISACLLACTGY

SEQ ID NO: 16329 - protein, 301 aa, Triticum aestivum
  peptide (1)..(301): Ceres Seq. ID no. 12465093
  misc_feature (70)..(279): Pfam Name: Pfam Description:  Lipoxygenase
  misc_feature (70)..(301): NCBI GI NO: 7433148 NR Description: lipoxygenase (EC 1.13.11.12) 2 - barley
  misc_feature (45)..(301): NCBI GI NO: 8515851 NR Description: lipoxygenase [Zea mays]
  misc_feature (70)..(301): NCBI GI NO: 31126788 NR Description: lipoxygenase L-2; lipoxygenase
  misc_feature (45)..(301): NCBI GI NO: 2506825 NR Description: Lipoxygenase 1
  misc_feature (45)..(301): NCBI GI NO: 30025164 NR Description: lipoxygenase 1 protein [Hordeum vulgare]
  misc_feature (70)..(301): NCBI GI NO: 126401 NR Description: Lipoxygenase L-2
  misc_feature (45)..(301): NCBI GI NO: 19033550 NR Description: putative lipoxygenase
  misc_feature (45)..(301): NCBI GI NO: 38636549 NR Description: 9-lipoxigenase
  misc_feature (45)..(301): NCBI GI NO: 4887227 NR Description: lipoxygenase [Zea mays]
  misc_feature (45)..(301): NCBI GI NO: 12620877 NR Description: lipoxygenase [Zea mays]
SRTVREGSARRRRPLLNPPAPPPPPQSPGPAAQLPPPLTRVAAHRAPAVSTPSAISRHWVSRGTWREMADGLAVWHAIEQWVTDYLTIYYPNDGVLQGDVELQAWWKEVREVGHGDLKDAAWWPKMHTVAELIKACATIIWTGSALHAAVNFGQYPYSGYHPNKPSASRRPMPSPGSEEYALLERAPEKAFILTITNQFQALVGISLMEILSKHSSDEVYLGQHDTPAWTSDAKAQEAFRRFGARLEGIEKQVVAMNGDPRLKNRTGPAKFPYMLLYPNTSDHTGQAEGLTARGIPNSISI

SEQ ID NO: 16330 - protein, 252 aa, Triticum aestivum
  peptide (1)..(252): Ceres Seq. ID no. 12465094
MARDGGRAGGLARDRAVGDRLPDHLLPERRRAAGRRGAAGVVEGGAGGRARRPQGRGVVAQDAHRGGADQGLRHHHLDGVGAARGRQLRAVPLLGVPPQQAVGEPAADAVAGQRGVRPAGARPGEGIHPHHHQPVPGAGGHLADGDPVQALLRRGVPGAARHAGVDVGRQGAGGVQAVRGEAGGHREAGGGHERGPAAQEPHRAGQVPLHAALPQHLRPHGPGRGAHGQGHPQQHLHLRTSISACLLACTGY

SEQ ID NO: 16331 - protein, 234 aa, Triticum aestivum
  peptide (1)..(234): Ceres Seq. ID no. 12465095
  misc_feature (3)..(212): Pfam Name: Pfam Description:  Lipoxygenase
  misc_feature (3)..(234): NCBI GI NO: 7433148 NR Description: lipoxygenase (EC 1.13.11.12) 2 - barley
  misc_feature (1)..(234): NCBI GI NO: 8515851 NR Description: lipoxygenase [Zea mays]
  misc_feature (3)..(234): NCBI GI NO: 31126788 NR Description: lipoxygenase L-2; lipoxygenase
  misc_feature (1)..(234): NCBI GI NO: 2506825 NR Description: Lipoxygenase 1
  misc_feature (1)..(234): NCBI GI NO: 30025164 NR Description: lipoxygenase 1 protein [Hordeum vulgare]
  misc_feature (3)..(234): NCBI GI NO: 126401 NR Description: Lipoxygenase L-2
  misc_feature (1)..(234): NCBI GI NO: 19033550 NR Description: putative lipoxygenase
  misc_feature (1)..(234): NCBI GI NO: 38636549 NR Description: 9-lipoxigenase
  misc_feature (1)..(234): NCBI GI NO: 4887227 NR Description: lipoxygenase [Zea mays]
  misc_feature (1)..(234): NCBI GI NO: 12620877 NR Description: lipoxygenase [Zea mays]
MADGLAVWHAIEQWVTDYLTIYYPNDGVLQGDVELQAWWKEVREVGHGDLKDAAWWPKMHTVAELIKACATIIWTGSALHAAVNFGQYPYSGYHPNKPSASRRPMPSPGSEEYALLERAPEKAFILTITNQFQALVGISLMEILSKHSSDEVYLGQHDTPAWTSDAKAQEAFRRFGARLEGIEKQVVAMNGDPRLKNRTGPAKFPYMLLYPNTSDHTGQAEGLTARGIPNSISI

SEQ ID NO: 16332 - DNA, 1016 bp, Triticum aestivum
  misc_feature (1)..(1016): Ceres Seq. ID no. 12619453
ctcccatctcccacttctccgccccctcgccccctccgccgttgacctcgtcggccgccgccgacgaggcctcctgtcgccggatgcccatcctctagacacccgctccgtcacaacctgaaccccgctcctctcccagacgagccgtgtcagcatccgactccaccgatcctccgaaccctagatcccctggcggaaccgaggtccatcccttcgaaatcaatgtatccaacatttgatgttggtgaccggattctcgccgagagggtttcatatattttccgggagccgcaagttttggacattgtgatcttccgtgcacccctagtccttcaggcattgggctacagctcaagtgatgtgttcatcaagagggttgtggccaagggcggggacatcgttgaagtgactgatggtcaattattagttaatggagtcgtccaagatgaggactttgtgctcgagccacccgattatgaaatggacccggtgagtgtgcctgaaggctacgtgtttgtgctgggggacaacagaaacaacagcttcgattcccataactggggaccgctacccgtgaagaacattcttgggagatctgtgcttcgatactggccaccatcgaaaataacagacacaatttatgatcacattgaccatgatgtggttcatggcatggcaggcatctcctgagatgcacagttgattcggcaatgctaaaccaacccaatttttttttgctgatgatctctgctgcattttttttctcctctagctatttatttgattgatgtcgccttgcacgtaatgcctggctgactcagtttttcccctgccctaccagcagatgcttgtttagaggcaacaattcttgtactgtaaccaaaggtctggctcgcctgtcgaatgagcatccatggcagcgcatggaaattttgttatgtttggcacaaggagagttggttgatctgtttcagatcttaatgtataagaagcagaaagcatatgccatattgtcc

SEQ ID NO: 16333 - protein, 155 aa, Triticum aestivum
  peptide (1)..(155): Ceres Seq. ID no. 12619454
  misc_feature (1)..(123): Pfam Name: Pfam Description:  Signal peptidase I
  misc_feature (1)..(155): NCBI GI NO: 25408074 NR Description: probable signal peptidase I
  misc_feature (1)..(155): NCBI GI NO: 30684587 NR Description: signal peptidase I -related [Arabidopsis thaliana]
  misc_feature (1)..(140): NCBI GI NO: 15222236 NR Description: chloroplast thylakoidal processing peptidase
  misc_feature (1)..(140): NCBI GI NO: 21553622 NR Description: chloroplast thylakoidal processing peptidase
  misc_feature (1)..(141): NCBI GI NO: 9294054 NR Description: contains similarity to signal peptidase
  misc_feature (1)..(141): NCBI GI NO: 30687572 NR Description: chloroplast thylakoidal processing peptidase -related
  misc_feature (1)..(141): NCBI GI NO: 25082936 NR Description: chloroplast thylakoidal processing peptidase
  misc_feature (1)..(135): NCBI GI NO: 17230467 NR Description: signal peptidase I [Nostoc sp. PCC 7120]
  misc_feature (1)..(134): NCBI GI NO: 16329254 NR Description: leader peptidase I [Synechocystis sp. PCC 6803]
  misc_feature (1)..(131): NCBI GI NO: 22297948 NR Description: signal peptidase I
MYPTFDVGDRILAERVSYIFREPQVLDIVIFRAPLVLQALGYSSSDVFIKRVVAKGGDIVEVTDGQLLVNGVVQDEDFVLEPPDYEMDPVSVPEGYVFVLGDNRNNSFDSHNWGPLPVKNILGRSVLRYWPPSKITDTIYDHIDHDVVHGMAGIS

SEQ ID NO: 16334 - DNA, 984 bp, Triticum aestivum
  misc_feature (1)..(984): Ceres Seq. ID no. 12619787
gaccgggtggcacgctgcccccaactcgcagttccagaatcgtcttccctttcctcggcgacccatgaaggaccccttcgaggcggccgttgaggagcaggactccccgccggattcgccggcgccgcccgaggaggaccctgccacagcggtcccccacacagccgccgaggactatgacggcagcgccggcgccggtggttcgcgcgccccgccgccgcggccgcggccttcggcgctagccgcgccctcgacctccgtagccccggcggcggcgaaggccaaggttcggccccataaggagcaggatgacgaccacgacgaggaagaccccatggaggtcgacctcgacaagctgccctccggcaccagcgatcccgacaagctcgccaagatgaatgctttgttatcccaatttacagaagaccagatgaaccggtatgagtcctttcgtagatctggattccagaaatctaacatgaaaaagctattggcgagtatcactggcagtcaaaagatatctatgccaacgaccatcgtagtatcaggaatagcaaagatgtttgtcggcgaggtcattgaaacagcaagaatagttatgagtgaaaggaaagattctggacccatcaggccttgccacatcagagaagcatacagaagattgaagcttgaagggaagatcccaaagcgatccgttcctagactctttcgctagagtcgaatcatcgctgttgatgtaagtcaggcgtcgtatgattctctctcggaggcaaaaggttatggtaactgtaatggaacttccgctttgcaatctcaatgcgttccgacacttctacttgccatcgcacggaaggtgattgttgggagaacaaagaaaaatagtagccgcagcgtgatggtattttatggtgcttgctactcattggaatttgcatctataagctgtaagttgtgactgtttcatgcttatttactagtggttct

SEQ ID NO: 16335 - protein, 237 aa, Triticum aestivum
  peptide (1)..(237): Ceres Seq. ID no. 12619788
  misc_feature (132)..(221): Pfam Name: Pfam Description:  hTAFII28-like protein conserved region
  misc_feature (22)..(208): NCBI GI NO: 34911174 NR Description: B1144G04.34
  misc_feature (23)..(237): NCBI GI NO: 15235369 NR Description: putative protein; protein id: At4g20280
  misc_feature (23)..(237): NCBI GI NO: 7447999 NR Description: hypothetical protein F1C12
  misc_feature (113)..(237): NCBI GI NO: 15223727 NR Description: hypothetical protein; protein id: At1g20000.1
  misc_feature (113)..(237): NCBI GI NO: 25316525 NR Description: T20H2.22 protein - Arabidopsis thaliana
  misc_feature (125)..(228): NCBI GI NO: 30794436 NR Description: TAF11 RNA polymerase II, TATA box binding protein
  misc_feature (125)..(228): NCBI GI NO: 5032151 NR Description: TBP-associated factor 11
  misc_feature (125)..(228): NCBI GI NO: 27674899 NR Description: similar to Transcription initiation factor TFIID 28kDa subunit
  misc_feature (125)..(228): NCBI GI NO: 27704824 NR Description: similar to Transcription initiation factor TFIID 28kDa subunit
  misc_feature (127)..(228): NCBI GI NO: 12835252 NR Description: unnamed protein product [Mus musculus]
TGWHAAPNSQFQNRLPFPRRPMKDPFEAAVEEQDSPPDSPAPPEEDPATAVPHTAAEDYDGSAGAGGSRAPPPRPRPSALAAPSTSVAPAAAKAKVRPHKEQDDDHDEEDPMEVDLDKLPSGTSDPDKLAKMNALLSQFTEDQMNRYESFRRSGFQKSNMKKLLASITGSQKISMPTTIVVSGIAKMFVGEVIETARIVMSERKDSGPIRPCHIREAYRRLKLEGKIPKRSVPRLFR

SEQ ID NO: 16336 - protein, 216 aa, Triticum aestivum
  peptide (1)..(216): Ceres Seq. ID no. 12619789
  misc_feature (111)..(200): Pfam Name: Pfam Description:  hTAFII28-like protein conserved region
  misc_feature (1)..(187): NCBI GI NO: 34911174 NR Description: B1144G04.34
  misc_feature (2)..(216): NCBI GI NO: 15235369 NR Description: putative protein; protein id: At4g20280
  misc_feature (2)..(216): NCBI GI NO: 7447999 NR Description: hypothetical protein F1C12
  misc_feature (92)..(216): NCBI GI NO: 15223727 NR Description: hypothetical protein; protein id: At1g20000.1
  misc_feature (92)..(216): NCBI GI NO: 25316525 NR Description: T20H2.22 protein - Arabidopsis thaliana
  misc_feature (104)..(207): NCBI GI NO: 30794436 NR Description: TAF11 RNA polymerase II, TATA box binding protein
  misc_feature (104)..(207): NCBI GI NO: 5032151 NR Description: TBP-associated factor 11
  misc_feature (104)..(207): NCBI GI NO: 27704824 NR Description: similar to Transcription initiation factor TFIID 28kDa subunit
  misc_feature (104)..(207): NCBI GI NO: 27674899 NR Description: similar to Transcription initiation factor TFIID 28kDa subunit
  misc_feature (106)..(207): NCBI GI NO: 12835252 NR Description: unnamed protein product [Mus musculus]
MKDPFEAAVEEQDSPPDSPAPPEEDPATAVPHTAAEDYDGSAGAGGSRAPPPRPRPSALAAPSTSVAPAAAKAKVRPHKEQDDDHDEEDPMEVDLDKLPSGTSDPDKLAKMNALLSQFTEDQMNRYESFRRSGFQKSNMKKLLASITGSQKISMPTTIVVSGIAKMFVGEVIETARIVMSERKDSGPIRPCHIREAYRRLKLEGKIPKRSVPRLFR

SEQ ID NO: 16337 - protein, 126 aa, Triticum aestivum
  peptide (1)..(126): Ceres Seq. ID no. 12619790
  misc_feature (21)..(110): Pfam Name: Pfam Description:  hTAFII28-like protein conserved region
  misc_feature (1)..(97): NCBI GI NO: 34911174 NR Description: B1144G04.34
  misc_feature (1)..(126): NCBI GI NO: 15235369 NR Description: putative protein; protein id: At4g20280
  misc_feature (1)..(126): NCBI GI NO: 7447999 NR Description: hypothetical protein F1C12
  misc_feature (2)..(126): NCBI GI NO: 15223727 NR Description: hypothetical protein; protein id: At1g20000.1
  misc_feature (2)..(126): NCBI GI NO: 25316525 NR Description: T20H2.22 protein - Arabidopsis thaliana
  misc_feature (14)..(117): NCBI GI NO: 30794436 NR Description: TAF11 RNA polymerase II, TATA box binding protein
  misc_feature (14)..(117): NCBI GI NO: 5032151 NR Description: TBP-associated factor 11
  misc_feature (14)..(117): NCBI GI NO: 27704824 NR Description: similar to Transcription initiation factor TFIID 28kDa subunit
  misc_feature (14)..(117): NCBI GI NO: 27674899 NR Description: similar to Transcription initiation factor TFIID 28kDa subunit
  misc_feature (16)..(117): NCBI GI NO: 12835252 NR Description: unnamed protein product [Mus musculus]
MEVDLDKLPSGTSDPDKLAKMNALLSQFTEDQMNRYESFRRSGFQKSNMKKLLASITGSQKISMPTTIVVSGIAKMFVGEVIETARIVMSERKDSGPIRPCHIREAYRRLKLEGKIPKRSVPRLFR

SEQ ID NO: 16338 - DNA, 727 bp, Triticum aestivum
  misc_feature (1)..(727): Ceres Seq. ID no. 12619015
tccgcctttccctcccccattcgcgtcgcgtctccaccccacctcccctcgcctcctcctccacctccccgtgtcgcgagaaaccctcgtcccttcctcccctctcctccctcgtccctcctcccatggcggagtcgcccgagaacgccgccgcggcgcccgccgctcctcccgcccccgccccggccccggcgccggcgccgaagccgtccccgcccgccaggtccgggatcccgccgcggtacgacctcgacgccaagtgggacgcctgcctcgacctctccatccgccgcgtcgcctactcctccctcgccggcgccttcgggggcctcatcctcttccgtagcccaacaacccgctgggcatcagttgcacttggagctggtgtggggataggggctgcgttcactgaatgctcatacatattcaatggttctcctccaaagtggtcggccaatgcttcgactgttgctgctcattctgaagggggagacaattaaaacagtgtcgggcgggatgagtagcccaatcttggcggagttttggagcgtttgttgattgaacctagctgtttggtgtctgatgatatcgccacttgtcatagtatgtcctgaaagttagcgtgtgccccctcgtgaatttcttcacacattacgcggaaaccattcgtgactgcggtctgatgatatgaccctatggctccgtaagttgggtctgtcgtgaggtt

SEQ ID NO: 16339 - protein, 165 aa, Triticum aestivum
  peptide (1)..(165): Ceres Seq. ID no. 12619016
  misc_feature (74)..(143): Pfam Name: DUF543 Pfam Description: Domain of unknown function
  misc_feature (74)..(152): NCBI GI NO: 18410008 NR Description: unknown protein; protein id: At1g72170
  misc_feature (74)..(152): NCBI GI NO: 21553491 NR Description: unknown [Arabidopsis thaliana]
  misc_feature (82)..(158): NCBI GI NO: 18395129 NR Description: expressed protein; protein id: At1g22520
  misc_feature (74)..(152): NCBI GI NO: 25406151 NR Description: unknown protein T9N14.2
RLSLPHSRRVSTPPPLASSSTSPCREKPSSLPPLSSLVPPPMAESPENAAAAPAAPPAPAPAPAPAPKPSPPARSGIPPRYDLDAKWDACLDLSIRRVAYSSLAGAFGGLILFRSPTTRWASVALGAGVGIGAAFTECSYIFNGSPPKWSANASTVAAHSEGGDN

SEQ ID NO: 16340 - protein, 131 aa, Triticum aestivum
  peptide (1)..(131): Ceres Seq. ID no. 12619017
  misc_feature (4)..(107): Pfam Name: Pfam Description:  Extensin-like region
  misc_feature (4)..(107): NCBI GI NO: 6523547 NR Description: hydroxyproline-rich glycoprotein DZ-HRGP
  misc_feature (4)..(119): NCBI GI NO: 81286 NR Description: extensin - Volvox carteri (fragment)
  misc_feature (4)..(120): NCBI GI NO: 20138131 NR Description: Vegetative cell wall protein gp1 precursor
  misc_feature (12)..(131): NCBI GI NO: 28279905 NR Description: Similar to Wiskott-Aldrich syndrome-like (human)
  misc_feature (4)..(108): NCBI GI NO: 6523547 NR Description: hydroxyproline-rich glycoprotein DZ-HRGP
  misc_feature (4)..(107): NCBI GI NO: 2129478 NR Description: chitinase (EC 3.2.1.14) precursor - beet
  misc_feature (4)..(130): NCBI GI NO: 20138131 NR Description: Vegetative cell wall protein gp1 precursor
  misc_feature (11)..(120): NCBI GI NO: 2129478 NR Description: chitinase (EC 3.2.1.14) precursor - beet
  misc_feature (4)..(107): NCBI GI NO: 6523547 NR Description: hydroxyproline-rich glycoprotein DZ-HRGP
  misc_feature (4)..(107): NCBI GI NO: 6523547 NR Description: hydroxyproline-rich glycoprotein DZ-HRGP
SAFPSPIRVASPPHLPSPPPPPPRVARNPRPFLPSPPSSLLPWRSRPRTPPRRPPLLPPPPRPRRRRRSRPRPPGPGSRRGTTSTPSGTPASTSPSAASPTPPSPAPSGASSSSVAQQPAGHQLHLELVWG

SEQ ID NO: 16341 - protein, 124 aa, Triticum aestivum
  peptide (1)..(124): Ceres Seq. ID no. 12619018
  misc_feature (33)..(102): Pfam Name: DUF543 Pfam Description: Domain of unknown function
  misc_feature (33)..(111): NCBI GI NO: 18410008 NR Description: unknown protein; protein id: At1g72170
  misc_feature (33)..(111): NCBI GI NO: 21553491 NR Description: unknown [Arabidopsis thaliana]
  misc_feature (41)..(117): NCBI GI NO: 18395129 NR Description: expressed protein; protein id: At1g22520
  misc_feature (33)..(111): NCBI GI NO: 25406151 NR Description: unknown protein T9N14.2
MAESPENAAAAPAAPPAPAPAPAPAPKPSPPARSGIPPRYDLDAKWDACLDLSIRRVAYSSLAGAFGGLILFRSPTTRWASVALGAGVGIGAAFTECSYIFNGSPPKWSANASTVAAHSEGGDN

SEQ ID NO: 16342 - DNA, 1022 bp, Triticum aestivum
  misc_feature (1)..(1022): Ceres Seq. ID no. 15224382
ttcctcccctcccctcccctccatccatcctcagccgccccttcgccggccggccatggcaaatgcttccctccagtccttcctcccccagcaccaccattccttcctcaacagcaacacccacgacggctcccctcccgcgctcctcaagctcaccaccaacagcaccaacgccagcaacagcatttccttcaagctcttcgccagcagctcctcctcggtgaccacaaccgccaactcgccggctccgactccggtcgccgccgccgccgcggcgacaacctcgccgcccaccccctccctggagctcctgggccagcagctcgcggcgggggactaccggcaggccgacgagaccacgcgcgccctcctcatcgtcctcgcgggcgaggccgcgcgccgccgagggtacgtcttcttctcggaggtccagttcatctccgtcgaggacctccgcgccgtggacgcgctctggctggagcacagcggcggcaggttcgggtacagcgtgcagcgccgggtttgggacaagtcgctgcgcgagttcacccgattcttcatcaagatcggctggatgaagaagctggacaccgaggtggagcagttcaactacagggccttccccgacgagttcatctgggagctcaccgacgacacgccggagggccacctgcccctcaccaatgccctcagggggacgcggctcctggagaacatcttcacccaccccgccttcgactgcgaagaagatgaagcagcaggggcagatgaggaggctgacaagggcagtgccactggtcagaataataaggatgacaacaaaggcaggggcaggccaaagagtttgacagatttcaagcccgactactccttttaaggagcgtgcaagtttgtgatgatgctgccatggggcagctgattttaaaaaaaagtcatgtttctgtagttcgttttggctgtttttgtactgaacatgcatgcaaatttgtgaccatatatattactataaagataagtgtttg

SEQ ID NO: 16343 - protein, 291 aa, Triticum aestivum
  peptide (1)..(291): Ceres Seq. ID no. 15224383
  misc_feature (31)..(291): NCBI GI NO: 15231674 NR Description: expressed protein [Arabidopsis thaliana]
  misc_feature (31)..(291): NCBI GI NO: 32816239 NR Description: GUN4 mutant [Arabidopsis thaliana]
  misc_feature (31)..(291): NCBI GI NO: 17380924 NR Description: unknown protein [Arabidopsis thaliana]
  misc_feature (73)..(245): NCBI GI NO: 16329174 NR Description: hypothetical protein [Synechocystis sp. PCC 6803]
  misc_feature (107)..(245): NCBI GI NO: 23042866 NR Description: hypothetical protein
  misc_feature (101)..(242): NCBI GI NO: 30468073 NR Description: ORF155 [Cyanidioschyzon merolae]
  misc_feature (104)..(245): NCBI GI NO: 22299137 NR Description: ORF_ID:tlr1594~hypothetical protein
  misc_feature (104)..(245): NCBI GI NO: 17229318 NR Description: hypothetical protein [Nostoc sp. PCC 7120]
  misc_feature (93)..(244): NCBI GI NO: 33861481 NR Description: conserved hypothetical protein
  misc_feature (116)..(246): NCBI GI NO: 11465668 NR Description: ORF238 [Porphyra purpurea]
SSPPLPSIHPQPPLRRPAMANASLQSFLPQHHHSFLNSNTHDGSPPALLKLTTNSTNASNSISFKLFASSSSSVTTTANSPAPTPVAAAAAATTSPPTPSLELLGQQLAAGDYRQADETTRALLIVLAGEAARRRGYVFFSEVQFISVEDLRAVDALWLEHSGGRFGYSVQRRVWDKSLREFTRFFIKIGWMKKLDTEVEQFNYRAFPDEFIWELTDDTPEGHLPLTNALRGTRLLENIFTHPAFDCEEDEAAGADEEADKGSATGQNNKDDNKGRGRPKSLTDFKPDYSF

SEQ ID NO: 16344 - protein, 273 aa, Triticum aestivum
  peptide (1)..(273): Ceres Seq. ID no. 15224384
  misc_feature (13)..(273): NCBI GI NO: 15231674 NR Description: expressed protein [Arabidopsis thaliana]
  misc_feature (13)..(273): NCBI GI NO: 32816239 NR Description: GUN4 mutant [Arabidopsis thaliana]
  misc_feature (13)..(273): NCBI GI NO: 17380924 NR Description: unknown protein [Arabidopsis thaliana]
  misc_feature (55)..(227): NCBI GI NO: 16329174 NR Description: hypothetical protein [Synechocystis sp. PCC 6803]
  misc_feature (89)..(227): NCBI GI NO: 23042866 NR Description: hypothetical protein
  misc_feature (83)..(224): NCBI GI NO: 30468073 NR Description: ORF155 [Cyanidioschyzon merolae]
  misc_feature (86)..(227): NCBI GI NO: 22299137 NR Description: ORF_ID:tlr1594~hypothetical protein
  misc_feature (86)..(227): NCBI GI NO: 17229318 NR Description: hypothetical protein [Nostoc sp. PCC 7120]
  misc_feature (75)..(226): NCBI GI NO: 33861481 NR Description: conserved hypothetical protein
  misc_feature (98)..(228): NCBI GI NO: 11465668 NR Description: ORF238 [Porphyra purpurea]
MANASLQSFLPQHHHSFLNSNTHDGSPPALLKLTTNSTNASNSISFKLFASSSSSVTTTANSPAPTPVAAAAAATTSPPTPSLELLGQQLAAGDYRQADETTRALLIVLAGEAARRRGYVFFSEVQFISVEDLRAVDALWLEHSGGRFGYSVQRRVWDKSLREFTRFFIKIGWMKKLDTEVEQFNYRAFPDEFIWELTDDTPEGHLPLTNALRGTRLLENIFTHPAFDCEEDEAAGADEEADKGSATGQNNKDDNKGRGRPKSLTDFKPDYSF

SEQ ID NO: 16345 - protein, 250 aa, Triticum aestivum
  peptide (1)..(250): Ceres Seq. ID no. 15224385
FLPSPPLHPSSAAPSPAGHGKCFPPVLPPPAPPFLPQQQHPRRLPSRAPQAHHQQHQRQQQHFLQALRQQLLLGDHNRQLAGSDSGRRRRRGDNLAAHPLPGAPGPAARGGGLPAGRRDHARPPHRPRGRGRAPPRVRLLLGGPVHLRRGPPRRGRALAGAQRRQVRVQRAAPGLGQVAARVHPILHQDRLDEEAGHRGGAVQLQGLPRRVHLGAHRRHAGGPPAPHQCPQGDAAPGEHLHPPRLRLRRR

SEQ ID NO: 16346 - DNA, 738 bp, Triticum aestivum
  misc_feature (1)..(738): Ceres Seq. ID no. 12619201
gttccacttccacagcgggcgccatggacgcggccgtgtccctgcaccaccacggggcgctccccgccgccgcagcctccctccagccccaccaccaccaccgcgcgctccacctcaggcacccgcctccggcctcctccatctccgcgcgcctgaccgtgaccgcgccgccccgccgctcctcctcctcctcgtctgtctccgccgctccgccggcgcacccggcgcgtgccagcaccaaaaccatcaccagcagccgcgccgccacgggctacgcggccgcgctagccgacgcgtcgctccgcgcgggcacgctgcccggggccgcccgccacgcgcgcgccctgctccggcgcctgaaggagcctccccgcgggcagcgcctggaggagcccgacgcgcgggtgggcgcgctggtgcggctgctcgtcggcaagggcaaggccggcatggtctccgacgtcatggccgagttcgccgccctctgcgaccacctgctcgccccgccgccgtcttcagcctcgtcgagcaagcgcgcccagtgcgcccccgcctactagcgcctgatgcacgtaacgtacgtgccatgctagcttttcggttttgcacttcaggattactggctgatgcatgcacgtacgtaacgccacgccggtatcaactgcagatgcccaactgcttgctactgtactatgactgtataattaactgtgagcactgtccatgcgcgtacgcatc

SEQ ID NO: 16347 - protein, 245 aa, Triticum aestivum
  peptide (1)..(245): Ceres Seq. ID no. 12619202
  misc_feature (12)..(190): NCBI GI NO: 22962211 NR Description: hypothetical protein [Rhodopseudomonas palustris]
FHFHSGRHGRGRVPAPPRGAPRRRSLPPAPPPPPRAPPQAPASGLLHLRAPDRDRAAPPLLLLLVCLRRSAGAPGACQHQNHHQQPRRHGLRGRASRRVAPRGHAARGRPPRARPAPAPEGASPRAAPGGARRAGGRAGAAARRQGQGRHGLRRHGRVRRPLRPPARPAAVFSLVEQARPVRPRLLAPDARNVRAMLAFRFCTSGLLADACTYVTPRRYQLQMPNCLLLYYDCIINCEHCPCAYA

SEQ ID NO: 16348 - protein, 185 aa, Triticum aestivum
  peptide (1)..(185): Ceres Seq. ID no. 12619203
STSTAGAMDAAVSLHHHGALPAAAASLQPHHHHRALHLRHPPPASSISARLTVTAPPRRSSSSSSVSAAPPAHPARASTKTITSSRAATGYAAALADASLRAGTLPGAARHARALLRRLKEPPRGQRLEEPDARVGALVRLLVGKGKAGMVSDVMAEFAALCDHLLAPPPSSASSSKRAQCAPAY

SEQ ID NO: 16349 - protein, 178 aa, Triticum aestivum
  peptide (1)..(178): Ceres Seq. ID no. 12619204
MDAAVSLHHHGALPAAAASLQPHHHHRALHLRHPPPASSISARLTVTAPPRRSSSSSSVSAAPPAHPARASTKTITSSRAATGYAAALADASLRAGTLPGAARHARALLRRLKEPPRGQRLEEPDARVGALVRLLVGKGKAGMVSDVMAEFAALCDHLLAPPPSSASSSKRAQCAPAY

SEQ ID NO: 16350 - DNA, 1393 bp, Triticum aestivum
  misc_feature (1)..(1393): Ceres Seq. ID no. 15224772
gccgtggtttgttgccagaaaaacaatctatcttcgttccttgcttcgtctacctccgtccctcaaaactagttcgagctagctagggttagacccaacaattggtatcagagcctcgtttgttcatgtgctcgtggccatgacgatcgtccagcacggcgcagggggtagcacggtgtcgatgccaatgccgatgctcacaccggaaaactacacggtgtgggcgatcaaggccgaagccatcctcgacgcccagaacctctgggaagcggtgtcgccggcaggcgacgcggcggtcgacgcggggaaaaacaagacggcgagggtggtgctgttcggtgtgctctccgaagacttgttgatgcaggtatcgacgaagaagacggccgctgaggtgtgggccagcttgaagacgaggttcgtcggtgctgatcgggtccaggcggcgcggctctccactctccgtggcgagtttgacaacctgcgcatggaggagggggaggcgctttacgcgtacgccggcaaaatcggcggcatggcagcaaggtatgctggcctcggctcgacgctcgacgacaccgccatggtgaaaaaactgctcgacacggtgcccgatcggttgtatgccgcggtggccgggattgagcagttctgcgacgtggagacgatggtgttcgaggaggcgttgagcaggctcaaggagttcgacgaacgcttacgtcggcgcacgcaggacaacggcggacgaggcggcgatcagctgatgttcgcggcggcccagtgggaggcacggcagtgtcagcgcggcggcaacctcgaccatgacgacggtgcgagcagcgtggcttcgggcacgagatgacggcgcgggaagtgctacaactgtggcgttcgtggccacttctcccgtgactgccggcagccgaaggagaaggcgctcctcgccaacatcgacgacgagccgaccttactgtaggtcgtgtcttagggggagattcttaggaataagacacggcggtggtggtgaccagtgtgtgcgtgcgtgttggtcgtgccagacgccgtggcgagtgtgcgtgtgtgcgtgcgttgtgtgcgtgtcgagtctgtgctcataattgagtcgtagtcggttagcagcagtagctggacgcgttagaacgcgtcgtagaggcggtgtaggtgagcaggttgttgggcgctcgtacgtgcttgcgtaggaaaacaatggcttgggcgctacgtctcgtaggctacaaagccggccaggatttggtttgttagtgcgtcagattgatatacgtaggtggttaggagtccagatatgttttgatttgtccagctatatatatgacagagaaaagaggcgttcggcgccgtggtttgttgctac

SEQ ID NO: 16351 - protein, 240 aa, Triticum aestivum
  peptide (1)..(240): Ceres Seq. ID no. 15224773
  misc_feature (103)..(155): Pfam Name: Pfam Description:  Retrotransposon gag protein
  misc_feature (1)..(240): NCBI GI NO: 34907386 NR Description: P0471B04.27
  misc_feature (1)..(240): NCBI GI NO: 34910624 NR Description: putative copia-type polyprotein
  misc_feature (7)..(224): NCBI GI NO: 37534104 NR Description: putative retroelement
  misc_feature (222)..(240): NCBI GI NO: 37534104 NR Description: putative retroelement
  misc_feature (9)..(240): NCBI GI NO: 30017513 NR Description: putative gag-pol polyprotein
  misc_feature (51)..(224): NCBI GI NO: 29150404 NR Description: gag-pol polyprotein
  misc_feature (212)..(240): NCBI GI NO: 29150404 NR Description: gag-pol polyprotein
  misc_feature (8)..(240): NCBI GI NO: 37534096 NR Description: putative retroelement
  misc_feature (14)..(240): NCBI GI NO: 34902098 NR Description: hypothetical protein
  misc_feature (14)..(240): NCBI GI NO: 6598588 NR Description: F5J5.14 [Arabidopsis thaliana]
MTIVQHGAGGSTVSMPMPMLTPENYTVWAIKAEAILDAQNLWEAVSPAGDAAVDAGKNKTARVVLFGVLSEDLLMQVSTKKTAAEVWASLKTRFVGADRVQAARLSTLRGEFDNLRMEEGEALYAYAGKIGGMAARYAGLGSTLDDTAMVKKLLDTVPDRLYAAVAGIEQFCDVETMVFEEALSRLKEFDERLRRRTQDNGGRGGDQLMFAAAQWEARQCQRGGNLDHDDGASSVASGTR

SEQ ID NO: 16352 - protein, 226 aa, Triticum aestivum
  peptide (1)..(226): Ceres Seq. ID no. 15224774
  misc_feature (89)..(141): Pfam Name: Pfam Description:  Retrotransposon gag protein
  misc_feature (1)..(226): NCBI GI NO: 34907386 NR Description: P0471B04.27
  misc_feature (1)..(226): NCBI GI NO: 34910624 NR Description: putative copia-type polyprotein
  misc_feature (1)..(210): NCBI GI NO: 37534104 NR Description: putative retroelement
  misc_feature (208)..(226): NCBI GI NO: 37534104 NR Description: putative retroelement
  misc_feature (1)..(226): NCBI GI NO: 30017513 NR Description: putative gag-pol polyprotein
  misc_feature (37)..(210): NCBI GI NO: 29150404 NR Description: gag-pol polyprotein
  misc_feature (198)..(226): NCBI GI NO: 29150404 NR Description: gag-pol polyprotein
  misc_feature (1)..(226): NCBI GI NO: 37534096 NR Description: putative retroelement
  misc_feature (1)..(226): NCBI GI NO: 34902098 NR Description: hypothetical protein
  misc_feature (1)..(226): NCBI GI NO: 6598588 NR Description: F5J5.14 [Arabidopsis thaliana]
MPMPMLTPENYTVWAIKAEAILDAQNLWEAVSPAGDAAVDAGKNKTARVVLFGVLSEDLLMQVSTKKTAAEVWASLKTRFVGADRVQAARLSTLRGEFDNLRMEEGEALYAYAGKIGGMAARYAGLGSTLDDTAMVKKLLDTVPDRLYAAVAGIEQFCDVETMVFEEALSRLKEFDERLRRRTQDNGGRGGDQLMFAAAQWEARQCQRGGNLDHDDGASSVASGTR

SEQ ID NO: 16353 - protein, 224 aa, Triticum aestivum
  peptide (1)..(224): Ceres Seq. ID no. 15224775
  misc_feature (87)..(139): Pfam Name: Pfam Description:  Retrotransposon gag protein
  misc_feature (1)..(224): NCBI GI NO: 34907386 NR Description: P0471B04.27
  misc_feature (1)..(224): NCBI GI NO: 34910624 NR Description: putative copia-type polyprotein
  misc_feature (1)..(208): NCBI GI NO: 37534104 NR Description: putative retroelement
  misc_feature (206)..(224): NCBI GI NO: 37534104 NR Description: putative retroelement
  misc_feature (1)..(224): NCBI GI NO: 30017513 NR Description: putative gag-pol polyprotein
  misc_feature (35)..(208): NCBI GI NO: 29150404 NR Description: gag-pol polyprotein
  misc_feature (196)..(224): NCBI GI NO: 29150404 NR Description: gag-pol polyprotein
  misc_feature (1)..(224): NCBI GI NO: 37534096 NR Description: putative retroelement
  misc_feature (1)..(224): NCBI GI NO: 34902098 NR Description: hypothetical protein
  misc_feature (1)..(224): NCBI GI NO: 6598588 NR Description: F5J5.14 [Arabidopsis thaliana]
MPMLTPENYTVWAIKAEAILDAQNLWEAVSPAGDAAVDAGKNKTARVVLFGVLSEDLLMQVSTKKTAAEVWASLKTRFVGADRVQAARLSTLRGEFDNLRMEEGEALYAYAGKIGGMAARYAGLGSTLDDTAMVKKLLDTVPDRLYAAVAGIEQFCDVETMVFEEALSRLKEFDERLRRRTQDNGGRGGDQLMFAAAQWEARQCQRGGNLDHDDGASSVASGTR

SEQ ID NO: 16354 - DNA, 1329 bp, Triticum aestivum
  misc_feature (1)..(1329): Ceres Seq. ID no. 15225131
aaaaactgcaagtccgcacctgtccggggaacccgtcccgatccgttccgcaaccagacccggccagttttcccccagcaagcatgggagtaattgcgttgacgacggggacgctgcacggggaatcggggagatattaaccgattccttttcctctggattccggccgtccttttcccgcactataaattccggggcagcggcaagaatccgcagagaccgctgtcagaaggccctgcactcaaactcagcaggtggaggggggcgatagaggcaacgggccgccggcgatgtcgtcgtcgtggaactcggtggggctggaggtgctctaccaggtcatcgggtggatcgccttcgtcgcctggtccttcagcttctacccgcaggtcgtcctcaactacaggcgcaagagtgtcgtcggtctgaacttcgattttctggtgctgaatttcacaaagcattcttcctacctcatatacaatgctgctctattcttcagccccttcatccagcaacagtatcatgacaagtttggtgataaagagatgattcctgttgctgcaaatgatgttgctttctctctacatgcagtggccttgacatcttttaccctttaccaagtttttatttatgagcgtggaaaccagaaagtctccaaagtgtgcatatcaatctctgctgttgtctggtcagctgctattgtttgcctcattgtagcttggccaaaaagtaactggctatggcttattgatgtattcaattcaatacaggttgcgatgacaacagtcaagtacatccctcaggctgtgatgaacttcaggcggaagagtacagttggttggagtattggcaatattttacttgatcttacagggggggtgctgaactttggtcagatgggtgtgcaatctattgatcagcacactttagtgaatttctatggaaatatcggcaagactcttctttcattggaaactgttttcttcgatgttctcttcataattcaacactatgtgttgtaccctgtcaaacgggatgagaatggtaaggccatcatttctgagagggtagctcctctgatcaggccctcagataagcctgaagaagatagtgtatgatatatgtacagtacacacagtgctgtctcaatttctatctgttttaacaaagataaaccacgattatttttcatgtattgtgaattaactgctgtacatatttcttcacggattactgtaaaaatttaaatattgcagaccttcagttttgtccttgacatttatactttgtgtaaagatttacaaaaaacaatatataattgatttggct

SEQ ID NO: 16355 - protein, 275 aa, Triticum aestivum
  peptide (1)..(275): Ceres Seq. ID no. 15225132
  misc_feature (10)..(76): Pfam Name: Pfam Description:  PQ loop repeat
  misc_feature (3)..(267): NCBI GI NO: 15237468 NR Description: expressed protein [Arabidopsis thaliana]
  misc_feature (3)..(267): NCBI GI NO: 21553944 NR Description: unknown [Arabidopsis thaliana]
  misc_feature (6)..(244): NCBI GI NO: 31208055 NR Description: ENSANGP00000020402 [Anopheles gambiae]
  misc_feature (1)..(275): NCBI GI NO: 23273064 NR Description: CTNS protein [Homo sapiens]
  misc_feature (1)..(244): NCBI GI NO: 4826682 NR Description: cystinosis, nephropathic; Cystinosis
  misc_feature (10)..(247): NCBI GI NO: 34872731 NR Description: similar to cystinosin [Rattus norvegicus]
  misc_feature (10)..(247): NCBI GI NO: 13752577 NR Description: cystinosis, nephropathic [Mus musculus]
  misc_feature (1)..(244): NCBI GI NO: 31208053 NR Description: ENSANGP00000020331 [Anopheles gambiae]
  misc_feature (10)..(245): NCBI GI NO: 17532373 NR Description: Cystinosin/ERS1p repeat (45.4 kD) (2I426)
  misc_feature (10)..(245): NCBI GI NO: 32565006 NR Description: Cystinosin/ERS1p repeat (42.2 kD) (2I426)
MSSSWNSVGLEVLYQVIGWIAFVAWSFSFYPQVVLNYRRKSVVGLNFDFLVLNFTKHSSYLIYNAALFFSPFIQQQYHDKFGDKEMIPVAANDVAFSLHAVALTSFTLYQVFIYERGNQKVSKVCISISAVVWSAAIVCLIVAWPKSNWLWLIDVFNSIQVAMTTVKYIPQAVMNFRRKSTVGWSIGNILLDLTGGVLNFGQMGVQSIDQHTLVNFYGNIGKTLLSLETVFFDVLFIIQHYVLYPVKRDENGKAIISERVAPLIRPSDKPEEDSV

SEQ ID NO: 16356 - protein, 190 aa, Triticum aestivum
  peptide (1)..(190): Ceres Seq. ID no. 15225133
  misc_feature (1)..(182): NCBI GI NO: 15237468 NR Description: expressed protein [Arabidopsis thaliana]
  misc_feature (1)..(182): NCBI GI NO: 21553944 NR Description: unknown [Arabidopsis thaliana]
  misc_feature (1)..(159): NCBI GI NO: 31208055 NR Description: ENSANGP00000020402 [Anopheles gambiae]
  misc_feature (1)..(190): NCBI GI NO: 23273064 NR Description: CTNS protein [Homo sapiens]
  misc_feature (1)..(159): NCBI GI NO: 4826682 NR Description: cystinosis, nephropathic; Cystinosis
  misc_feature (1)..(162): NCBI GI NO: 34872731 NR Description: similar to cystinosin [Rattus norvegicus]
  misc_feature (1)..(162): NCBI GI NO: 13752577 NR Description: cystinosis, nephropathic [Mus musculus]
  misc_feature (1)..(159): NCBI GI NO: 31208053 NR Description: ENSANGP00000020331 [Anopheles gambiae]
  misc_feature (1)..(160): NCBI GI NO: 17532373 NR Description: Cystinosin/ERS1p repeat (45.4 kD) (2I426)
  misc_feature (1)..(160): NCBI GI NO: 32565006 NR Description: Cystinosin/ERS1p repeat (42.2 kD) (2I426)
MIPVAANDVAFSLHAVALTSFTLYQVFIYERGNQKVSKVCISISAVVWSAAIVCLIVAWPKSNWLWLIDVFNSIQVAMTTVKYIPQAVMNFRRKSTVGWSIGNILLDLTGGVLNFGQMGVQSIDQHTLVNFYGNIGKTLLSLETVFFDVLFIIQHYVLYPVKRDENGKAIISERVAPLIRPSDKPEEDSV

SEQ ID NO: 16357 - DNA, 597 bp, Triticum aestivum
  misc_feature (1)..(597): Ceres Seq. ID no. 12619336
acacccatctgaagccatctttgcagaagccactagctcactactagtcgatcaattagttgtttcagagagagacgccatgaagtacttggcccagttggtggtggcgctcctggccttctcggcggtggtgttgatggtggcgccgacgggagcggaggcggcgacctgcaatgcgctgcagctgaccccgtgcgcgggggccattatggggaacgcggcgcccacggcgtcgtgctgcagcaagatgaaggagcagcagccgtgcatgtgccagtacgcgcgcgaccccaacctgaagcagtacgtcgactcccccaacggcaagaaggtcatggccgcctgcaaggtgcccgtgccctcctgctaagtccatattactgattcgcacgagagagcccagcgcgcacgcgcgcctctggtctctcgctctcccagcatgttccatgtgtgttgttgtacgctcgatcgtatgccgtgtggtgtgatcgccaatgtcgttagtcgtcgccgttaccctctgccgatcggcgatctatgtggaccgatgtgtatctgaaattctgaatatatgcaataatgatgatgtgtccagct

SEQ ID NO: 16358 - protein, 122 aa, Triticum aestivum
  peptide (1)..(122): Ceres Seq. ID no. 12619337
  misc_feature (57)..(122): Pfam Name: Pfam Description:  Protease inhibitor/seed storage/LTP family
  misc_feature (27)..(122): NCBI GI NO: 7489428 NR Description: probable lipid transfer protein - barley
  misc_feature (27)..(122): NCBI GI NO: 15229614 NR Description: lipid transfer protein, putative
  misc_feature (35)..(122): NCBI GI NO: 18402345 NR Description: lipid transfer protein, putative
  misc_feature (40)..(122): NCBI GI NO: 543565 NR Description: hypothetical 10.0K protein - Zinnia elegans
  misc_feature (36)..(122): NCBI GI NO: 498036 NR Description: lipid transfer protein
  misc_feature (40)..(122): NCBI GI NO: 543650 NR Description: P48h-10 protein precursor - Zinnia elegans (cv
  misc_feature (27)..(122): NCBI GI NO: 3183088 NR Description: Probable nonspecific lipid-transfer protein AKCS9precursor
  misc_feature (27)..(122): NCBI GI NO: 24745959 NR Description: putative lipid transfer protein
  misc_feature (27)..(122): NCBI GI NO: 7489543 NR Description: probable lipid transfer protein - rice
  misc_feature (48)..(122): NCBI GI NO: 7488524 NR Description: lipid transfer like protein - turnip (fragment)
HPSEAIFAEATSSLLVDQLVVSERDAMKYLAQLVVALLAFSAVVLMVAPTGAEAATCNALQLTPCAGAIMGNAAPTASCCSKMKEQQPCMCQYARDPNLKQYVDSPNGKKVMAACKVPVPSC

SEQ ID NO: 16359 - protein, 96 aa, Triticum aestivum
  peptide (1)..(96): Ceres Seq. ID no. 12619338
  misc_feature (31)..(96): Pfam Name: Pfam Description:  Protease inhibitor/seed storage/LTP family
  misc_feature (1)..(96): NCBI GI NO: 7489428 NR Description: probable lipid transfer protein - barley
  misc_feature (1)..(96): NCBI GI NO: 15229614 NR Description: lipid transfer protein, putative
  misc_feature (9)..(96): NCBI GI NO: 18402345 NR Description: lipid transfer protein, putative
  misc_feature (14)..(96): NCBI GI NO: 543565 NR Description: hypothetical 10.0K protein - Zinnia elegans
  misc_feature (10)..(96): NCBI GI NO: 498036 NR Description: lipid transfer protein
  misc_feature (14)..(96): NCBI GI NO: 543650 NR Description: P48h-10 protein precursor - Zinnia elegans (cv
  misc_feature (1)..(96): NCBI GI NO: 3183088 NR Description: Probable nonspecific lipid-transfer protein AKCS9precursor
  misc_feature (1)..(96): NCBI GI NO: 24745959 NR Description: putative lipid transfer protein
  misc_feature (1)..(96): NCBI GI NO: 7489543 NR Description: probable lipid transfer protein - rice
  misc_feature (22)..(96): NCBI GI NO: 7488524 NR Description: lipid transfer like protein - turnip (fragment)
MKYLAQLVVALLAFSAVVLMVAPTGAEAATCNALQLTPCAGAIMGNAAPTASCCSKMKEQQPCMCQYARDPNLKQYVDSPNGKKVMAACKVPVPSC

SEQ ID NO: 16360 - protein, 77 aa, Triticum aestivum
  peptide (1)..(77): Ceres Seq. ID no. 12619339
  misc_feature (12)..(77): Pfam Name: Pfam Description:  Protease inhibitor/seed storage/LTP family
  misc_feature (1)..(77): NCBI GI NO: 7489428 NR Description: probable lipid transfer protein - barley
  misc_feature (1)..(77): NCBI GI NO: 15229614 NR Description: lipid transfer protein, putative
  misc_feature (1)..(77): NCBI GI NO: 18402345 NR Description: lipid transfer protein, putative
  misc_feature (1)..(77): NCBI GI NO: 543565 NR Description: hypothetical 10.0K protein - Zinnia elegans
  misc_feature (1)..(77): NCBI GI NO: 498036 NR Description: lipid transfer protein
  misc_feature (1)..(77): NCBI GI NO: 543650 NR Description: P48h-10 protein precursor - Zinnia elegans (cv
  misc_feature (1)..(77): NCBI GI NO: 3183088 NR Description: Probable nonspecific lipid-transfer protein AKCS9precursor
  misc_feature (1)..(77): NCBI GI NO: 24745959 NR Description: putative lipid transfer protein
  misc_feature (1)..(77): NCBI GI NO: 7489543 NR Description: probable lipid transfer protein - rice
  misc_feature (3)..(77): NCBI GI NO: 7488524 NR Description: lipid transfer like protein - turnip (fragment)
MVAPTGAEAATCNALQLTPCAGAIMGNAAPTASCCSKMKEQQPCMCQYARDPNLKQYVDSPNGKKVMAACKVPVPSC

SEQ ID NO: 16361 - DNA, 575 bp, Triticum aestivum
  misc_feature (1)..(575): Ceres Seq. ID no. 13656565
  misc_feature (306)..(306): n is a, c, t, g, unknown, or other
  misc_feature (314)..(314): n is a, c, t, g, unknown, or other
  misc_feature (307)..(307): n is a, c, t, g, unknown, or other
  misc_feature (315)..(315): n is a, c, t, g, unknown, or other
  misc_feature (508)..(508): n is a, c, t, g, unknown, or other
  misc_feature (509)..(509): n is a, c, t, g, unknown, or other
  misc_feature (316)..(316): n is a, c, t, g, unknown, or other
  misc_feature (308)..(308): n is a, c, t, g, unknown, or other
  misc_feature (510)..(510): n is a, c, t, g, unknown, or other
agagcttgcatccaggcacatataccgagtacaccaatcagcaaccttcaagtatcctagtttaatctcgccgcgagcccgcgaagatgaagatggtgcttaaggtgccgatggtctgcaagaagtgcaagtcttgcgtccttacgattgtgtccaaggtcaaaggggtcaagtcgatggcatacgacgaggagaagagcacgctgacggtggtgggggatgtggacgtggtggtggtcgtcgacgcgctgcgcaaggggaagcacccggcgacggtggtgacggtgggcgacgagaagaaggagnnngaggannngaagaagaaggaggaagaggagaagaagaagaaggaggccgaggagaagaagaaaaaggaatgcatgcagaagcactgcctcaaggcttgctcgccgccactctactgccccaaggcttgctcgccgccacgccactgcccgccgccaccccactgcccgccgcaatcctactgctacgtcgacgactcggnnncctgcaccatcatgtgagcgagagggcagatcatcgacccggcgccgccgtatatatacagccga

SEQ ID NO: 16362 - protein, 146 aa, Triticum aestivum
  peptide (1)..(146): Ceres Seq. ID no. 13656566
  misc_feature (1)..(119): NCBI GI NO: 34911150 NR Description: B1144G04.22
  misc_feature (2)..(130): NCBI GI NO: 34902774 NR Description: unnamed protein product
  misc_feature (2)..(145): NCBI GI NO: 28927689 NR Description: hypothetical protein
  misc_feature (1)..(146): NCBI GI NO: 38606530 NR Description: OSJNBa0016O02.18
  misc_feature (2)..(136): NCBI GI NO: 34902772 NR Description: unnamed protein product
  misc_feature (2)..(107): NCBI GI NO: 18397408 NR Description: heavy-metal-associated domain-containing protein
  misc_feature (2)..(107): NCBI GI NO: 21537113 NR Description: unknown [Arabidopsis thaliana]
  misc_feature (1)..(97): NCBI GI NO: 37535864 NR Description: hypothetical protein
  misc_feature (1)..(145): NCBI GI NO: 32488374 NR Description: OSJNBa0043A12.4
  misc_feature (2)..(101): NCBI GI NO: 13543783 NR Description: Unknown (protein for MGC:7642) [Mus musculus]
  misc_feature (74)..(74): Xaa is any aa, unknown or other
  misc_feature (76)..(76): Xaa is any aa, unknown or other
  misc_feature (77)..(77): Xaa is any aa, unknown or other
  misc_feature (141)..(141): Xaa is any aa, unknown or other
  misc_feature (142)..(142): Xaa is any aa, unknown or other
MKMVLKVPMVCKKCKSCVLTIVSKVKGVKSMAYDEEKSTLTVVGDVDVVVVVDALRKGKHPATVVTVGDEKKEXEXXKKKEEEEKKKKEAEEKKKKECMQKHCLKACSPPLYCPKACSPPRHCPPPPHCPPQSYCYVDDSXXCTIM

SEQ ID NO: 16363 - protein, 144 aa, Triticum aestivum
  peptide (1)..(144): Ceres Seq. ID no. 13656567
  misc_feature (1)..(117): NCBI GI NO: 34911150 NR Description: B1144G04.22
  misc_feature (1)..(128): NCBI GI NO: 34902774 NR Description: unnamed protein product
  misc_feature (1)..(143): NCBI GI NO: 28927689 NR Description: hypothetical protein
  misc_feature (1)..(144): NCBI GI NO: 38606530 NR Description: OSJNBa0016O02.18
  misc_feature (1)..(134): NCBI GI NO: 34902772 NR Description: unnamed protein product
  misc_feature (1)..(105): NCBI GI NO: 18397408 NR Description: heavy-metal-associated domain-containing protein
  misc_feature (1)..(105): NCBI GI NO: 21537113 NR Description: unknown [Arabidopsis thaliana]
  misc_feature (1)..(95): NCBI GI NO: 37535864 NR Description: hypothetical protein
  misc_feature (1)..(143): NCBI GI NO: 32488374 NR Description: OSJNBa0043A12.4
  misc_feature (1)..(99): NCBI GI NO: 13543783 NR Description: Unknown (protein for MGC:7642) [Mus musculus]
  misc_feature (72)..(72): Xaa is any aa, unknown or other
  misc_feature (74)..(74): Xaa is any aa, unknown or other
  misc_feature (75)..(75): Xaa is any aa, unknown or other
  misc_feature (139)..(139): Xaa is any aa, unknown or other
  misc_feature (140)..(140): Xaa is any aa, unknown or other
MVLKVPMVCKKCKSCVLTIVSKVKGVKSMAYDEEKSTLTVVGDVDVVVVVDALRKGKHPATVVTVGDEKKEXEXXKKKEEEEKKKKEAEEKKKKECMQKHCLKACSPPLYCPKACSPPRHCPPPPHCPPQSYCYVDDSXXCTIM

SEQ ID NO: 16364 - protein, 138 aa, Triticum aestivum
  peptide (1)..(138): Ceres Seq. ID no. 13656568
  misc_feature (1)..(111): NCBI GI NO: 34911150 NR Description: B1144G04.22
  misc_feature (1)..(122): NCBI GI NO: 34902774 NR Description: unnamed protein product
  misc_feature (1)..(137): NCBI GI NO: 28927689 NR Description: hypothetical protein
  misc_feature (1)..(138): NCBI GI NO: 38606530 NR Description: OSJNBa0016O02.18
  misc_feature (1)..(128): NCBI GI NO: 34902772 NR Description: unnamed protein product
  misc_feature (1)..(99): NCBI GI NO: 18397408 NR Description: heavy-metal-associated domain-containing protein
  misc_feature (1)..(99): NCBI GI NO: 21537113 NR Description: unknown [Arabidopsis thaliana]
  misc_feature (1)..(89): NCBI GI NO: 37535864 NR Description: hypothetical protein
  misc_feature (1)..(137): NCBI GI NO: 32488374 NR Description: OSJNBa0043A12.4
  misc_feature (1)..(93): NCBI GI NO: 13543783 NR Description: Unknown (protein for MGC:7642) [Mus musculus]
  misc_feature (66)..(66): Xaa is any aa, unknown or other
  misc_feature (68)..(68): Xaa is any aa, unknown or other
  misc_feature (69)..(69): Xaa is any aa, unknown or other
  misc_feature (133)..(133): Xaa is any aa, unknown or other
  misc_feature (134)..(134): Xaa is any aa, unknown or other
MVCKKCKSCVLTIVSKVKGVKSMAYDEEKSTLTVVGDVDVVVVVDALRKGKHPATVVTVGDEKKEXEXXKKKEEEEKKKKEAEEKKKKECMQKHCLKACSPPLYCPKACSPPRHCPPPPHCPPQSYCYVDDSXXCTIM

SEQ ID NO: 16365 - DNA, 1044 bp, Triticum aestivum
  misc_feature (1)..(1044): Ceres Seq. ID no. 13656651
cattgtattctcataggctccccttctctgagctagccgtaataacctactatcactagccatcaaaccgtgcagacgcataggttagtatatctaagatgtcgtcacgctctacctccgtcatcgtcgccagagcagtgagcgggcaccatttgctcaagatcgatgggtactcgcaaaccaaggtggtcacccatggtagaggcatcaaatcctacacttttaaggtcggaggccacagttggcttctccagtattaccccaatggcgagccctcgggtcctgacacttacatagatgatgtcttcattcagcttgtcagtgtaagcagggacatgccggtcaagcctgacaagggcatctcagctcaaggctcgctcagtttactggacagggctgggaagccagtgccatcatataccagcaccttcaatagaagtttcacaaccactgggatcttggtctggtacacctcaaggacgaccctagagaactcaggttatctcaaggacgattgcttcactctcaggtgcgacatcaccgtcacggagctgcgtgccgagaaaacagaggattgcgatttcgcctatctcctgtggaaggagggggcagatgtggccttccatgtgggaggtgagacaaccgccgcccatcaatgggtgctggctgcccggtctccgatcttgaaggcagcagccgaagcagagctccttggcgtgccagaaagggagaagaaagacgcccacggccaccgtaaggattgacgacatggaggcaaaagtgttcaaggctttgatccactacatatatattgatgcattgcctgatgagatagacaagggctgagactgggagaagcaaggataccatgatcacggtcatggtggccatttctatttgtcaatgctgtgttggtcaatgtaagaagtactactggtgacaatcaactatgctccatactaataatatgctgatgtacattcgtttatgtttggggattgtagttgtatttgctatacaattataatgcttatgatttctttt

SEQ ID NO: 16366 - protein, 221 aa, Triticum aestivum
  peptide (1)..(221): Ceres Seq. ID no. 13656652
  misc_feature (3)..(179): NCBI GI NO: 37534480 NR Description: hypothetical protein
  misc_feature (168)..(211): NCBI GI NO: 37534480 NR Description: hypothetical protein
  misc_feature (1)..(199): NCBI GI NO: 21740758 NR Description: OSJNBa0088K19.10
  misc_feature (2)..(198): NCBI GI NO: 37534522 NR Description: putative speckle-type protein
  misc_feature (5)..(108): NCBI GI NO: 37534476 NR Description: hypothetical protein
  misc_feature (118)..(198): NCBI GI NO: 37534476 NR Description: hypothetical protein
  misc_feature (3)..(198): NCBI GI NO: 37534574 NR Description: putative speckle-type protein
  misc_feature (3)..(198): NCBI GI NO: 37534644 NR Description: unknown protein
  misc_feature (3)..(158): NCBI GI NO: 37534556 NR Description: putative speckle-type protein
  misc_feature (168)..(198): NCBI GI NO: 37534556 NR Description: putative speckle-type protein
MSSRSTSVIVARAVSGHHLLKIDGYSQTKVVTHGRGIKSYTFKVGGHSWLLQYYPNGEPSGPDTYIDDVFIQLVSVSRDMPVKPDKGISAQGSLSLLDRAGKPVPSYTSTFNRSFTTTGILVWYTSRTTLENSGYLKDDCFTLRCDITVTELRAEKTEDCDFAYLLWKEGADVAFHVGGETTAAHQWVLAARSPILKAAAEAELLGVPEREKKDAHGHRKD

SEQ ID NO: 16367 - protein, 142 aa, Triticum aestivum
  peptide (1)..(142): Ceres Seq. ID no. 13656653
  misc_feature (1)..(100): NCBI GI NO: 37534480 NR Description: hypothetical protein
  misc_feature (89)..(132): NCBI GI NO: 37534480 NR Description: hypothetical protein
  misc_feature (1)..(120): NCBI GI NO: 21740758 NR Description: OSJNBa0088K19.10
  misc_feature (1)..(119): NCBI GI NO: 37534522 NR Description: putative speckle-type protein
  misc_feature (1)..(29): NCBI GI NO: 37534476 NR Description: hypothetical protein
  misc_feature (39)..(119): NCBI GI NO: 37534476 NR Description: hypothetical protein
  misc_feature (1)..(119): NCBI GI NO: 37534574 NR Description: putative speckle-type protein
  misc_feature (1)..(119): NCBI GI NO: 37534644 NR Description: unknown protein
  misc_feature (1)..(79): NCBI GI NO: 37534556 NR Description: putative speckle-type protein
  misc_feature (89)..(119): NCBI GI NO: 37534556 NR Description: putative speckle-type protein
MPVKPDKGISAQGSLSLLDRAGKPVPSYTSTFNRSFTTTGILVWYTSRTTLENSGYLKDDCFTLRCDITVTELRAEKTEDCDFAYLLWKEGADVAFHVGGETTAAHQWVLAARSPILKAAAEAELLGVPEREKKDAHGHRKD

SEQ ID NO: 16368 - DNA, 719 bp, Triticum aestivum
  misc_feature (1)..(719): Ceres Seq. ID no. 13657174
agttcttgtacccttccttagcccgcaagcagagtatgcattccttccttgtccctcgccgacgcatccaccgccaagcaacctcgctacatatgcgccgttccttcgtctacccccattgttctaccaaactcgtcggccggtgagcccatacatacacacgcacaggtcggatcagaggtcggagctcgtgcacagtttgatagctgcagcctggaggctggtggcgagaggatcatcggtagccatgaacgggggcatcgggggcacggcggagggggcgcctcgcccgagcacggactggggcccgatcatcgtggcggtgatcctgttcgtggtgctgtcgccggggctgctgttccagctgccggccaggacccgggtggtggagctcggcaacatggccaccagcgccatcgccatcctcgtccacgccgtcatcttcttctgcatcctcaccctcgtcgtcgtggccatcggcgtccacgtgtacgccgcctagctatctcatatagtactccagatcaagatgggttttgtctttcttcagtgctgccctgcccctgtttgcctgtttgatttggccggctgtaaactgcggaaacactgctggctgaaaacagtacgtatataattgtgttcttggatgaggaattagttgcttgtaattacttctctgtgtcgataattgatgaaatgcctttgaaattgattccggc

SEQ ID NO: 16369 - protein, 166 aa, Triticum aestivum
  peptide (1)..(166): Ceres Seq. ID no. 13657175
  misc_feature (95)..(166): NCBI GI NO: 20161910 NR Description: P0592G05.7
  misc_feature (98)..(165): NCBI GI NO: 34394315 NR Description: hypothetical protein
  misc_feature (98)..(164): NCBI GI NO: 15237529 NR Description: expressed protein [Arabidopsis thaliana]
  misc_feature (100)..(164): NCBI GI NO: 1532168 NR Description: localized according to blastn similarity to ESTsequences
  misc_feature (100)..(164): NCBI GI NO: 18395991 NR Description: hypothetical protein [Arabidopsis thaliana]
  misc_feature (100)..(164): NCBI GI NO: 33327288 NR Description: hypothetical protein [Phaseolus vulgaris]
  misc_feature (100)..(165): NCBI GI NO: 15242790 NR Description: expressed protein [Arabidopsis thaliana]
  misc_feature (100)..(164): NCBI GI NO: 15228422 NR Description: hypothetical protein [Arabidopsis thaliana]
  misc_feature (100)..(165): NCBI GI NO: 32487809 NR Description: OSJNBa0053B21.1
  misc_feature (99)..(164): NCBI GI NO: 21592550 NR Description: unknown [Arabidopsis thaliana]
VLVPFLSPQAEYAFLPCPSPTHPPPSNLATYAPFLRLPPLFYQTRRPVSPYIHTHRSDQRSELVHSLIAAAWRLVARGSSVAMNGGIGGTAEGAPRPSTDWGPIIVAVILFVVLSPGLLFQLPARTRVVELGNMATSAIAILVHAVIFFCILTLVVVAIGVHVYAA

SEQ ID NO: 16370 - protein, 84 aa, Triticum aestivum
  peptide (1)..(84): Ceres Seq. ID no. 13657176
  misc_feature (13)..(84): NCBI GI NO: 20161910 NR Description: P0592G05.7
  misc_feature (16)..(83): NCBI GI NO: 34394315 NR Description: hypothetical protein
  misc_feature (16)..(82): NCBI GI NO: 15237529 NR Description: expressed protein [Arabidopsis thaliana]
  misc_feature (18)..(82): NCBI GI NO: 1532168 NR Description: localized according to blastn similarity to ESTsequences
  misc_feature (18)..(82): NCBI GI NO: 18395991 NR Description: hypothetical protein [Arabidopsis thaliana]
  misc_feature (18)..(82): NCBI GI NO: 33327288 NR Description: hypothetical protein [Phaseolus vulgaris]
  misc_feature (18)..(83): NCBI GI NO: 15242790 NR Description: expressed protein [Arabidopsis thaliana]
  misc_feature (18)..(82): NCBI GI NO: 15228422 NR Description: hypothetical protein [Arabidopsis thaliana]
  misc_feature (18)..(83): NCBI GI NO: 32487809 NR Description: OSJNBa0053B21.1
  misc_feature (17)..(82): NCBI GI NO: 21592550 NR Description: unknown [Arabidopsis thaliana]
MNGGIGGTAEGAPRPSTDWGPIIVAVILFVVLSPGLLFQLPARTRVVELGNMATSAIAILVHAVIFFCILTLVVVAIGVHVYAA

SEQ ID NO: 16371 - DNA, 678 bp, Triticum aestivum
  misc_feature (1)..(678): Ceres Seq. ID no. 12619649
gtactaccgcaagtgcaaagtagctcacacatccatcggcgccagactactgactcagatcctccaccgaccaccagacccagaccgatggcttcttcttccgtgctgctcggaggaggcgcgggcgcgggcgccgccgccttcaccggcgccgctgccggcaaggctcttcccaggccgtgtttcctcgccgctcgtccgcacactgtcagcggtggccgcctctgcctgcaaacccctcctagagcgactcctgctaacgacgccgtcgagaccgtgaagggggcggccggggaagccggagacaaggtctcggaaggggcggacagcgtgacgaaggcggccagcgacgcggcgggcaaggtacaggaggcggtagagggcgccgtggagggagccaaggacctgggcgagaaggcgaagcaggcgacggaggaggcgtgggacgccaccaaagacgccgcacagggcgtcgccgacgacgtcaccgccgcggttgaggatgtgagcaaatgagctcaacatttgcgtatcagattgaatatttaacatgcatgatgtgcacgcgagtgtcttttgtgggtcacgttattaatgatgtatgctttgtataagagctacaacgttggtcaaaagttgtgctaaaagagcatctacaatcgcacacccgtacccgtc

SEQ ID NO: 16372 - protein, 171 aa, Triticum aestivum
  peptide (1)..(171): Ceres Seq. ID no. 12619650
  misc_feature (98)..(167): Pfam Name: Pfam Description:  Late embryogenesis abundant protein
  misc_feature (30)..(171): NCBI GI NO: 20067227 NR Description: WCOR14c [Triticum aestivum]
  misc_feature (30)..(171): NCBI GI NO: 6561859 NR Description: cold-responsive protein COR14a [Triticum aestivum]
  misc_feature (30)..(146): NCBI GI NO: 6561861 NR Description: cold-responsive protein COR14b [Triticum aestivum]
  misc_feature (30)..(171): NCBI GI NO: 20067231 NR Description: REP13 [Secale cereale]
  misc_feature (30)..(171): NCBI GI NO: 24528340 NR Description: cor14b [Hordeum vulgare]
  misc_feature (28)..(167): NCBI GI NO: 481813 NR Description: leaf-specific protein Wcs19 - wheat
  misc_feature (30)..(167): NCBI GI NO: 19352333 NR Description: cold acclimation protein WCS19 [Triticum aestivum]
  misc_feature (30)..(167): NCBI GI NO: 28273091 NR Description: chloroplast-targeted COR protein
  misc_feature (9)..(156): NCBI GI NO: 419793 NR Description: cold-regulated protein 1 - barley (fragment)
  misc_feature (88)..(171): NCBI GI NO: 7484462 NR Description: late embryonic abundant protein - white spruce
VLPQVQSSSHIHRRQTTDSDPPPTTRPRPMASSSVLLGGGAGAGAAAFTGAAAGKALPRPCFLAARPHTVSGGRLCLQTPPRATPANDAVETVKGAAGEAGDKVSEGADSVTKAASDAAGKVQEAVEGAVEGAKDLGEKAKQATEEAWDATKDAAQGVADDVTAAVEDVSK

SEQ ID NO: 16373 - protein, 142 aa, Triticum aestivum
  peptide (1)..(142): Ceres Seq. ID no. 12619651
  misc_feature (69)..(138): Pfam Name: Pfam Description:  Late embryogenesis abundant protein
  misc_feature (1)..(142): NCBI GI NO: 20067227 NR Description: WCOR14c [Triticum aestivum]
  misc_feature (1)..(142): NCBI GI NO: 6561859 NR Description: cold-responsive protein COR14a [Triticum aestivum]
  misc_feature (1)..(117): NCBI GI NO: 6561861 NR Description: cold-responsive protein COR14b [Triticum aestivum]
  misc_feature (1)..(142): NCBI GI NO: 20067231 NR Description: REP13 [Secale cereale]
  misc_feature (1)..(142): NCBI GI NO: 24528340 NR Description: cor14b [Hordeum vulgare]
  misc_feature (1)..(138): NCBI GI NO: 481813 NR Description: leaf-specific protein Wcs19 - wheat
  misc_feature (1)..(138): NCBI GI NO: 19352333 NR Description: cold acclimation protein WCS19 [Triticum aestivum]
  misc_feature (1)..(138): NCBI GI NO: 28273091 NR Description: chloroplast-targeted COR protein
  misc_feature (1)..(127): NCBI GI NO: 419793 NR Description: cold-regulated protein 1 - barley (fragment)
  misc_feature (59)..(142): NCBI GI NO: 7484462 NR Description: late embryonic abundant protein - white spruce
MASSSVLLGGGAGAGAAAFTGAAAGKALPRPCFLAARPHTVSGGRLCLQTPPRATPANDAVETVKGAAGEAGDKVSEGADSVTKAASDAAGKVQEAVEGAVEGAKDLGEKAKQATEEAWDATKDAAQGVADDVTAAVEDVSK

SEQ ID NO: 16374 - protein, 92 aa, Triticum aestivum
  peptide (1)..(92): Ceres Seq. ID no. 12619652
  misc_feature (5)..(92): NCBI GI NO: 6226576 NR Description: COLD-REGULATED PROTEIN 1
  misc_feature (5)..(92): NCBI GI NO: 419793 NR Description: cold-regulated protein 1 - barley (fragment)
YYRKCKVAHTSIGARLLTQILHRPPDPDRWLLLPCCSEEARARAPPPSPAPLPARLFPGRVSSPLVRTLSAVAASACKPLLERLLLTTPSRP

SEQ ID NO: 16375 - DNA, 1067 bp, Triticum aestivum
  misc_feature (1)..(1067): Ceres Seq. ID no. 13662959
aaaacccccaccgcacgccccacccgcgtcgcaggcatgcctctctcgctcggcgccgaccacctcgccgcgcccggcgcgcgcgctccgcctgcgcgggtgggcacgggcatgggcatggacacgtccctctcgctgggcggtgccgccgcctacctcccgctcaacgagaacgactccctcgacatgctcctcttcgacgtcctccgcgaggcctccgccgtggccgccgcctcgccctcctcgtcctcctctcccccgacgaagacggcgacggccattgccgccgctggcgccgacgcgatcgagagcggcggggcatgcgcggccgggagggccgcggagcgcccgcactaccgcggggtgaggcggcggccgtggggcaagtacgcggcggagatccgggacccgtcgcggcccggcacgcgcctgtggctcggcaccttcggcacggccgaggaggcggccgtcgcgtacgaccgcgccgcgttccgcctgcgcggcgccaaggcgctgctcaacttcccgccggccgtgggggcgcacgaggcgcgccgcggcggcgccaatgaggcgaggtgaatgctacgtgcgttcgttctctcgccgatcgttcctctctctcttagctgcgtgttgttagcttcttagtttaggcatcgaaacattgaattcccattctgtaaccgttcattcatgcgtggtgtggtctgtggtggaccaatttgcatttcgtgggtatcgtctctagcttcgggcgaaggtgctattttggtgatctctctacggttatcaacagatatcaatcatcaattgtacagtagtactactaccagtctcgtctgaaattttacgaaatctggagaaatgtgtgaaccggtaatgagaagacagattccctcgacaaaccttgtattcatctacgattcctcggctcctttgatttaaaggaattttataggatttctgaaggactgagatccttagaattttttttttcctatgtttgttctttgatttataggattggattctataggaatttttcctatggattcttttgtgct

SEQ ID NO: 16376 - protein, 193 aa, Triticum aestivum
  peptide (1)..(193): Ceres Seq. ID no. 13662960
  misc_feature (118)..(179): Pfam Name: Pfam Description:  AP2 domain
  misc_feature (17)..(193): NCBI GI NO: 34909594 NR Description: P0046E05.31
  misc_feature (53)..(183): NCBI GI NO: 7528276 NR Description: AP2-related transcription factor
  misc_feature (53)..(183): NCBI GI NO: 21264420 NR Description: Ethylene responsive element binding factor 1
  misc_feature (53)..(183): NCBI GI NO: 25350258 NR Description: ethylene responsive element binding factor 1
  misc_feature (53)..(183): NCBI GI NO: 25350257 NR Description: EREBP-2 protein [imported] - Arabidopsis thaliana
  misc_feature (53)..(183): NCBI GI NO: 7489077 NR Description: transcription factor Pti4 - tomato (fragment)
  misc_feature (53)..(183): NCBI GI NO: 7489123 NR Description: ethylene-responsive transcription factor ERF1 -common tobacco
  misc_feature (53)..(183): NCBI GI NO: 28274828 NR Description: ethylene response factor 1
  misc_feature (79)..(192): NCBI GI NO: 38346167 NR Description: OSJNBa0079A21.14
  misc_feature (53)..(183): NCBI GI NO: 15238041 NR Description: ethylene responsive element binding factor 2
KTPTARPTRVAGMPLSLGADHLAAPGARAPPARVGTGMGMDTSLSLGGAAAYLPLNENDSLDMLLFDVLREASAVAAASPSSSSSPPTKTATAIAAAGADAIESGGACAAGRAAERPHYRGVRRRPWGKYAAEIRDPSRPGTRLWLGTFGTAEEAAVAYDRAAFRLRGAKALLNFPPAVGAHEARRGGANEAR

SEQ ID NO: 16377 - protein, 189 aa, Triticum aestivum
  peptide (1)..(189): Ceres Seq. ID no. 13662961
NPHRTPHPRRRHASLARRRPPRRARRARSACAGGHGHGHGHVPLAGRCRRLPPAQRERLPRHAPLRRPPRGLRRGRRLALLVLLSPDEDGDGHCRRWRRRDRERRGMRGREGRGAPALPRGEAAAVGQVRGGDPGPVAARHAPVARHLRHGRGGGRRVRPRRVPPARRQGAAQLPAGRGGARGAPRRRQ

SEQ ID NO: 16378 - protein, 181 aa, Triticum aestivum
  peptide (1)..(181): Ceres Seq. ID no. 13662962
  misc_feature (106)..(167): Pfam Name: Pfam Description:  AP2 domain
  misc_feature (5)..(181): NCBI GI NO: 34909594 NR Description: P0046E05.31
  misc_feature (41)..(171): NCBI GI NO: 7528276 NR Description: AP2-related transcription factor
  misc_feature (41)..(171): NCBI GI NO: 21264420 NR Description: Ethylene responsive element binding factor 1
  misc_feature (41)..(171): NCBI GI NO: 25350257 NR Description: EREBP-2 protein [imported] - Arabidopsis thaliana
  misc_feature (41)..(171): NCBI GI NO: 25350258 NR Description: ethylene responsive element binding factor 1
  misc_feature (41)..(171): NCBI GI NO: 7489077 NR Description: transcription factor Pti4 - tomato (fragment)
  misc_feature (41)..(171): NCBI GI NO: 7489123 NR Description: ethylene-responsive transcription factor ERF1 -common tobacco
  misc_feature (41)..(171): NCBI GI NO: 28274828 NR Description: ethylene response factor 1
  misc_feature (67)..(180): NCBI GI NO: 38346167 NR Description: OSJNBa0079A21.14
  misc_feature (41)..(171): NCBI GI NO: 15238041 NR Description: ethylene responsive element binding factor 2
MPLSLGADHLAAPGARAPPARVGTGMGMDTSLSLGGAAAYLPLNENDSLDMLLFDVLREASAVAAASPSSSSSPPTKTATAIAAAGADAIESGGACAAGRAAERPHYRGVRRRPWGKYAAEIRDPSRPGTRLWLGTFGTAEEAAVAYDRAAFRLRGAKALLNFPPAVGAHEARRGGANEAR

SEQ ID NO: 16379 - DNA, 845 bp, Triticum aestivum
  misc_feature (1)..(845): Ceres Seq. ID no. 12620302
ggctcactgctaagaacacactcccgccccacccccaccgacagcagtaatgaaggccctcgccggcgacagcaacgcctccgcgccgcttctgcaggaggccaagatcagcatccccgcctcctccacgggcggggccgcggaggcggcgctcctcgggaagggccggtacaaggtgtgggccctcgccgccatcgcgctcctcgcgctctggtccatgtccgccgcctccgtctccctccgctggtcggccggcgacctggcagccgttatttcaggggacctcgacgcgccactccgcgacgatctagattccctcgagatggaggaaagggagaaattagttggtcggatgtgggacatgtacacacgcaccagcgacgaggtacgccttccacggttctggcaagaagcattcgaggctgcatacgaggagcttgctggtgatgatatgcaggtccgcgacacggccatctttgagattgctcgaatgtcagcccacagacttgagcttgagcagcctgtgaatgcgaacgaggaagagggcaaggtaagcatcaggaataatgatcatggcagagcgaagcagtagcttcaaaactgaagatctataacggttgcggacaacaaatatcagcagctgaacttgaagtttgatgtaaactgaaattttctgtatgggagggcaagcaaaagcttaccatgatgcaaagttttaacttccccgcagtaaagcgttgtattatacgtgtattattcataggtcctgattagaaatgtcatgccatttgctatatgtagtaacgtggaatagaggaagtctagcaagatcatgctgtttttgt

SEQ ID NO: 16380 - protein, 180 aa, Triticum aestivum
  peptide (1)..(180): Ceres Seq. ID no. 12620303
  misc_feature (1)..(179): NCBI GI NO: 28209490 NR Description: unknown protein
  misc_feature (34)..(158): NCBI GI NO: 9858772 NR Description: BAC19.4 [Lycopersicon esculentum]
  misc_feature (21)..(180): NCBI GI NO: 18424975 NR Description: putative protein; protein id: At5g65650
  misc_feature (24)..(158): NCBI GI NO: 15234477 NR Description: hypothetical protein; protein id: At4g36660.1
  misc_feature (41)..(161): NCBI GI NO: 15222008 NR Description: hypothetical protein; protein id: At1g19380.1
MKALAGDSNASAPLLQEAKISIPASSTGGAAEAALLGKGRYKVWALAAIALLALWSMSAASVSLRWSAGDLAAVISGDLDAPLRDDLDSLEMEEREKLVGRMWDMYTRTSDEVRLPRFWQEAFEAAYEELAGDDMQVRDTAIFEIARMSAHRLELEQPVNANEEEGKVSIRNNDHGRAKQ

SEQ ID NO: 16381 - protein, 148 aa, Triticum aestivum
  peptide (1)..(148): Ceres Seq. ID no. 12620304
GSLLRTHSRPTPTDSSNEGPRRRQQRLRAASAGGQDQHPRLLHGRGRGGGAPREGPVQGVGPRRHRAPRALVHVRRLRLPPLVGRRPGSRYFRGPRRATPRRSRFPRDGGKGEISWSDVGHVHTHQRRGTPSTVLARSIRGCIRGACW

SEQ ID NO: 16382 - protein, 124 aa, Triticum aestivum
  peptide (1)..(124): Ceres Seq. ID no. 12620305
  misc_feature (1)..(123): NCBI GI NO: 28209490 NR Description: unknown protein
  misc_feature (1)..(102): NCBI GI NO: 9858772 NR Description: BAC19.4 [Lycopersicon esculentum]
  misc_feature (1)..(124): NCBI GI NO: 18424975 NR Description: putative protein; protein id: At5g65650
  misc_feature (1)..(102): NCBI GI NO: 15234477 NR Description: hypothetical protein; protein id: At4g36660.1
  misc_feature (1)..(105): NCBI GI NO: 15222008 NR Description: hypothetical protein; protein id: At1g19380.1
MSAASVSLRWSAGDLAAVISGDLDAPLRDDLDSLEMEEREKLVGRMWDMYTRTSDEVRLPRFWQEAFEAAYEELAGDDMQVRDTAIFEIARMSAHRLELEQPVNANEEEGKVSIRNNDHGRAKQ

SEQ ID NO: 16383 - DNA, 1062 bp, Triticum aestivum
  misc_feature (1)..(1062): Ceres Seq. ID no. 13657064
ccattacctagaacatcctaatcgaaaaatgttccatctcatctcgcccctccctttccaccatctccagtaagtttgggcctcgctttccttcccgacccgacccagctcgcaatcgcaagccacacgcatcgggtttccctcagcgcagcgatctcacctccctgacccgctccctcctcccgcgtcacgtgtcctcacagctcaccccgccggcggccggccgcagcggcgcgcccccgacccccgacccccgaccaggcggagcgcggccagggcaggcgagatggtcttcgtctggctcgccgccttcttcctcgtcgtcacgctcatcgtgctcgtcatcttccagttgatgtgcttggcagatctggagttcgattatatcaacccgtttgattcatcctctcgaatcaataaagtggttatgccagaatttatagtgcaagcacttctaagtgcattattcctcttatctgggcactgggcgatgtttctgctttctgccccaatggtgtactataattatacattgtacgagcggcggcagcatcttgtagatgtgacagagatatttaaccatctttcacgggagaagaagcgccgtctttttaagatagctgctcttatcgtcctcctattcttgtccttgttctggatgatttggagtgtactggaggagcacgagtagaatgagagaaaacactgtgattgtgatagctcaacctggttctgcagccgttagttaggtattacgacgtggtcctcgtggcctgctgaacacctactccgatgccgttattgttcatatgaaagcccttttggataaatttagggtgtcatggagaaacgatgcaagcagaagggcgaagactacgtgtccgaggtgctgtttgttgctcgcgcctagtgtgaaatctcctgctgttgtagcgtgtaacataacatgtaagttaggagccactccctcctgtttatttgatcgtgcatccgttcatatggggcaaagtaactgctgcgcccaactgtgcatggttttattatgaccgacattctgtgttt

SEQ ID NO: 16384 - protein, 134 aa, Triticum aestivum
  peptide (1)..(134): Ceres Seq. ID no. 13657065
  misc_feature (2)..(124): Pfam Name: Pfam Description:  Cornichon protein
  misc_feature (2)..(134): NCBI GI NO: 30682747 NR Description: expressed protein [Arabidopsis thaliana]
  misc_feature (1)..(134): NCBI GI NO: 15221614 NR Description: expressed protein [Arabidopsis thaliana]
  misc_feature (1)..(124): NCBI GI NO: 25336823 NR Description: hypothetical protein F16P17.3
  misc_feature (20)..(124): NCBI GI NO: 18391380 NR Description: hypothetical protein [Arabidopsis thaliana]
  misc_feature (2)..(124): NCBI GI NO: 8778625 NR Description: F5O11.11 [Arabidopsis thaliana]
  misc_feature (20)..(114): NCBI GI NO: 8778623 NR Description: F5O11.7 [Arabidopsis thaliana]
  misc_feature (2)..(130): NCBI GI NO: 15230426 NR Description: expressed protein [Arabidopsis thaliana]
  misc_feature (2)..(123): NCBI GI NO: 9294117 NR Description: gene_id:T23B7
  misc_feature (22)..(130): NCBI GI NO: 15234412 NR Description: hypothetical protein [Arabidopsis thaliana]
  misc_feature (5)..(132): NCBI GI NO: 6321384 NR Description: ER-derived vesicles; Erv14p
MVFVWLAAFFLVVTLIVLVIFQLMCLADLEFDYINPFDSSSRINKVVMPEFIVQALLSALFLLSGHWAMFLLSAPMVYYNYTLYERRQHLVDVTEIFNHLSREKKRRLFKIAALIVLLFLSLFWMIWSVLEEHE

SEQ ID NO: 16385 - protein, 111 aa, Triticum aestivum
  peptide (1)..(111): Ceres Seq. ID no. 13657066
  misc_feature (1)..(101): Pfam Name: Pfam Description:  Cornichon protein
  misc_feature (1)..(111): NCBI GI NO: 30682747 NR Description: expressed protein [Arabidopsis thaliana]
  misc_feature (1)..(111): NCBI GI NO: 15221614 NR Description: expressed protein [Arabidopsis thaliana]
  misc_feature (1)..(101): NCBI GI NO: 25336823 NR Description: hypothetical protein F16P17.3
  misc_feature (1)..(101): NCBI GI NO: 18391380 NR Description: hypothetical protein [Arabidopsis thaliana]
  misc_feature (1)..(101): NCBI GI NO: 8778625 NR Description: F5O11.11 [Arabidopsis thaliana]
  misc_feature (1)..(91): NCBI GI NO: 8778623 NR Description: F5O11.7 [Arabidopsis thaliana]
  misc_feature (1)..(107): NCBI GI NO: 15230426 NR Description: expressed protein [Arabidopsis thaliana]
  misc_feature (1)..(100): NCBI GI NO: 9294117 NR Description: gene_id:T23B7
  misc_feature (1)..(107): NCBI GI NO: 15234412 NR Description: hypothetical protein [Arabidopsis thaliana]
  misc_feature (1)..(109): NCBI GI NO: 6321384 NR Description: ER-derived vesicles; Erv14p
MCLADLEFDYINPFDSSSRINKVVMPEFIVQALLSALFLLSGHWAMFLLSAPMVYYNYTLYERRQHLVDVTEIFNHLSREKKRRLFKIAALIVLLFLSLFWMIWSVLEEHE

SEQ ID NO: 16386 - protein, 87 aa, Triticum aestivum
  peptide (1)..(87): Ceres Seq. ID no. 13657067
  misc_feature (1)..(77): Pfam Name: Pfam Description:  Cornichon protein
  misc_feature (1)..(87): NCBI GI NO: 30682747 NR Description: expressed protein [Arabidopsis thaliana]
  misc_feature (1)..(87): NCBI GI NO: 15221614 NR Description: expressed protein [Arabidopsis thaliana]
  misc_feature (1)..(77): NCBI GI NO: 25336823 NR Description: hypothetical protein F16P17.3
  misc_feature (1)..(77): NCBI GI NO: 18391380 NR Description: hypothetical protein [Arabidopsis thaliana]
  misc_feature (1)..(77): NCBI GI NO: 8778625 NR Description: F5O11.11 [Arabidopsis thaliana]
  misc_feature (1)..(67): NCBI GI NO: 8778623 NR Description: F5O11.7 [Arabidopsis thaliana]
  misc_feature (1)..(83): NCBI GI NO: 15230426 NR Description: expressed protein [Arabidopsis thaliana]
  misc_feature (1)..(76): NCBI GI NO: 9294117 NR Description: gene_id:T23B7
  misc_feature (1)..(83): NCBI GI NO: 15234412 NR Description: hypothetical protein [Arabidopsis thaliana]
  misc_feature (1)..(85): NCBI GI NO: 6321384 NR Description: ER-derived vesicles; Erv14p
MPEFIVQALLSALFLLSGHWAMFLLSAPMVYYNYTLYERRQHLVDVTEIFNHLSREKKRRLFKIAALIVLLFLSLFWMIWSVLEEHE

SEQ ID NO: 16387 - DNA, 1735 bp, Triticum aestivum
  misc_feature (1)..(1735): Ceres Seq. ID no. 14313220
ccggtagttaagcgccccgcgccaccaccactactactagtagcagcggcactcccgctgccatccccactgcccccccgaacccccctccgcgctccgcacattgggtgggaggagctgctccagctcggttgtcggtgccgggtggatcgccctgccgcgccatggacggcgacgcggacgccctgaagtccgggaggcacggggccggggacgtgtgccagatctgcgccgacgggctgggcaccacggtggacggcgaggtcttcaccgcctgcgacgtctgccgcttcccggtctgccgcccctgctacgagcacgagcgcaaggagggcacccaggcctgcctccagtgcaagaccaagtacaagcgccacagagggagccctccgatccgcggggaggaaggcgatgacaccgatgccgatgatggcagtgacttcaactaccctgcatctggcactgaggaccagaagcagaagattgctgataggatgcgcagctggcgcatgaacaccgggggtagtggcaatgttggccaccccaagtatgacagtggcgagatcggcctctccaagtatgacagtggagagatccctaggggatacgtcccttcagtcaccaacagccagatgtcaggagaaatccctggagcttcccctgatcatcatatgatgtcccctacagggaacatcagcagacgtgctccctttccctatgtgaatcattcaccaaatccgtcaagggagttctctggcagtattgggaatgttgcctggaaagagagagtcgatggctggaaaatgaagcaggacaagggtgcaattcccatgactaatgggacaagtattgctccctctgaaggtcgggcagctactgacattgatgcatctactgaatacaacatggaagacgctttactgaatgatgaaactcgccagcctctatctagaaaagtccccattgcttcatccaaaataaatccctacagaatggtcattgttctgcggttggttgttctaagcatcttcctgcactaccgtctcacaaatcctgtgcgtaatgcatacccactgtggcttttatctgttatatgtgagatttggtttgctttatcctggatactggatcagttcccgaagtggtttccaatcaaccgggagacctaccttgatagactggctttaaggtatgaccgagaaggtgaaccgtctcagttggctgctgttgacatatttgtcagtacagtcgaccccttgaaggagccacctatcgtcactgccaacactgtgctatccattcttgctgttgattatcccgtggacaaggtctcttgctatgtatctgatgacggagcttcaatgctgacttttgatgcattggctgagacttcagagtttgctaggaaatgggtaccatttgtgaagaagtatgacattgaacccagagctcctgagttttacttttgccagaaaattgattacctgaaagacaaagtccagccttcatttgttaaagaccgccggaccagagaaggagagcagcggaaggtggaggatgggattgtggagaaggccatcttggtgaaagatttcgcgtgagcttttcttctagcttgatgagaagacatctccctagtatttgttgtttctttgacttgcaatgtataccttgattttaagatcagatgacattatgctaatctctttggtccgggggcaagtttcttggcctc

SEQ ID NO: 16388 - protein, 478 aa, Triticum aestivum
  peptide (1)..(478): Ceres Seq. ID no. 14313221
  misc_feature (260)..(471): Pfam Name: Pfam Description:  Cellulose synthase
  misc_feature (1)..(476): NCBI GI NO: 40363755 NR Description: putative cellulose synthase [Triticum aestivum]
  misc_feature (1)..(476): NCBI GI NO: 39726025 NR Description: putative cellulose synthase catalytic subunit
  misc_feature (1)..(471): NCBI GI NO: 28411807 NR Description: cellulose synthase-4
  misc_feature (1)..(471): NCBI GI NO: 9622890 NR Description: cellulose synthase-9 [Zea mays]
  misc_feature (1)..(471): NCBI GI NO: 9622880 NR Description: cellulose synthase-4 [Zea mays]
  misc_feature (1)..(471): NCBI GI NO: 9622882 NR Description: cellulose synthase-5 [Zea mays]
  misc_feature (6)..(471): NCBI GI NO: 30103013 NR Description: putative cellulose synthase catalytic subunit
  misc_feature (16)..(471): NCBI GI NO: 39726027 NR Description: putative cellulose synthase catalytic subunit
  misc_feature (2)..(471): NCBI GI NO: 39933010 NR Description: cellulose synthase [Populus tremuloides]
  misc_feature (122)..(471): NCBI GI NO: 39726035 NR Description: putative cellulose synthase catalytic subunit
MDGDADALKSGRHGAGDVCQICADGLGTTVDGEVFTACDVCRFPVCRPCYEHERKEGTQACLQCKTKYKRHRGSPPIRGEEGDDTDADDGSDFNYPASGTEDQKQKIADRMRSWRMNTGGSGNVGHPKYDSGEIGLSKYDSGEIPRGYVPSVTNSQMSGEIPGASPDHHMMSPTGNISRRAPFPYVNHSPNPSREFSGSIGNVAWKERVDGWKMKQDKGAIPMTNGTSIAPSEGRAATDIDASTEYNMEDALLNDETRQPLSRKVPIASSKINPYRMVIVLRLVVLSIFLHYRLTNPVRNAYPLWLLSVICEIWFALSWILDQFPKWFPINRETYLDRLALRYDREGEPSQLAAVDIFVSTVDPLKEPPIVTANTVLSILAVDYPVDKVSCYVSDDGASMLTFDALAETSEFARKWVPFVKKYDIEPRAPEFYFCQKIDYLKDKVQPSFVKDRRTREGEQRKVEDGIVEKAILVKDFA

SEQ ID NO: 16389 - protein, 368 aa, Triticum aestivum
  peptide (1)..(368): Ceres Seq. ID no. 14313222
  misc_feature (150)..(361): Pfam Name: Pfam Description:  Cellulose synthase
  misc_feature (1)..(366): NCBI GI NO: 40363755 NR Description: putative cellulose synthase [Triticum aestivum]
  misc_feature (1)..(366): NCBI GI NO: 39726025 NR Description: putative cellulose synthase catalytic subunit
  misc_feature (1)..(361): NCBI GI NO: 28411807 NR Description: cellulose synthase-4
  misc_feature (1)..(361): NCBI GI NO: 9622890 NR Description: cellulose synthase-9 [Zea mays]
  misc_feature (1)..(361): NCBI GI NO: 9622880 NR Description: cellulose synthase-4 [Zea mays]
  misc_feature (1)..(361): NCBI GI NO: 9622882 NR Description: cellulose synthase-5 [Zea mays]
  misc_feature (1)..(361): NCBI GI NO: 30103013 NR Description: putative cellulose synthase catalytic subunit
  misc_feature (1)..(361): NCBI GI NO: 39726027 NR Description: putative cellulose synthase catalytic subunit
  misc_feature (1)..(361): NCBI GI NO: 39933010 NR Description: cellulose synthase [Populus tremuloides]
  misc_feature (12)..(361): NCBI GI NO: 39726035 NR Description: putative cellulose synthase catalytic subunit
MRSWRMNTGGSGNVGHPKYDSGEIGLSKYDSGEIPRGYVPSVTNSQMSGEIPGASPDHHMMSPTGNISRRAPFPYVNHSPNPSREFSGSIGNVAWKERVDGWKMKQDKGAIPMTNGTSIAPSEGRAATDIDASTEYNMEDALLNDETRQPLSRKVPIASSKINPYRMVIVLRLVVLSIFLHYRLTNPVRNAYPLWLLSVICEIWFALSWILDQFPKWFPINRETYLDRLALRYDREGEPSQLAAVDIFVSTVDPLKEPPIVTANTVLSILAVDYPVDKVSCYVSDDGASMLTFDALAETSEFARKWVPFVKKYDIEPRAPEFYFCQKIDYLKDKVQPSFVKDRRTREGEQRKVEDGIVEKAILVKDFA

SEQ ID NO: 16390 - protein, 363 aa, Triticum aestivum
  peptide (1)..(363): Ceres Seq. ID no. 14313223
  misc_feature (145)..(356): Pfam Name: Pfam Description:  Cellulose synthase
  misc_feature (1)..(361): NCBI GI NO: 40363755 NR Description: putative cellulose synthase [Triticum aestivum]
  misc_feature (1)..(361): NCBI GI NO: 39726025 NR Description: putative cellulose synthase catalytic subunit
  misc_feature (1)..(356): NCBI GI NO: 28411807 NR Description: cellulose synthase-4
  misc_feature (1)..(356): NCBI GI NO: 9622890 NR Description: cellulose synthase-9 [Zea mays]
  misc_feature (1)..(356): NCBI GI NO: 9622880 NR Description: cellulose synthase-4 [Zea mays]
  misc_feature (1)..(356): NCBI GI NO: 9622882 NR Description: cellulose synthase-5 [Zea mays]
  misc_feature (1)..(356): NCBI GI NO: 30103013 NR Description: putative cellulose synthase catalytic subunit
  misc_feature (1)..(356): NCBI GI NO: 39726027 NR Description: putative cellulose synthase catalytic subunit
  misc_feature (1)..(356): NCBI GI NO: 39933010 NR Description: cellulose synthase [Populus tremuloides]
  misc_feature (7)..(356): NCBI GI NO: 39726035 NR Description: putative cellulose synthase catalytic subunit
MNTGGSGNVGHPKYDSGEIGLSKYDSGEIPRGYVPSVTNSQMSGEIPGASPDHHMMSPTGNISRRAPFPYVNHSPNPSREFSGSIGNVAWKERVDGWKMKQDKGAIPMTNGTSIAPSEGRAATDIDASTEYNMEDALLNDETRQPLSRKVPIASSKINPYRMVIVLRLVVLSIFLHYRLTNPVRNAYPLWLLSVICEIWFALSWILDQFPKWFPINRETYLDRLALRYDREGEPSQLAAVDIFVSTVDPLKEPPIVTANTVLSILAVDYPVDKVSCYVSDDGASMLTFDALAETSEFARKWVPFVKKYDIEPRAPEFYFCQKIDYLKDKVQPSFVKDRRTREGEQRKVEDGIVEKAILVKDFA

SEQ ID NO: 16391 - DNA, 634 bp, Triticum aestivum
  misc_feature (1)..(634): Ceres Seq. ID no. 12620202
cccaacatccccggcgccggggggaaaagctaccagggatgcgtctcgtcagcctcgcgcgcgcggcccctcgcgtccgcgcggcgtcgacggcggccacccccaccctggcggcggcgctgaaggtgggcgacgcgctgcgcccgcgccggcggcggttcacggaggaggccgtgccggcgtacgcgggggtgagcggcgaccgcaaccccgtgcacctagacgacgccttcgcgcgcgggacgggcggcttccagcgcggccgcgtggtgcacggcatgctcgtcgcctccctcttccccgccctcatcgcctcccacttccctggagccgtgtacgcgagccagtccctcaagttcgcggcgccggtgcacgtcggggacgaggtggtcgcgcaggtgcaggcgctccacatcaaggccaccggcgcaaggcacatcgtcaagttcgccaccaggtgcttcatggacgacgaggagactctcgccatcgacggcgaggccatggcttttctgcccacactgcagctcagcacagaggcaatcgagtgacaagtatgttatgttgattagaaccatttggaataggacgacttttatctcatgatgaaacattttgcctccgcataagcggg

SEQ ID NO: 16392 - protein, 188 aa, Triticum aestivum
  peptide (1)..(188): Ceres Seq. ID no. 12620203
  misc_feature (25)..(169): NCBI GI NO: 29830710 NR Description: putative oxidoreductase
PTSPAPGGKATRDASRQPRARGPSRPRGVDGGHPHPGGGAEGGRRAAPAPAAVHGGGRAGVRGGERRPQPRAPRRRLRARDGRLPARPRGARHARRLPLPRPHRLPLPWSRVREPVPQVRGAGARRGRGGRAGAGAPHQGHRRKAHRQVRHQVLHGRRGDSRHRRRGHGFSAHTAAQHRGNRVTSMLC

SEQ ID NO: 16393 - protein, 182 aa, Triticum aestivum
  peptide (1)..(182): Ceres Seq. ID no. 12620204
  misc_feature (40)..(154): Pfam Name: Pfam Description:  MaoC like domain
  misc_feature (25)..(176): NCBI GI NO: 10177725 NR Description: gene_id:K9B18.4~unknown protein
  misc_feature (25)..(176): NCBI GI NO: 15239296 NR Description: putative protein; protein id: At5g60340.1
  misc_feature (37)..(172): NCBI GI NO: 18652297 NR Description: enoyl-CoA hydrotase [Aeromonas hydrophila]
  misc_feature (37)..(172): NCBI GI NO: 28948376 NR Description: Chain A, (R)-Hydratase From A
  misc_feature (40)..(173): NCBI GI NO: 22958771 NR Description: hypothetical protein [Rhodobacter sphaeroides]
  misc_feature (40)..(172): NCBI GI NO: 7469146 NR Description: conserved hypothetical protein - Rhodobactercapsulatus
  misc_feature (54)..(179): NCBI GI NO: 23060433 NR Description: hypothetical protein
  misc_feature (54)..(173): NCBI GI NO: 23016355 NR Description: hypothetical protein
  misc_feature (38)..(182): NCBI GI NO: 15598498 NR Description: conserved hypothetical protein
  misc_feature (40)..(172): NCBI GI NO: 20807052 NR Description: predicted acyl dehydratase
QHPRRRGEKLPGMRLVSLARAAPRVRAASTAATPTLAAALKVGDALRPRRRRFTEEAVPAYAGVSGDRNPVHLDDAFARGTGGFQRGRVVHGMLVASLFPALIASHFPGAVYASQSLKFAAPVHVGDEVVAQVQALHIKATGARHIVKFATRCFMDDEETLAIDGEAMAFLPTLQLSTEAIE

SEQ ID NO: 16394 - protein, 170 aa, Triticum aestivum
  peptide (1)..(170): Ceres Seq. ID no. 12620205
  misc_feature (28)..(142): Pfam Name: Pfam Description:  MaoC like domain
  misc_feature (13)..(164): NCBI GI NO: 10177725 NR Description: gene_id:K9B18.4~unknown protein
  misc_feature (13)..(164): NCBI GI NO: 15239296 NR Description: putative protein; protein id: At5g60340.1
  misc_feature (25)..(160): NCBI GI NO: 18652297 NR Description: enoyl-CoA hydrotase [Aeromonas hydrophila]
  misc_feature (25)..(160): NCBI GI NO: 28948376 NR Description: Chain A, (R)-Hydratase From A
  misc_feature (28)..(161): NCBI GI NO: 22958771 NR Description: hypothetical protein [Rhodobacter sphaeroides]
  misc_feature (28)..(160): NCBI GI NO: 7469146 NR Description: conserved hypothetical protein - Rhodobactercapsulatus
  misc_feature (42)..(167): NCBI GI NO: 23060433 NR Description: hypothetical protein
  misc_feature (42)..(161): NCBI GI NO: 23016355 NR Description: hypothetical protein
  misc_feature (26)..(170): NCBI GI NO: 15598498 NR Description: conserved hypothetical protein
  misc_feature (28)..(160): NCBI GI NO: 20807052 NR Description: predicted acyl dehydratase
MRLVSLARAAPRVRAASTAATPTLAAALKVGDALRPRRRRFTEEAVPAYAGVSGDRNPVHLDDAFARGTGGFQRGRVVHGMLVASLFPALIASHFPGAVYASQSLKFAAPVHVGDEVVAQVQALHIKATGARHIVKFATRCFMDDEETLAIDGEAMAFLPTLQLSTEAIE

SEQ ID NO: 16395 - DNA, 556 bp, Triticum aestivum
  misc_feature (1)..(556): Ceres Seq. ID no. 13656166
atcttcatttcacatcaaaatttctcctctttctatccatggccacggacgcacagcaccagcgacacagccgcaacggcggcgtgcacaccggccaccacttcctcatcgtggcctacggcatccagagccacctcaacccgtgccgcgtcctcgcgcaccgcctcgcgcgcctccacggcgtcgacggctccggggccgtcctcgccacggtctccctcccggtgtccgctcaccgccgcatgttcccttcgtccggagacgtcgacaatgatgataaagccaccgacggcgtcgtctcttacgctccatactccgacggcctcgacgacggctccatggccagggacggcgaggcgagggcgcgcagccgccaggccacctttgagagcctgtcagccgtcgtcgccaccctcgccgcacgtggccggccggtgacgtgtgtcgtttgcagcatggttctccccgcggcgctggacgtcgcgcgtgagcacggcatcccgctggccgtgtactggatccaaccggccaccgtgctcgccgcgtactaccacta

SEQ ID NO: 16396 - protein, 184 aa, Triticum aestivum
  peptide (1)..(184): Ceres Seq. ID no. 13656167
  misc_feature (52)..(183): Pfam Name: Pfam Description:  UDP-glucoronosyl and UDP-glucosyl transferase
  misc_feature (32)..(183): NCBI GI NO: 34906162 NR Description: putative anthocyanin 5-O-glucosyltransferase
  misc_feature (33)..(183): NCBI GI NO: 40714353 NR Description: anthocyanin 5-O-glucosyltransferase
  misc_feature (33)..(183): NCBI GI NO: 20146093 NR Description: glucosyltransferase NTGT2 [Nicotiana tabacum]
  misc_feature (33)..(183): NCBI GI NO: 14192682 NR Description: cold-induced glucosyl transferase
  misc_feature (13)..(183): NCBI GI NO: 18491183 NR Description: putative glucosyltransferase
  misc_feature (23)..(183): NCBI GI NO: 2149127 NR Description: UDP-glucose: indole-3-acetate beta-D-glucosyltransferase
  misc_feature (23)..(183): NCBI GI NO: 18414478 NR Description: UDP-glucose: indole-3-acetate beta-D-glucosyltransferase
  misc_feature (27)..(183): NCBI GI NO: 15236407 NR Description: UDP-glycosyltransferase family
  misc_feature (33)..(183): NCBI GI NO: 6683052 NR Description: anthocyanin 5-O-glucosyltransferase
  misc_feature (33)..(183): NCBI GI NO: 18390540 NR Description: UDP-glucose transferase(UGT1)
LHFTSKFLLFLSMATDAQHQRHSRNGGVHTGHHFLIVAYGIQSHLNPCRVLAHRLARLHGVDGSGAVLATVSLPVSAHRRMFPSSGDVDNDDKATDGVVSYAPYSDGLDDGSMARDGEARARSRQATFESLSAVVATLAARGRPVTCVVCSMVLPAALDVAREHGIPLAVYWIQPATVLAAYYH

SEQ ID NO: 16397 - protein, 172 aa, Triticum aestivum
  peptide (1)..(172): Ceres Seq. ID no. 13656168
  misc_feature (40)..(171): Pfam Name: Pfam Description:  UDP-glucoronosyl and UDP-glucosyl transferase
  misc_feature (20)..(171): NCBI GI NO: 34906162 NR Description: putative anthocyanin 5-O-glucosyltransferase
  misc_feature (21)..(171): NCBI GI NO: 40714353 NR Description: anthocyanin 5-O-glucosyltransferase
  misc_feature (21)..(171): NCBI GI NO: 20146093 NR Description: glucosyltransferase NTGT2 [Nicotiana tabacum]
  misc_feature (21)..(171): NCBI GI NO: 14192682 NR Description: cold-induced glucosyl transferase
  misc_feature (1)..(171): NCBI GI NO: 18491183 NR Description: putative glucosyltransferase
  misc_feature (11)..(171): NCBI GI NO: 2149127 NR Description: UDP-glucose: indole-3-acetate beta-D-glucosyltransferase
  misc_feature (11)..(171): NCBI GI NO: 18414478 NR Description: UDP-glucose: indole-3-acetate beta-D-glucosyltransferase
  misc_feature (15)..(171): NCBI GI NO: 15236407 NR Description: UDP-glycosyltransferase family
  misc_feature (21)..(171): NCBI GI NO: 6683052 NR Description: anthocyanin 5-O-glucosyltransferase
  misc_feature (21)..(171): NCBI GI NO: 18390540 NR Description: UDP-glucose transferase(UGT1)
MATDAQHQRHSRNGGVHTGHHFLIVAYGIQSHLNPCRVLAHRLARLHGVDGSGAVLATVSLPVSAHRRMFPSSGDVDNDDKATDGVVSYAPYSDGLDDGSMARDGEARARSRQATFESLSAVVATLAARGRPVTCVVCSMVLPAALDVAREHGIPLAVYWIQPATVLAAYYH

SEQ ID NO: 16398 - protein, 145 aa, Triticum aestivum
  peptide (1)..(145): Ceres Seq. ID no. 13656169
  misc_feature (15)..(145): Pfam Name: Pfam Description:  Glycoprotein GG/GX
  misc_feature (14)..(145): NCBI GI NO: 38175466 NR Description: putative high-affinity potassium transporter
  misc_feature (15)..(145): NCBI GI NO: 23510008 NR Description: hypothetical protein [Plasmodium falciparum 3D7]
  misc_feature (9)..(145): NCBI GI NO: 6322611 NR Description: Delayed Anaerobic Gene; Dan4p
  misc_feature (16)..(145): NCBI GI NO: 7248459 NR Description: arabinogalactan protein [Zea mays]
  misc_feature (15)..(128): NCBI GI NO: 14041184 NR Description: mucus-like protein [Geodia cydonium]
  misc_feature (15)..(143): NCBI GI NO: 2136504 NR Description: gastric mucin (clone PGM-2A) - pig (fragment)
  misc_feature (15)..(145): NCBI GI NO: 111978 NR Description: mucin - rat
  misc_feature (15)..(145): NCBI GI NO: 6322611 NR Description: Delayed Anaerobic Gene; Dan4p
  misc_feature (15)..(145): NCBI GI NO: 2136504 NR Description: gastric mucin (clone PGM-2A) - pig (fragment)
  misc_feature (17)..(145): NCBI GI NO: 23510008 NR Description: hypothetical protein [Plasmodium falciparum 3D7]
IFISHQNFSSFYPWPRTHSTSDTAATAACTPATTSSSWPTASRATSTRAASSRTASRASTASTAPGPSSPRSPSRCPLTAACSLRPETSTMMIKPPTASSLTLHTPTASTTAPWPGTARRGRAAARPPLRACQPSSPPSPHVAGR

SEQ ID NO: 16399 - DNA, 2544 bp, Triticum aestivum
  misc_feature (1)..(2544): Ceres Seq. ID no. 14303680
atttcaaatcactctccctcccctgctctcctctcctcctcctcctccgccctctcgctcgcgtcccaggacccagccgcgcgaccccgaccccgaccccctcggcggccaccaccgcgcgctcccaccgccggcctgccgataccgcgccgagagattgctcctgacgatgggtggcgcggtgagagaccagcagcagcagctccacccgtgcgattcgcttctcctcgagctcaacgtgatctgggatgaggtcggtgagcccgacacggtgcgggacaagacgctgctggagctcgagcaggaatgcctcgatgtctacaggaggaaggtcgaccaggccaaccgctgcagggctcagctgcggcaatccatcgccgaggccgaggctgagctcgccggcatctgctcggccataggcgagccgccggttcacgtcaggcagtcaaaccagaaattgcatggtttaagggaggagttgaatgcaattatcccatatttagaggagatgcggactaaaaaggttgaaagatggagccagttcgttcatgtcctcgaggagattaagaaaatctcatccgaaatcaggccttcagactttgtgccatttaaaactcctgtggatcagtctgatctgtcgttaagaaagtttgaggagttaacgaaggagctagaatctcttcagaaagagaagagggaaagattaaagcaagtgatggatcatttgaacacattacattccttatgtgaggtgcttggcattgactttaaacaaacagtgcatgaggtgcaccctagcctggacgaagctgaaggatcaaagaacctgagcaacactacaatcgagagactagcattggctgtggatagacttcgtgaaataaaaattcagaggatgcaaaagcttcaagactttgcatcgacaatgctagaactatggaatcttatggatacaccaattgaagagcagcagatgttccagaatgtaacgtgcaatattgctgcctcggagcatgaaataacagaacccaacaccctgtcgatcgacttcctcagctatgtggaagctgaggttttaaggcttgagcaactgaaaggaagcaaaatgaaggacctcgttttgaaaaagaaatcggagctggaggagcacagaagacgtgcgcatctaattggcgaggaaggatattcagatgaatttaacattgaggctattgagtcgggagctattgatcctgcattggtgctggaacaaattgaggctcacattgcaacagtgaaagatgaagctttcagtcgaaaggatattcttgagaaggttgaaagatttctgaatgcatgtgaggaggaagcctggctggaagattacaacaaagatgacaatcgttacaatgctgggaagggggcacatctgacgctcaagagggctgagaaagctcgcattttggttaacaagattccgggaatggtagatgttttgaccacaaaaatcattgcttgggagaatgaaagaggaaaagagttcacatatgatggcgtacgccttctctcaatgctggatgaatacatgattgttcgccaggagaaagaacaagagaagaagagacaaagggatcagaagaagctccacgatcagctcaaagccgagcaggaagctctctacggttcaaagccaagtccatccaagcctcaaagcataaagaaggcgcctagacactcgatgggtggtgtaaaccgcagggtgtccatgggtggagccacgatgcaagcacccaaaacagacatactgcattccaagaatgttcgtgctgccaagagaactgaagacattgcccatttgtcccctgccagcagaggcttggacattggcgatcttcccatcaagaagctatctttcaatgccactgccttgcgtgaaaccgagacacctcgcaagccatttgcgcagatcatgccgccgccaagcagtgtcccctccactcctgcgcgctctgtcaccaatgacaccgaggatgagaaccggacccccaaccccaagacatttggagcagcactgaatctcaagaccccgatgaccgtggcggctccgatgcagctggcaatgacgcccgctgtggctagcaaggtcacggctgctcctgtctcccttgtctacgagaagccagagccaacattgctggaggcgatcgagtattccttcgaagaaaggcggctggccgtctatttgtcaagagaagtttaagctctctttgcgtaggcgaaagttggaaacctgacggctgttacttgtgagagactggctgctgcctagtatgttggtcgacgacagtcgtccagtgctgttctgattgttcccctctgccacatttgattgtttccatactcagcaaaggaagcttgcgcttcagcagcttccgttcagtactgccattggttagatataattaatgtgtataggtttctttctcggcactgaatcatcttgaatctgtttgattaatatagatcggtattgtgttttaatcctcatgcgatgatgtgtttctg

SEQ ID NO: 16400 - protein, 745 aa, Triticum aestivum
  peptide (1)..(745): Ceres Seq. ID no. 14303681
  misc_feature (92)..(669): Pfam Name: MAP65/ASE1 family Pfam Description: Microtubule associated protein
  misc_feature (57)..(744): NCBI GI NO: 15242132 NR Description: microtubule associated protein (MAP65/ASE1) family
  misc_feature (85)..(736): NCBI GI NO: 15232967 NR Description: microtubule associated protein (MAP65/ASE1) family
  misc_feature (73)..(597): NCBI GI NO: 15241762 NR Description: microtubule associated protein (MAP65/ASE1) family
  misc_feature (57)..(353): NCBI GI NO: 34911266 NR Description: cytokinesis regulating protein - like
  misc_feature (71)..(582): NCBI GI NO: 11558252 NR Description: microtubule-associated protein MAP65-1a
  misc_feature (71)..(582): NCBI GI NO: 15240485 NR Description: microtubule associated protein (MAP65/ASE1) family
  misc_feature (71)..(582): NCBI GI NO: 28200790 NR Description: 65kD microtubule associated protein
  misc_feature (71)..(617): NCBI GI NO: 11558254 NR Description: microtubule-associated protein MAP65-1b
  misc_feature (71)..(617): NCBI GI NO: 11558256 NR Description: microtubule-associated protein MAP65-1c
  misc_feature (71)..(617): NCBI GI NO: 18416818 NR Description: microtubule associated protein (MAP65/ASE1) family
FQITLPPLLSSPPPPPPSRSRPRTQPRDPDPDPLGGHHRALPPPACRYRAERLLLTMGGAVRDQQQQLHPCDSLLLELNVIWDEVGEPDTVRDKTLLELEQECLDVYRRKVDQANRCRAQLRQSIAEAEAELAGICSAIGEPPVHVRQSNQKLHGLREELNAIIPYLEEMRTKKVERWSQFVHVLEEIKKISSEIRPSDFVPFKTPVDQSDLSLRKFEELTKELESLQKEKRERLKQVMDHLNTLHSLCEVLGIDFKQTVHEVHPSLDEAEGSKNLSNTTIERLALAVDRLREIKIQRMQKLQDFASTMLELWNLMDTPIEEQQMFQNVTCNIAASEHEITEPNTLSIDFLSYVEAEVLRLEQLKGSKMKDLVLKKKSELEEHRRRAHLIGEEGYSDEFNIEAIESGAIDPALVLEQIEAHIATVKDEAFSRKDILEKVERFLNACEEEAWLEDYNKDDNRYNAGKGAHLTLKRAEKARILVNKIPGMVDVLTTKIIAWENERGKEFTYDGVRLLSMLDEYMIVRQEKEQEKKRQRDQKKLHDQLKAEQEALYGSKPSPSKPQSIKKAPRHSMGGVNRRVSMGGATMQAPKTDILHSKNVRAAKRTEDIAHLSPASRGLDIGDLPIKKLSFNATALRETETPRKPFAQIMPPPSSVPSTPARSVTNDTEDENRTPNPKTFGAALNLKTPMTVAAPMQLAMTPAVASKVTAAPVSLVYEKPEPTLLEAIEYSFEERRLAVYLSREV

SEQ ID NO: 16401 - protein, 689 aa, Triticum aestivum
  peptide (1)..(689): Ceres Seq. ID no. 14303682
  misc_feature (36)..(613): Pfam Name: MAP65/ASE1 family Pfam Description: Microtubule associated protein
  misc_feature (1)..(688): NCBI GI NO: 15242132 NR Description: microtubule associated protein (MAP65/ASE1) family
  misc_feature (29)..(680): NCBI GI NO: 15232967 NR Description: microtubule associated protein (MAP65/ASE1) family
  misc_feature (17)..(541): NCBI GI NO: 15241762 NR Description: microtubule associated protein (MAP65/ASE1) family
  misc_feature (1)..(297): NCBI GI NO: 34911266 NR Description: cytokinesis regulating protein - like
  misc_feature (15)..(526): NCBI GI NO: 11558252 NR Description: microtubule-associated protein MAP65-1a
  misc_feature (15)..(526): NCBI GI NO: 15240485 NR Description: microtubule associated protein (MAP65/ASE1) family
  misc_feature (15)..(526): NCBI GI NO: 28200790 NR Description: 65kD microtubule associated protein
  misc_feature (15)..(561): NCBI GI NO: 11558254 NR Description: microtubule-associated protein MAP65-1b
  misc_feature (15)..(561): NCBI GI NO: 11558256 NR Description: microtubule-associated protein MAP65-1c
  misc_feature (15)..(561): NCBI GI NO: 18416818 NR Description: microtubule associated protein (MAP65/ASE1) family
MGGAVRDQQQQLHPCDSLLLELNVIWDEVGEPDTVRDKTLLELEQECLDVYRRKVDQANRCRAQLRQSIAEAEAELAGICSAIGEPPVHVRQSNQKLHGLREELNAIIPYLEEMRTKKVERWSQFVHVLEEIKKISSEIRPSDFVPFKTPVDQSDLSLRKFEELTKELESLQKEKRERLKQVMDHLNTLHSLCEVLGIDFKQTVHEVHPSLDEAEGSKNLSNTTIERLALAVDRLREIKIQRMQKLQDFASTMLELWNLMDTPIEEQQMFQNVTCNIAASEHEITEPNTLSIDFLSYVEAEVLRLEQLKGSKMKDLVLKKKSELEEHRRRAHLIGEEGYSDEFNIEAIESGAIDPALVLEQIEAHIATVKDEAFSRKDILEKVERFLNACEEEAWLEDYNKDDNRYNAGKGAHLTLKRAEKARILVNKIPGMVDVLTTKIIAWENERGKEFTYDGVRLLSMLDEYMIVRQEKEQEKKRQRDQKKLHDQLKAEQEALYGSKPSPSKPQSIKKAPRHSMGGVNRRVSMGGATMQAPKTDILHSKNVRAAKRTEDIAHLSPASRGLDIGDLPIKKLSFNATALRETETPRKPFAQIMPPPSSVPSTPARSVTNDTEDENRTPNPKTFGAALNLKTPMTVAAPMQLAMTPAVASKVTAAPVSLVYEKPEPTLLEAIEYSFEERRLAVYLSREV

SEQ ID NO: 16402 - protein, 576 aa, Triticum aestivum
  peptide (1)..(576): Ceres Seq. ID no. 14303683
  misc_feature (1)..(500): Pfam Name: MAP65/ASE1 family Pfam Description: Microtubule associated protein
  misc_feature (1)..(575): NCBI GI NO: 15242132 NR Description: microtubule associated protein (MAP65/ASE1) family
  misc_feature (1)..(567): NCBI GI NO: 15232967 NR Description: microtubule associated protein (MAP65/ASE1) family
  misc_feature (1)..(428): NCBI GI NO: 15241762 NR Description: microtubule associated protein (MAP65/ASE1) family
  misc_feature (1)..(184): NCBI GI NO: 34911266 NR Description: cytokinesis regulating protein - like
  misc_feature (1)..(413): NCBI GI NO: 11558252 NR Description: microtubule-associated protein MAP65-1a
  misc_feature (1)..(413): NCBI GI NO: 15240485 NR Description: microtubule associated protein (MAP65/ASE1) family
  misc_feature (1)..(413): NCBI GI NO: 28200790 NR Description: 65kD microtubule associated protein
  misc_feature (1)..(448): NCBI GI NO: 11558254 NR Description: microtubule-associated protein MAP65-1b
  misc_feature (1)..(448): NCBI GI NO: 11558256 NR Description: microtubule-associated protein MAP65-1c
  misc_feature (1)..(448): NCBI GI NO: 18416818 NR Description: microtubule associated protein (MAP65/ASE1) family
MRTKKVERWSQFVHVLEEIKKISSEIRPSDFVPFKTPVDQSDLSLRKFEELTKELESLQKEKRERLKQVMDHLNTLHSLCEVLGIDFKQTVHEVHPSLDEAEGSKNLSNTTIERLALAVDRLREIKIQRMQKLQDFASTMLELWNLMDTPIEEQQMFQNVTCNIAASEHEITEPNTLSIDFLSYVEAEVLRLEQLKGSKMKDLVLKKKSELEEHRRRAHLIGEEGYSDEFNIEAIESGAIDPALVLEQIEAHIATVKDEAFSRKDILEKVERFLNACEEEAWLEDYNKDDNRYNAGKGAHLTLKRAEKARILVNKIPGMVDVLTTKIIAWENERGKEFTYDGVRLLSMLDEYMIVRQEKEQEKKRQRDQKKLHDQLKAEQEALYGSKPSPSKPQSIKKAPRHSMGGVNRRVSMGGATMQAPKTDILHSKNVRAAKRTEDIAHLSPASRGLDIGDLPIKKLSFNATALRETETPRKPFAQIMPPPSSVPSTPARSVTNDTEDENRTPNPKTFGAALNLKTPMTVAAPMQLAMTPAVASKVTAAPVSLVYEKPEPTLLEAIEYSFEERRLAVYLSREV

SEQ ID NO: 16403 - DNA, 1057 bp, Triticum aestivum
  misc_feature (1)..(1057): Ceres Seq. ID no. 13657258
ataatatcctgactttgaagtcattttttcatttacatcagcccagcctatgcaaactccattctgtgatggatgaaatatccattatatttaaggctgtattgtcttgttattttttgttttcatacctataatttacatccagattactacatcggattttgttcaactctgctgaacatctgtaacacttattttcttcacaggtgaagactatatatgtgaagaacctgccggagaatgtttctaaagagaaagttaaggatctctttgaagttcatggagaggtcacaaaaattgttttaccgcctgctaaggccgggcataagagggattttgggtttgttcactttgctgaaagatcaagtgcactgaaggcagttaaaggaagtgaaaaatacgaaatcgatgggcaagtgcttgaagtttccatggccaaacctttgagtgataagaaacctgaccactcgttcaagcctggtggagctcccagctatcctcttccaccttatggtggctacatgggagacccatatggtgcctatggtggcggccctggattcaaccagcctatgatctatggtagaggaccagcaccagctggaatgaggatggtgccgatggtgctccctgatggtcgccttggctatgttctgtaagactttttttctgcatactagtgtcgatgcatacacatcttcagttccttgacaacgtgttactaatgttgataggcaacaacctggtggaatgccgcctccaccccctccgcgacgtggtgaccggcgggatggcggtggccgaggtggcgaaggaagccagcggcgttatcggccctactagtttgtcccttgccttgcatttttcgtcgtgctaggtgatggatttgttaactttgatggagtgcgtttaggagcgtgtgttgtttttgccctgtaagacttctatagccttagacttggtactcttctgttttgttatttgataaacacccgagacgtgtactgttgcgccgtccttttcaataacttgtgtatcatgcagtgctcgtgactcc

SEQ ID NO: 16404 - protein, 75 aa, Triticum aestivum
  peptide (1)..(75): Ceres Seq. ID no. 13657259
  misc_feature (1)..(75): NCBI GI NO: 37531112 NR Description: putative RNA-binding protein
  misc_feature (1)..(75): NCBI GI NO: 7485284 NR Description: hypothetical protein A_TM018A10
  misc_feature (1)..(75): NCBI GI NO: 18411454 NR Description: RNA recognition motif (RRM)-containing protein
  misc_feature (1)..(75): NCBI GI NO: 29371361 NR Description: putative RNA-binding protein
  misc_feature (1)..(75): NCBI GI NO: 15231284 NR Description: RNA recognition motif (RRM)-containing protein
  misc_feature (44)..(75): NCBI GI NO: 22327128 NR Description: RNA recognition motif (RRM)-containing protein
  misc_feature (44)..(75): NCBI GI NO: 15241771 NR Description: RNA recognition motif (RRM)-containing protein
  misc_feature (1)..(53): NCBI GI NO: 9502153 NR Description: contains similarity to Pfam family PF00076
  misc_feature (1)..(53): NCBI GI NO: 32476441 NR Description: RNA-binding protein [Pirellula sp.]
  misc_feature (1)..(58): NCBI GI NO: 39545835 NR Description: OSJNBb0060E08.6
MAKPLSDKKPDHSFKPGGAPSYPLPPYGGYMGDPYGAYGGGPGFNQPMIYGRGPAPAGMRMVPMVLPDGRLGYVL

SEQ ID NO: 16405 - protein, 63 aa, Triticum aestivum
  peptide (1)..(63): Ceres Seq. ID no. 13657260
MHTHLQFLDNVLLMLIGNNLVECRLHPLRDVVTGGMAVAEVAKEASGVIGPTSLSLALHFSSC

SEQ ID NO: 16406 - protein, 50 aa, Triticum aestivum
  peptide (1)..(50): Ceres Seq. ID no. 13657261
MLIGNNLVECRLHPLRDVVTGGMAVAEVAKEASGVIGPTSLSLALHFSSC

SEQ ID NO: 16407 - DNA, 851 bp, Triticum aestivum
  misc_feature (1)..(851): Ceres Seq. ID no. 13657832
gaacccccagcagttcactccactcctagtcctgctaccaccagcaagaggctggctgtgggctgatccatgaggcgcctcgtgttcgcggagctcgtggtcctcctcgccgcggcgctcctgctccccgtcgtgatctgctgccggcgctcgagcggcggcgccacgcggccgctgcccgtctcggagcagcccggcgccggtgccaacgccagcaggaagaagcgccgcgtcgagcggctgcggcgggcgctccacgccctgcgcgtctggtgccgccgctcccgcgtcgagccggcggcctccgcgtccgcgtctccggacgacggcgcgcaggcgcagggggaggttcagctggagcagatcgccgccccggcggcggcggcggagcaggcggggcacgaggaggagggtgtggcggcgtggcgcgagcgctggttcggcggccccgggtcgcgcgcgctctacaccatcgaggaggcgtcggagacggagggcgacgtggagagccagtacggcgccgagcccgagacgccgttctacacgccgccggcctcgccgccgcacgatggagagcaagcagaccagccggagcacggcgaggccagttagttagccggcgatgcgccgctcgttccctgtgtgtcatagattcgacaattttctttgggttctttcgcgcatcagcagcagcagaaagcagcggctgttgaagcaaggcgtgcatgataggattggctagtcagtactaattctttctttcccctccttgtttccggaggcaggagtggatggatggacatgcatgcagattaatactactacggcgaatctgcatgtattaatctgct

SEQ ID NO: 16408 - protein, 180 aa, Triticum aestivum
  peptide (1)..(180): Ceres Seq. ID no. 13657833
  misc_feature (1)..(175): NCBI GI NO: 34905880 NR Description: P0458E05.16
MRRLVFAELVVLLAAALLLPVVICCRRSSGGATRPLPVSEQPGAGANASRKKRRVERLRRALHALRVWCRRSRVEPAASASASPDDGAQAQGEVQLEQIAAPAAAAEQAGHEEEGVAAWRERWFGGPGSRALYTIEEASETEGDVESQYGAEPETPFYTPPASPPHDGEQADQPEHGEAS

SEQ ID NO: 16409 - DNA, 1613 bp, Triticum aestivum
  misc_feature (1)..(1613): Ceres Seq. ID no. 14307952
aaatcattcactcaacaatggaattcgttatgctcctggccgctctcttttgcctcctagccggagtggtctttctgcggagctacaccaggagatcccaggccaccacccaccacatcggggaccccgatgttgctcatcgagcgctcattgggaacgccgacgacttcttaaaccggccggcagcaagcttccccacctccctggccacctggcgccatggcgaacggaacgacaacatagccactgtgacctacggcccgcagtggcgagtgctccggtgcaacctcacggctgagatcctctcacgcctcggttccttagccccgcttcatgaggaggccgcccaggcactcgtcgcagacttctcggcccgatgcggcggaggaggtgacgtggccgtccgtgagcccgtcaccaaagccgtgttcacgctggccacgcgcctgtgcttcggcgacattgtggacgacggccagagacacgccataggacgcgtgatacgggactccatcgtcgccgcaggtaagctcagccccgggttcgatggctcgatgctatccaagctcgcgaactggagggggtttcgccggatctccgccgtgctcaaacggcagaccgagctgtacctccctctgatcgcggcacggaggcagtcgcagtctcagctctgtggcggcatcgtccatccttacgaggactcgctcctggatctccgtgtccccgacaatggtgatgcctccggccccggccgtcctcttcaagacggcgagctggtgggccttgtgttcgagttcctgggtgcagccactgggtcaaccgcagcctgcctcgagtggaccctcgcccatctcatcgaccagcaggagaccctggacaggctgcgccgggagatcgaagacgaggccgacgccggcgggatactctccagcaagagccttcgcagcggcatgccctacctgaacgcggtagtccttgaatgcctccgcatgcaccagccggtgccggtcatcttgagcagcgcccacggggacggcgccaaagcgatcggtggaatgagagctgtgccgctggacggcttgagcgtgcagttcaatttagccgacattggaagagatgcgaagcggtggacccatcctgacaagttctggccggagcggttccttgccggaggcgaggcggaagacatcgggccggcgccgggccccaaggagatcaggatgatgccgttcggtgcgggacatcggcactgccctggcgtgaacatgggaatgttgcacatcaagtgcttcttagcggcgctcgtgcacaacttcgactgggcactgtccgccgaagactgcagcagcggtgtcgacatgacggagcaggacggcttcataaaaataatgaagaagccgctctccgcgcgtgtcactggacgcacttgagttcttctaaaatctttgacaaacttgtgtccggtttctgaatgtgtgtggtcctatttttcatgcacgtcttgttctgctttcctgttgaagtttgtttgagcttgcttaccacacggaccgtgtggtatgtgtgattgtacttgcatcaaataataagaaatcgtgtgcttcttgcttttc

SEQ ID NO: 16410 - protein, 475 aa, Triticum aestivum
  peptide (1)..(475): Ceres Seq. ID no. 14307953
  misc_feature (39)..(471): Pfam Name: Pfam Description:  Cytochrome P450
  misc_feature (9)..(474): NCBI GI NO: 38346509 NR Description: OSJNBa0027H09.4
  misc_feature (9)..(474): NCBI GI NO: 38346511 NR Description: OSJNBa0027H09.6
  misc_feature (39)..(474): NCBI GI NO: 37536044 NR Description: putative cytochrome P450
  misc_feature (27)..(474): NCBI GI NO: 34895180 NR Description: putative cytochrome P450
  misc_feature (3)..(474): NCBI GI NO: 37536020 NR Description: putative cytochrome P450
  misc_feature (79)..(469): NCBI GI NO: 28971944 NR Description: putative cytochrome P450
  misc_feature (39)..(467): NCBI GI NO: 37536046 NR Description: putative cytochrome P450
  misc_feature (11)..(470): NCBI GI NO: 37536016 NR Description: putative cytochrome P450
  misc_feature (39)..(474): NCBI GI NO: 37530946 NR Description: putative cytochrome P450
  misc_feature (39)..(474): NCBI GI NO: 15217771 NR Description: cytochrome P450, putative [Arabidopsis thaliana]
IIHSTMEFVMLLAALFCLLAGVVFLRSYTRRSQATTHHIGDPDVAHRALIGNADDFLNRPAASFPTSLATWRHGERNDNIATVTYGPQWRVLRCNLTAEILSRLGSLAPLHEEAAQALVADFSARCGGGGDVAVREPVTKAVFTLATRLCFGDIVDDGQRHAIGRVIRDSIVAAGKLSPGFDGSMLSKLANWRGFRRISAVLKRQTELYLPLIAARRQSQSQLCGGIVHPYEDSLLDLRVPDNGDASGPGRPLQDGELVGLVFEFLGAATGSTAACLEWTLAHLIDQQETLDRLRREIEDEADAGGILSSKSLRSGMPYLNAVVLECLRMHQPVPVILSSAHGDGAKAIGGMRAVPLDGLSVQFNLADIGRDAKRWTHPDKFWPERFLAGGEAEDIGPAPGPKEIRMMPFGAGHRHCPGVNMGMLHIKCFLAALVHNFDWALSAEDCSSGVDMTEQDGFIKIMKKPLSARVTGRT

SEQ ID NO: 16411 - protein, 470 aa, Triticum aestivum
  peptide (1)..(470): Ceres Seq. ID no. 14307954
  misc_feature (34)..(466): Pfam Name: Pfam Description:  Cytochrome P450
  misc_feature (4)..(469): NCBI GI NO: 38346509 NR Description: OSJNBa0027H09.4
  misc_feature (4)..(469): NCBI GI NO: 38346511 NR Description: OSJNBa0027H09.6
  misc_feature (34)..(469): NCBI GI NO: 37536044 NR Description: putative cytochrome P450
  misc_feature (22)..(469): NCBI GI NO: 34895180 NR Description: putative cytochrome P450
  misc_feature (1)..(469): NCBI GI NO: 37536020 NR Description: putative cytochrome P450
  misc_feature (74)..(464): NCBI GI NO: 28971944 NR Description: putative cytochrome P450
  misc_feature (34)..(462): NCBI GI NO: 37536046 NR Description: putative cytochrome P450
  misc_feature (6)..(465): NCBI GI NO: 37536016 NR Description: putative cytochrome P450
  misc_feature (34)..(469): NCBI GI NO: 37530946 NR Description: putative cytochrome P450
  misc_feature (34)..(469): NCBI GI NO: 15217771 NR Description: cytochrome P450, putative [Arabidopsis thaliana]
MEFVMLLAALFCLLAGVVFLRSYTRRSQATTHHIGDPDVAHRALIGNADDFLNRPAASFPTSLATWRHGERNDNIATVTYGPQWRVLRCNLTAEILSRLGSLAPLHEEAAQALVADFSARCGGGGDVAVREPVTKAVFTLATRLCFGDIVDDGQRHAIGRVIRDSIVAAGKLSPGFDGSMLSKLANWRGFRRISAVLKRQTELYLPLIAARRQSQSQLCGGIVHPYEDSLLDLRVPDNGDASGPGRPLQDGELVGLVFEFLGAATGSTAACLEWTLAHLIDQQETLDRLRREIEDEADAGGILSSKSLRSGMPYLNAVVLECLRMHQPVPVILSSAHGDGAKAIGGMRAVPLDGLSVQFNLADIGRDAKRWTHPDKFWPERFLAGGEAEDIGPAPGPKEIRMMPFGAGHRHCPGVNMGMLHIKCFLAALVHNFDWALSAEDCSSGVDMTEQDGFIKIMKKPLSARVTGRT

SEQ ID NO: 16412 - protein, 466 aa, Triticum aestivum
  peptide (1)..(466): Ceres Seq. ID no. 14307955
  misc_feature (30)..(462): Pfam Name: Pfam Description:  Cytochrome P450
  misc_feature (1)..(465): NCBI GI NO: 38346509 NR Description: OSJNBa0027H09.4
  misc_feature (1)..(465): NCBI GI NO: 38346511 NR Description: OSJNBa0027H09.6
  misc_feature (30)..(465): NCBI GI NO: 37536044 NR Description: putative cytochrome P450
  misc_feature (18)..(465): NCBI GI NO: 34895180 NR Description: putative cytochrome P450
  misc_feature (1)..(465): NCBI GI NO: 37536020 NR Description: putative cytochrome P450
  misc_feature (70)..(460): NCBI GI NO: 28971944 NR Description: putative cytochrome P450
  misc_feature (30)..(458): NCBI GI NO: 37536046 NR Description: putative cytochrome P450
  misc_feature (2)..(461): NCBI GI NO: 37536016 NR Description: putative cytochrome P450
  misc_feature (30)..(465): NCBI GI NO: 37530946 NR Description: putative cytochrome P450
  misc_feature (30)..(465): NCBI GI NO: 15217771 NR Description: cytochrome P450, putative [Arabidopsis thaliana]
MLLAALFCLLAGVVFLRSYTRRSQATTHHIGDPDVAHRALIGNADDFLNRPAASFPTSLATWRHGERNDNIATVTYGPQWRVLRCNLTAEILSRLGSLAPLHEEAAQALVADFSARCGGGGDVAVREPVTKAVFTLATRLCFGDIVDDGQRHAIGRVIRDSIVAAGKLSPGFDGSMLSKLANWRGFRRISAVLKRQTELYLPLIAARRQSQSQLCGGIVHPYEDSLLDLRVPDNGDASGPGRPLQDGELVGLVFEFLGAATGSTAACLEWTLAHLIDQQETLDRLRREIEDEADAGGILSSKSLRSGMPYLNAVVLECLRMHQPVPVILSSAHGDGAKAIGGMRAVPLDGLSVQFNLADIGRDAKRWTHPDKFWPERFLAGGEAEDIGPAPGPKEIRMMPFGAGHRHCPGVNMGMLHIKCFLAALVHNFDWALSAEDCSSGVDMTEQDGFIKIMKKPLSARVTGRT

SEQ ID NO: 16413 - DNA, 759 bp, Triticum aestivum
  misc_feature (1)..(759): Ceres Seq. ID no. 12619615
cttccttgtgcttcttcattcacctgcgactgcgagtgagtgcgagtgcgagtgcggggtgggtcaaaggctcaaagcaagtgcgtgggattggaggagaaggagatggagctggtgtcctcctcccgctccaccctatcctcttgcagccgactggttgctccctccaggtccagttccacgacggcatccgcagctgctaggcgccacgggaagaggctattatgtgtcttgggtggagacaggaatgatgagctcaagatcgggaggcgggcggttcttgctctgctcctggctacgcccacactctcactgcctttctccgcccacgccaagaccaagaccataaatccttatgatgaaagacgcttgcttcagcagaacaagaaaatccaggaagccaaccgtgcacctgatgatttcccaaacttcatcagagaaggttttcaggtcaaagtagtgacacccgacaactacataactcgggactccggattaatatatgaggacgtcaaagttggtacaggcgattgcccaaaggatggtcagcaggttatatttcactatgtgggctacaacgaatcaggacgaaggatagatagcacctacatccagggttcgcctgccaactttgtgcccggcaagtaaacacatgagaatcgacttctcaggagtatatgtgtgctctggatgtatgattaatatctgatcgttgatgttgtacactatcaaagatgtttacaaatagcgcccatctgg

SEQ ID NO: 16414 - protein, 180 aa, Triticum aestivum
  peptide (1)..(180): Ceres Seq. ID no. 12619616
  misc_feature (139)..(179): Pfam Name: Pfam Description:  FKBP-type peptidyl-prolyl cis-trans isomerase
  misc_feature (1)..(180): NCBI GI NO: 33146997 NR Description: putative FKBP-type peptidyl-prolyl cis-transisomerase
  misc_feature (34)..(179): NCBI GI NO: 30695188 NR Description: immunophilin / FKBP-type peptidyl-prolyl cis-transisomerase
  misc_feature (53)..(179): NCBI GI NO: 11283515 NR Description: hypothetical protein T8B10
MELVSSSRSTLSSCSRLVAPSRSSSTTASAAARRHGKRLLCVLGGDRNDELKIGRRAVLALLLATPTLSLPFSAHAKTKTINPYDERRLLQQNKKIQEANRAPDDFPNFIREGFQVKVVTPDNYITRDSGLIYEDVKVGTGDCPKDGQQVIFHYVGYNESGRRIDSTYIQGSPANFVPGK

SEQ ID NO: 16415 - protein, 115 aa, Triticum aestivum
  peptide (1)..(115): Ceres Seq. ID no. 12619617
FLVLLHSPATASECECECGVGQRLKASAWDWRRRRWSWCPPPAPPYPLAADWLLPPGPVPRRHPQLLGATGRGYYVSWVETGMMSSRSGGGRFLLCSWLRPHSHCLSPPTPRPRP

SEQ ID NO: 16416 - DNA, 2115 bp, Triticum aestivum
  misc_feature (1)..(2115): Ceres Seq. ID no. 15169470
tgaaaaatcgccgtcccgtctcgtcgccacccaccaaatcccccgccctgcctcgccaccaaccccacgccaccacccctccccgccggccgcccggtatataaaccccgaccgccacccccatttcccccagaccacacgactcgccctcctccccgcgcagcagccccacctaccgacctaccgccccaagccgccgcgcatctcgcccctcagcccctcccctcccctcccgccgcagcaatggcgctcgccaccaacaccgccgccgcggccgcagcgctgaccggcagcgcggcccagccccgccgcgcgggcttcctccccctcaagcgccgcaccatctccgccgtgcacgccgccgaccccgccaggagcggcgcgtccgtcccggcggccgcggcagccaagacctcgtccccgacggtggcgccggaggccgcggccgtgacccggcccgcgagctggtccgtcgacagctggaggaagaagaaggcgctgcagctgcccgagtaccccaacaaggaggagctcgacgcggtcctcaagacgatcgagaccttcccgcccatcgtgttcgccggggaggcgcgccacctcgaggaccgcctcgccgaggccgccatgggccgcgccttcgtcctccagggcggcgactgcgccgagagcttcaaggagttcaacgccaacaacatccgtgacaccttccgcgtgctcctccagatgggcgccgtcctcatgttcggcggccaggtccccgtcgtcaaggtgggacggatggctggccagttcgccaagcccaggtctgacaacttcgaagagaaggacggcgtcaagctgccgagttacaggggcgacaacgtcaacggcgacgccttcgacctcaagagccgcacgcctgaccccgacaggatgatcagggcctacgcccagtcggtggcgaccctcaacctgctccgcgcgttcgcgaccggaggctacgcagctatgcagcgggtcatccagtggaacctggatttcatggatcacaacgagcagggagacaggtaccgtgagttggcgcatagggtggacgaggctcttggcttcatgacagcagctgggctggggatggaccatccgataatgacgactactgacttctggacatcccacgagtgtctcctcttgccatatgagcaggctcttacccgtgaggactccacaagtggccttttctacgactgctcggcccatatggtgtgggttggtgagcgtactcgtcaactcgacggggctcatgttgaatttctccgtggtattgccaaccctcttggcattaaggtgagtgacaagatgaaccctgctgaattggtgaagctgattgacattttgaacccttcaaacaagccgggaaggatcaccatcattacaaggatgggagctgagaacatgagggtgaagttgcctcatctcatccgtgctgtccgcaattctggacagattgtcacatggattactgaccccatgcacggaaacaccatcaaggccccatgtggtctgaagactcgtccatttgactctattatgaatgaggtgcgtgcattcttcgatgtgcacgaccaagaaggaagccacccaggaggcatccaccttgaaatgactggacagaatgtgaccgagtgcatcggtggatcacggaccgtgaccttcgatgacctgggtgaccgctaccacacccactgcgacccaaggctgaacgcgtcacagtctctggagctcgctttcatcatcgccgagagactcaggaagaggaggatgaagtcaggactcaccaacaacctgccactgcccccattggctttctaagcaggaagcaccagggaggaggggttagatagttggcatttgcaagcggtaaccaaatgcgcattccattgagtttgtatggtggctgctctttgcacaagctgtgtgcttatgaggtgttggtacttgtcgaggacagcaggggggtagcgtactcgtggtgttgcactatgttttgtttctttgttttatttttgagtgtttgatctgtttgagcctttgtgatccgagaaaataaaaataatatgagttacctttgttaattag

SEQ ID NO: 16417 - protein, 534 aa, Triticum aestivum
  peptide (1)..(534): Ceres Seq. ID no. 15169471
  misc_feature (75)..(511): Pfam Name: Pfam Description:  Class-II DAHP synthetase family
  misc_feature (1)..(534): NCBI GI NO: 34906844 NR Description: putative phospho-2-dehydro-3-deoxyheptonatealdolase 1
  misc_feature (34)..(521): NCBI GI NO: 584777 NR Description: Phospho-2-dehydro-3-deoxyheptonate aldolase 1
  misc_feature (34)..(521): NCBI GI NO: 24745903 NR Description: 3-deoxy-D-arabino-heptulosonate 7-phosphatesynthase
  misc_feature (34)..(521): NCBI GI NO: 7488957 NR Description: probable 2-dehydro-3-deoxy-phosphoheptonatealdolase
  misc_feature (34)..(524): NCBI GI NO: 584778 NR Description: Phospho-2-dehydro-3-deoxyheptonate aldolase 2
  misc_feature (34)..(521): NCBI GI NO: 114193 NR Description: Phospho-2-dehydro-3-deoxyheptonate aldolase 1
  misc_feature (34)..(521): NCBI GI NO: 2398679 NR Description: 3-deoxy-D-arabino-heptulosonate 7-phosphatesynthase
  misc_feature (28)..(521): NCBI GI NO: 2546988 NR Description: 2-dehydro-3-deoxyphosphoheptonate aldolase
  misc_feature (1)..(521): NCBI GI NO: 15219878 NR Description: 2-dehydro-3-deoxyphosphoheptonate aldolase
  misc_feature (75)..(518): NCBI GI NO: 23472110 NR Description: hypothetical protein
MALATNTAAAAAALTGSAAQPRRAGFLPLKRRTISAVHAADPARSGASVPAAAAAKTSSPTVAPEAAAVTRPASWSVDSWRKKKALQLPEYPNKEELDAVLKTIETFPPIVFAGEARHLEDRLAEAAMGRAFVLQGGDCAESFKEFNANNIRDTFRVLLQMGAVLMFGGQVPVVKVGRMAGQFAKPRSDNFEEKDGVKLPSYRGDNVNGDAFDLKSRTPDPDRMIRAYAQSVATLNLLRAFATGGYAAMQRVIQWNLDFMDHNEQGDRYRELAHRVDEALGFMTAAGLGMDHPIMTTTDFWTSHECLLLPYEQALTREDSTSGLFYDCSAHMVWVGERTRQLDGAHVEFLRGIANPLGIKVSDKMNPAELVKLIDILNPSNKPGRITIITRMGAENMRVKLPHLIRAVRNSGQIVTWITDPMHGNTIKAPCGLKTRPFDSIMNEVRAFFDVHDQEGSHPGGIHLEMTGQNVTECIGGSRTVTFDDLGDRYHTHCDPRLNASQSLELAFIIAERLRKRRMKSGLTNNLPLPPLAF

SEQ ID NO: 16418 - protein, 407 aa, Triticum aestivum
  peptide (1)..(407): Ceres Seq. ID no. 15169472
  misc_feature (1)..(384): Pfam Name: Pfam Description:  Class-II DAHP synthetase family
  misc_feature (1)..(407): NCBI GI NO: 34906844 NR Description: putative phospho-2-dehydro-3-deoxyheptonatealdolase 1
  misc_feature (1)..(394): NCBI GI NO: 584777 NR Description: Phospho-2-dehydro-3-deoxyheptonate aldolase 1
  misc_feature (1)..(394): NCBI GI NO: 24745903 NR Description: 3-deoxy-D-arabino-heptulosonate 7-phosphatesynthase
  misc_feature (1)..(394): NCBI GI NO: 7488957 NR Description: probable 2-dehydro-3-deoxy-phosphoheptonatealdolase
  misc_feature (1)..(397): NCBI GI NO: 584778 NR Description: Phospho-2-dehydro-3-deoxyheptonate aldolase 2
  misc_feature (1)..(394): NCBI GI NO: 114193 NR Description: Phospho-2-dehydro-3-deoxyheptonate aldolase 1
  misc_feature (1)..(394): NCBI GI NO: 2398679 NR Description: 3-deoxy-D-arabino-heptulosonate 7-phosphatesynthase
  misc_feature (1)..(394): NCBI GI NO: 2546988 NR Description: 2-dehydro-3-deoxyphosphoheptonate aldolase
  misc_feature (1)..(394): NCBI GI NO: 15219878 NR Description: 2-dehydro-3-deoxyphosphoheptonate aldolase
  misc_feature (1)..(391): NCBI GI NO: 23472110 NR Description: hypothetical protein
MGRAFVLQGGDCAESFKEFNANNIRDTFRVLLQMGAVLMFGGQVPVVKVGRMAGQFAKPRSDNFEEKDGVKLPSYRGDNVNGDAFDLKSRTPDPDRMIRAYAQSVATLNLLRAFATGGYAAMQRVIQWNLDFMDHNEQGDRYRELAHRVDEALGFMTAAGLGMDHPIMTTTDFWTSHECLLLPYEQALTREDSTSGLFYDCSAHMVWVGERTRQLDGAHVEFLRGIANPLGIKVSDKMNPAELVKLIDILNPSNKPGRITIITRMGAENMRVKLPHLIRAVRNSGQIVTWITDPMHGNTIKAPCGLKTRPFDSIMNEVRAFFDVHDQEGSHPGGIHLEMTGQNVTECIGGSRTVTFDDLGDRYHTHCDPRLNASQSLELAFIIAERLRKRRMKSGLTNNLPLPPLAF

SEQ ID NO: 16419 - protein, 374 aa, Triticum aestivum
  peptide (1)..(374): Ceres Seq. ID no. 15169473
  misc_feature (1)..(351): Pfam Name: Pfam Description:  Class-II DAHP synthetase family
  misc_feature (1)..(374): NCBI GI NO: 34906844 NR Description: putative phospho-2-dehydro-3-deoxyheptonatealdolase 1
  misc_feature (1)..(361): NCBI GI NO: 584777 NR Description: Phospho-2-dehydro-3-deoxyheptonate aldolase 1
  misc_feature (1)..(361): NCBI GI NO: 24745903 NR Description: 3-deoxy-D-arabino-heptulosonate 7-phosphatesynthase
  misc_feature (1)..(361): NCBI GI NO: 7488957 NR Description: probable 2-dehydro-3-deoxy-phosphoheptonatealdolase
  misc_feature (1)..(364): NCBI GI NO: 584778 NR Description: Phospho-2-dehydro-3-deoxyheptonate aldolase 2
  misc_feature (1)..(361): NCBI GI NO: 114193 NR Description: Phospho-2-dehydro-3-deoxyheptonate aldolase 1
  misc_feature (1)..(361): NCBI GI NO: 2398679 NR Description: 3-deoxy-D-arabino-heptulosonate 7-phosphatesynthase
  misc_feature (1)..(361): NCBI GI NO: 2546988 NR Description: 2-dehydro-3-deoxyphosphoheptonate aldolase
  misc_feature (1)..(361): NCBI GI NO: 15219878 NR Description: 2-dehydro-3-deoxyphosphoheptonate aldolase
  misc_feature (1)..(358): NCBI GI NO: 23472110 NR Description: hypothetical protein
MGAVLMFGGQVPVVKVGRMAGQFAKPRSDNFEEKDGVKLPSYRGDNVNGDAFDLKSRTPDPDRMIRAYAQSVATLNLLRAFATGGYAAMQRVIQWNLDFMDHNEQGDRYRELAHRVDEALGFMTAAGLGMDHPIMTTTDFWTSHECLLLPYEQALTREDSTSGLFYDCSAHMVWVGERTRQLDGAHVEFLRGIANPLGIKVSDKMNPAELVKLIDILNPSNKPGRITIITRMGAENMRVKLPHLIRAVRNSGQIVTWITDPMHGNTIKAPCGLKTRPFDSIMNEVRAFFDVHDQEGSHPGGIHLEMTGQNVTECIGGSRTVTFDDLGDRYHTHCDPRLNASQSLELAFIIAERLRKRRMKSGLTNNLPLPPLAF

SEQ ID NO: 16420 - DNA, 1034 bp, Triticum aestivum
  misc_feature (1)..(1034): Ceres Seq. ID no. 12620250
ttccttcccaagaaaccctagatcaagtgctgccgcctccctctccccgatccagatccctcctccgacgcccctcctcccccatccccggccatcccccttccatcacccttaatgtcccagtcgccgctctctctctctctctccctctcggttcagtgagatgggatccactcccgcagccaccgccccaccctcacactcaccatcgacgacccccgccgccatcgcacaccatagcgccatcccctcaccctagccccaggtcaggcagtgcgaggcggcgctcctagacccgcgatggccgtctgggtcatcgccttcgaggacgacgagtacgccgacccggcagtcatcatcgcctccgagacggacgcgtgttggcggcacatggggcccacatcatcatggccgtgcgcaacctcgccgcggcagaggccgtgcgccaggtcgtccttgccgagacccccgtcgccagcctcaacctgatagagctggacctctccccactgacctccatccgcaacttcgccgccaacttcgccgacaggggcctaccgctgaacatcctcatgacaattcaacatacccctgccctttcggagagggaaggtttcccactcatggacacctagctgaatgcctgaacctgaacctcgtttttcttcttcttcttcttcttcttcttcttcttcttggtaattccttgttgattccttctgggcatgctatattattgggtgcaacaacaaattattgtccttgttttgatttccttcctgtcaagttcatcctttagtgctagtactagtggtacatcagtttgatttaggaaaaacaccagcctctgcttaacattaaatctagtcaagcaattgatgcacaacatatttgtttttgtacaacaacaatccgttaaacgatctggcctgtatacacatgttgaggaagagagagaggatatatacttgttctgttgcttctatatacatgtatatacgtttagtttttcaacatgcttcaacatttttttt

SEQ ID NO: 16421 - protein, 96 aa, Triticum aestivum
  peptide (1)..(96): Ceres Seq. ID no. 12620251
  misc_feature (11)..(85): Pfam Name: Pfam Description:  Extensin-like region
PSQETLDQVLPPPSPRSRSLLRRPSSPIPGHPPSITLNVPVAALSLSLPLGSVRWDPLPQPPPHPHTHHRRPPPPSHTIAPSPHPSPRSGSARRRS

SEQ ID NO: 16422 - protein, 75 aa, Triticum aestivum
  peptide (1)..(75): Ceres Seq. ID no. 12620252
  misc_feature (1)..(56): NCBI GI NO: 24762219 NR Description: unknown protein [Arabidopsis thaliana]
  misc_feature (1)..(56): NCBI GI NO: 34895876 NR Description: P0009G03.18
  misc_feature (1)..(56): NCBI GI NO: 23297050 NR Description: unknown protein [Arabidopsis thaliana]
  misc_feature (1)..(56): NCBI GI NO: 7485551 NR Description: hypothetical protein F16G20
  misc_feature (1)..(56): NCBI GI NO: 15233359 NR Description: putative protein; protein id: At4g11410.1
  misc_feature (1)..(56): NCBI GI NO: 18416145 NR Description: putative protein; protein id: At4g23430
  misc_feature (1)..(56): NCBI GI NO: 30686197 NR Description: short-chain dehydrogenase/reductase family protein
  misc_feature (1)..(56): NCBI GI NO: 37536620 NR Description: putative WW-domain oxidoreductase
  misc_feature (1)..(56): NCBI GI NO: 37536622 NR Description: putative WW-domain oxidoreductase
  misc_feature (1)..(66): NCBI GI NO: 15233666 NR Description: putative protein; protein id: At4g24050
MAVRNLAAAEAVRQVVLAETPVASLNLIELDLSPLTSIRNFAANFADRGLPLNILMTIQHTPALSEREGFPLMDT

SEQ ID NO: 16423 - protein, 62 aa, Triticum aestivum
  peptide (1)..(62): Ceres Seq. ID no. 12620253
  misc_feature (38)..(62): NCBI GI NO: 20138131 NR Description: Vegetative cell wall protein gp1 precursor
MAVWVIAFEDDEYADPAVIIASETDACWRHMGPTSSWPCATSPRQRPCARSSLPRPPSPAST

SEQ ID NO: 16424 - DNA, 1021 bp, Triticum aestivum
  misc_feature (1)..(1021): Ceres Seq. ID no. 15224319
accgaagcccaacccgaaacaccacttctcccccaaagccgccgagcttgcctgcgcgcacacaatcgagcaacccagcacctccgccgcccgggaagcccaaaccaaaccctaagcctccgcgaccggccgccggcgatggcccgctacgaccgcgcgatcaccgtcttctcccccgacggccacctcttccaggtcgagtacgccctcgaggccgtccgcaagggcaacgccgccgtcggcgtccgcggcaccgacaccgtcgtcctcggcgtcgagaagaagtccacccccaagctccaggactccaggtccgtgcgcaagatcgcgagcctggacacgcacgtcgcgctggcgtgcgcggggctcaaggcggacgcgcgggtgctcatcaaccgcgcccgcgtcgagtgccagagccaccgcctcaccgtcgaggaccccgtcaccgtcgagtacatcacccgctacatcgccggcctgcagcagaagtacacccagagcggcggggtacgccccttcggcctctccaccctcatcgtcggcttcgatccatacacggacaagcccgccctgtaccagaccgacccctccggcaccttctccgcctggaaggccaacgccaccgggaggaactccaactccatgcgggagttcctggagaagaactacaaggacacatccggcaaggagaccatcaagctcaccatccgagcccttctagaggttgttgagagtggtgggaagaacatcgagattgcagtgatgacaaagaaggatggccttcggcaactcgaggagactgaaattgatgaatatgttgccgagattgaggcagagaaggccgcggctgaggctgcaaagaagagcggcccgaaggatacctaattactgggtgtgctatatcttcattctgtcggccgaaaccttttagtgtgtcactgttacgttccataactttctttaaactgctttaacaagatattgaagtcattcgtaaatgaattgccttgttttcttg

SEQ ID NO: 16425 - protein, 295 aa, Triticum aestivum
  peptide (1)..(295): Ceres Seq. ID no. 15224320
  misc_feature (73)..(256): Pfam Name: Pfam Description:  Proteasome A-type and B-type
  misc_feature (47)..(295): NCBI GI NO: 7435885 NR Description: probable C 3
  misc_feature (47)..(295): NCBI GI NO: 12644044 NR Description: Proteasome subunit alpha type 7
  misc_feature (47)..(295): NCBI GI NO: 12229936 NR Description: Proteasome subunit alpha type 7
  misc_feature (47)..(295): NCBI GI NO: 15239271 NR Description: 20S proteasome alpha subunit D2 (PAD2)
  misc_feature (47)..(289): NCBI GI NO: 3334299 NR Description: Proteasome subunit alpha type 7
  misc_feature (47)..(295): NCBI GI NO: 15230435 NR Description: 20S proteasome alpha subunit D (PAD1)
  misc_feature (47)..(295): NCBI GI NO: 21593040 NR Description: multicatalytic endopeptidase complex  alpha chain
  misc_feature (47)..(280): NCBI GI NO: 2511580 NR Description: multicatalytic endopeptidase
  misc_feature (81)..(295): NCBI GI NO: 14594917 NR Description: putative alpha4 proteasome subunit
  misc_feature (48)..(295): NCBI GI NO: 12229928 NR Description: Proteasome subunit alpha type 7
TEAQPETPLLPQSRRACLRAHNRATQHLRRPGSPNQTLSLRDRPPAMARYDRAITVFSPDGHLFQVEYALEAVRKGNAAVGVRGTDTVVLGVEKKSTPKLQDSRSVRKIASLDTHVALACAGLKADARVLINRARVECQSHRLTVEDPVTVEYITRYIAGLQQKYTQSGGVRPFGLSTLIVGFDPYTDKPALYQTDPSGTFSAWKANATGRNSNSMREFLEKNYKDTSGKETIKLTIRALLEVVESGGKNIEIAVMTKKDGLRQLEETEIDEYVAEIEAEKAAAEAAKKSGPKDT

SEQ ID NO: 16426 - protein, 249 aa, Triticum aestivum
  peptide (1)..(249): Ceres Seq. ID no. 15224321
  misc_feature (27)..(210): Pfam Name: Pfam Description:  Proteasome A-type and B-type
  misc_feature (1)..(249): NCBI GI NO: 7435885 NR Description: probable C 3
  misc_feature (1)..(249): NCBI GI NO: 12644044 NR Description: Proteasome subunit alpha type 7
  misc_feature (1)..(249): NCBI GI NO: 12229936 NR Description: Proteasome subunit alpha type 7
  misc_feature (1)..(249): NCBI GI NO: 15239271 NR Description: 20S proteasome alpha subunit D2 (PAD2)
  misc_feature (1)..(243): NCBI GI NO: 3334299 NR Description: Proteasome subunit alpha type 7
  misc_feature (1)..(249): NCBI GI NO: 15230435 NR Description: 20S proteasome alpha subunit D (PAD1)
  misc_feature (1)..(249): NCBI GI NO: 21593040 NR Description: multicatalytic endopeptidase complex  alpha chain
  misc_feature (1)..(234): NCBI GI NO: 2511580 NR Description: multicatalytic endopeptidase
  misc_feature (35)..(249): NCBI GI NO: 14594917 NR Description: putative alpha4 proteasome subunit
  misc_feature (2)..(249): NCBI GI NO: 12229928 NR Description: Proteasome subunit alpha type 7
MARYDRAITVFSPDGHLFQVEYALEAVRKGNAAVGVRGTDTVVLGVEKKSTPKLQDSRSVRKIASLDTHVALACAGLKADARVLINRARVECQSHRLTVEDPVTVEYITRYIAGLQQKYTQSGGVRPFGLSTLIVGFDPYTDKPALYQTDPSGTFSAWKANATGRNSNSMREFLEKNYKDTSGKETIKLTIRALLEVVESGGKNIEIAVMTKKDGLRQLEETEIDEYVAEIEAEKAAAEAAKKSGPKDT

SEQ ID NO: 16427 - protein, 243 aa, Triticum aestivum
  peptide (1)..(243): Ceres Seq. ID no. 15224322
  misc_feature (7)..(117): Pfam Name: rhodopsin family Pfam Description: 7 transmembrane receptor
  misc_feature (2)..(40): NCBI GI NO: 188864 NR Description: mucin
  misc_feature (1)..(69): NCBI GI NO: 7446482 NR Description: probable cell wall-plasma membrane linker proteinPRP precursor - rape
  misc_feature (2)..(39): NCBI GI NO: 22970264 NR Description: hypothetical protein [Chloroflexus aurantiacus]
  misc_feature (3)..(64): NCBI GI NO: 5305335 NR Description: proline-rich mucin homolog
  misc_feature (2)..(69): NCBI GI NO: 5305335 NR Description: proline-rich mucin homolog
  misc_feature (9)..(64): NCBI GI NO: 5305335 NR Description: proline-rich mucin homolog
  misc_feature (10)..(65): NCBI GI NO: 5305335 NR Description: proline-rich mucin homolog
RSPTRNTTSPPKPPSLPARTQSSNPAPPPPGKPKPNPKPPRPAAGDGPLRPRDHRLLPRRPPLPGRVRPRGRPQGQRRRRRPRHRHRRPRRREEVHPQAPGLQVRAQDREPGHARRAGVRGAQGGRAGAHQPRPRRVPEPPPHRRGPRHRRVHHPLHRRPAAEVHPERRGTPLRPLHPHRRLRSIHGQARPVPDRPLRHLLRLEGQRHREELQLHAGVPGEELQGHIRQGDHQAHHPSPSRGC

SEQ ID NO: 16428 - DNA, 893 bp, Triticum aestivum
  misc_feature (1)..(893): Ceres Seq. ID no. 12619664
ctgacactagctatctcctacccacctatcccccgtccgtccgcccgtctaggtctctggagaagcggcgatggcggcgcccgtgacggtgtacgggccggcgatctcgccggcggtggcgcgcgtggcggcgtgcctgctggagaaggacgtgccgttccagctcgaggcggtggacatgtccaagggcgagcacaagtccccctccttcctcaagctccagcccttcggccaggtccccgccttcaaagaccacctcaccaccgtcttcgagtcaagggccatttgccgttacatctgtgaccagtactccgaccgtggcaaccagactctcctaggccggaaagaagacggcgcggtaggccgcgctgccatcgagcaatgggtagagtccgaaggccaagcatttaacccgccgagcttggccatcgcattccagctcaccttcgcgcctctcatgggcatggccaccgacatggccgtggtggagcagaatgaggcgaagctcgccaaggtgctcgacgtgtatgagcggcggctggcggagagccagtatttcgccggcgacgagttcacccttgccgaccttgtgcacatgcccaacactgatctcctcgtgagcaaggccggcaaggcgggtctgatcaccgagagaaagaatctgtccagatggtgggatgaggtctcggctcgtccgtcatggaagaaggttgtcgagttgcagagtgtaccacggccctctaaagcttgagggccccttcagtttttttagccgagcagcttctggtggcaattagtcacattctgttatgtgttgccatcactcctaaatgttattgtgttgtgaaagactcgggctgctttgtacaatatgttatcctgctatctatcgc

SEQ ID NO: 16429 - protein, 226 aa, Triticum aestivum
  peptide (1)..(226): Ceres Seq. ID no. 12619665
  misc_feature (1)..(224): NCBI GI NO: 22758267 NR Description: Putative glutathione S-transferase
  misc_feature (1)..(224): NCBI GI NO: 11177845 NR Description: putative glutathione S-transferase OsGSTF3
  misc_feature (1)..(169): NCBI GI NO: 11385471 NR Description: glutathione S-transferase GST 10 [Zea mays]
  misc_feature (7)..(221): NCBI GI NO: 21217741 NR Description: putative glutathione S-transferase
  misc_feature (8)..(221): NCBI GI NO: 11385459 NR Description: glutathione S-transferase GST 22 [Glycine max]
  misc_feature (1)..(219): NCBI GI NO: 22758269 NR Description: Putative glutathione S-transferase
  misc_feature (5)..(217): NCBI GI NO: 15228488 NR Description: glutathione transferase, putative
  misc_feature (1)..(218): NCBI GI NO: 11385469 NR Description: glutathione S-transferase GST 9 [Zea mays]
  misc_feature (5)..(221): NCBI GI NO: 11385463 NR Description: glutathione S-transferase GST 24 [Glycine max]
  misc_feature (1)..(225): NCBI GI NO: 11385483 NR Description: glutathione S-transferase GST 16 [Zea mays]
MAAPVTVYGPAISPAVARVAACLLEKDVPFQLEAVDMSKGEHKSPSFLKLQPFGQVPAFKDHLTTVFESRAICRYICDQYSDRGNQTLLGRKEDGAVGRAAIEQWVESEGQAFNPPSLAIAFQLTFAPLMGMATDMAVVEQNEAKLAKVLDVYERRLAESQYFAGDEFTLADLVHMPNTDLLVSKAGKAGLITERKNLSRWWDEVSARPSWKKVVELQSVPRPSKA

SEQ ID NO: 16430 - protein, 190 aa, Triticum aestivum
  peptide (1)..(190): Ceres Seq. ID no. 12619666
  misc_feature (1)..(188): NCBI GI NO: 22758267 NR Description: Putative glutathione S-transferase
  misc_feature (1)..(188): NCBI GI NO: 11177845 NR Description: putative glutathione S-transferase OsGSTF3
  misc_feature (1)..(133): NCBI GI NO: 11385471 NR Description: glutathione S-transferase GST 10 [Zea mays]
  misc_feature (1)..(185): NCBI GI NO: 21217741 NR Description: putative glutathione S-transferase
  misc_feature (1)..(185): NCBI GI NO: 11385459 NR Description: glutathione S-transferase GST 22 [Glycine max]
  misc_feature (1)..(183): NCBI GI NO: 22758269 NR Description: Putative glutathione S-transferase
  misc_feature (1)..(181): NCBI GI NO: 15228488 NR Description: glutathione transferase, putative
  misc_feature (1)..(182): NCBI GI NO: 11385469 NR Description: glutathione S-transferase GST 9 [Zea mays]
  misc_feature (1)..(185): NCBI GI NO: 11385463 NR Description: glutathione S-transferase GST 24 [Glycine max]
  misc_feature (1)..(189): NCBI GI NO: 11385483 NR Description: glutathione S-transferase GST 16 [Zea mays]
MSKGEHKSPSFLKLQPFGQVPAFKDHLTTVFESRAICRYICDQYSDRGNQTLLGRKEDGAVGRAAIEQWVESEGQAFNPPSLAIAFQLTFAPLMGMATDMAVVEQNEAKLAKVLDVYERRLAESQYFAGDEFTLADLVHMPNTDLLVSKAGKAGLITERKNLSRWWDEVSARPSWKKVVELQSVPRPSKA

SEQ ID NO: 16431 - DNA, 1581 bp, Triticum aestivum
  misc_feature (1)..(1581): Ceres Seq. ID no. 13657915
aaaaatccgacaatccatggggcgtagagaagacgagagaatcccgtactttcacgccaaggcaagcaaccggccgcccgcccgccgccatcaccaccgtcctccccacggtactccggttccaagttccgtatccggccctgcatggcctaaatcaccatccctccacgcctctgcttagtgagctcttgcttgccgtacatacatgccgatgagctcctcgccggcggtcgcggtcgcggtcgcgtctgcggccgtggtagcgctggctgtcgctaaccgcgtgctctataagctcgcgctggtgcccctcaagtcctatcccttcctcctcgctcagctcaccacgttcgggtacgtcacggtgtacttttcaatactctatgcgaggtaccgcgcgggggtggtgacgcgggacatgctgacactgccgaagatccggttcgctgtcatcggcttgctagaggctcttggggtcgccgctggaatgtctgcgggagctatgctgcctggccctgctattcctatactgtctcagtctttcctggtgtggcagcttatcttctctgtgttgcttttgggaaagacctactctctgagacaaatcattggttgcttgcttgtaacttctggtgtgattcttgctgttgcgagtggggcaaatgatggtcatcttctatctggagtcaagttaatttggccattgctgatggttgtttcatcggcattccaagctggtgcatccattttgaaggggaaacggcctgacatcttcgtggttaattcattcggatctgggtttcaggctcttgttgtcttccttcttctcccattactttctaatttgagggggattaagcttgctgagctttctggccatttaaatggtggtgctgagtgcttcttaaatgttggggagagcccaattgattgtggaggtgctccattcctaccattgctttttatattcgtaaacatggctttcaacatctcgttgcttaatttggtaaagatgtcgtctgccgtggttgcttcacttacagcaacttccgccgtgccaatatcaatctacatcctttctcttcctttgccctacatccctcaaggcgcggaattaagcgcttcttttatcttcggtggcattgtattgttgatgggcctaattctgtataaccttccccaatcatctaaagagtcaaagactgactaaaagcttatggcgattgagtgtatattaccacttcaaccgaaaatcaattattggtttggtcctgaagctaatattaggtttctagattggtgacgccagagtcgataaggactgtttgttgggatgcatgaatgcttggtatttctaatwtktgtcagagaatagkactastagtaaaaaaaaaaaaaaaaaaaaaaaaaaaaaaaaaaaaaaaaaaaaaaaaaaaaaaaaaaaaaaaaaaaaaaaaaaaaaaaaaaaaaaaaaaaaaaaaaaaaaaaaaaaaaaaamcccccaaaaaaaaaaaaaaaattttttttttcccccccccccccgggggggggsssssssccccctyyyccccwwaggggggg

SEQ ID NO: 16432 - protein, 334 aa, Triticum aestivum
  peptide (1)..(334): Ceres Seq. ID no. 15219893
  misc_feature (11)..(333): NCBI GI NO: 30686536 NR Description: expressed protein [Arabidopsis thaliana]
  misc_feature (11)..(331): NCBI GI NO: 21553716 NR Description: unknown [Arabidopsis thaliana]
  misc_feature (11)..(331): NCBI GI NO: 18419900 NR Description: expressed protein [Arabidopsis thaliana]
  misc_feature (11)..(334): NCBI GI NO: 20260240 NR Description: unknown protein [Arabidopsis thaliana]
  misc_feature (11)..(334): NCBI GI NO: 21536591 NR Description: unknown [Arabidopsis thaliana]
  misc_feature (11)..(285): NCBI GI NO: 7487326 NR Description: hypothetical protein T22A6
  misc_feature (11)..(149): NCBI GI NO: 28973717 NR Description: unknown protein [Arabidopsis thaliana]
  misc_feature (72)..(334): NCBI GI NO: 15239887 NR Description: expressed protein [Arabidopsis thaliana]
  misc_feature (6)..(99): NCBI GI NO: 20161872 NR Description: B1139B11.13
  misc_feature (5)..(236): NCBI GI NO: 11139714 NR Description: putative transporter protein SSA662
MPMSSSPAVAVAVASAAVVALAVANRVLYKLALVPLKSYPFLLAQLTTFGYVTVYFSILYARYRAGVVTRDMLTLPKIRFAVIGLLEALGVAAGMSAGAMLPGPAIPILSQSFLVWQLIFSVLLLGKTYSLRQIIGCLLVTSGVILAVASGANDGHLLSGVKLIWPLLMVVSSAFQAGASILKGKRPDIFVVNSFGSGFQALVVFLLLPLLSNLRGIKLAELSGHLNGGAECFLNVGESPIDCGGAPFLPLLFIFVNMAFNISLLNLVKMSSAVVASLTATSAVPISIYILSLPLPYIPQGAELSASFIFGGIVLLMGLILYNLPQSSKESKTD

SEQ ID NO: 16433 - protein, 332 aa, Triticum aestivum
  peptide (1)..(332): Ceres Seq. ID no. 15219894
  misc_feature (9)..(331): NCBI GI NO: 30686536 NR Description: expressed protein [Arabidopsis thaliana]
  misc_feature (9)..(329): NCBI GI NO: 21553716 NR Description: unknown [Arabidopsis thaliana]
  misc_feature (9)..(329): NCBI GI NO: 18419900 NR Description: expressed protein [Arabidopsis thaliana]
  misc_feature (9)..(332): NCBI GI NO: 20260240 NR Description: unknown protein [Arabidopsis thaliana]
  misc_feature (9)..(332): NCBI GI NO: 21536591 NR Description: unknown [Arabidopsis thaliana]
  misc_feature (9)..(283): NCBI GI NO: 7487326 NR Description: hypothetical protein T22A6
  misc_feature (9)..(147): NCBI GI NO: 28973717 NR Description: unknown protein [Arabidopsis thaliana]
  misc_feature (70)..(332): NCBI GI NO: 15239887 NR Description: expressed protein [Arabidopsis thaliana]
  misc_feature (4)..(97): NCBI GI NO: 20161872 NR Description: B1139B11.13
  misc_feature (3)..(234): NCBI GI NO: 11139714 NR Description: putative transporter protein SSA662
MSSSPAVAVAVASAAVVALAVANRVLYKLALVPLKSYPFLLAQLTTFGYVTVYFSILYARYRAGVVTRDMLTLPKIRFAVIGLLEALGVAAGMSAGAMLPGPAIPILSQSFLVWQLIFSVLLLGKTYSLRQIIGCLLVTSGVILAVASGANDGHLLSGVKLIWPLLMVVSSAFQAGASILKGKRPDIFVVNSFGSGFQALVVFLLLPLLSNLRGIKLAELSGHLNGGAECFLNVGESPIDCGGAPFLPLLFIFVNMAFNISLLNLVKMSSAVVASLTATSAVPISIYILSLPLPYIPQGAELSASFIFGGIVLLMGLILYNLPQSSKESKTD

SEQ ID NO: 16434 - protein, 263 aa, Triticum aestivum
  peptide (1)..(263): Ceres Seq. ID no. 15219895
  misc_feature (1)..(262): NCBI GI NO: 30686536 NR Description: expressed protein [Arabidopsis thaliana]
  misc_feature (1)..(260): NCBI GI NO: 21553716 NR Description: unknown [Arabidopsis thaliana]
  misc_feature (1)..(260): NCBI GI NO: 18419900 NR Description: expressed protein [Arabidopsis thaliana]
  misc_feature (1)..(263): NCBI GI NO: 20260240 NR Description: unknown protein [Arabidopsis thaliana]
  misc_feature (1)..(263): NCBI GI NO: 21536591 NR Description: unknown [Arabidopsis thaliana]
  misc_feature (1)..(214): NCBI GI NO: 7487326 NR Description: hypothetical protein T22A6
  misc_feature (1)..(78): NCBI GI NO: 28973717 NR Description: unknown protein [Arabidopsis thaliana]
  misc_feature (1)..(263): NCBI GI NO: 15239887 NR Description: expressed protein [Arabidopsis thaliana]
  misc_feature (1)..(28): NCBI GI NO: 20161872 NR Description: B1139B11.13
  misc_feature (1)..(165): NCBI GI NO: 11139714 NR Description: putative transporter protein SSA662
MLTLPKIRFAVIGLLEALGVAAGMSAGAMLPGPAIPILSQSFLVWQLIFSVLLLGKTYSLRQIIGCLLVTSGVILAVASGANDGHLLSGVKLIWPLLMVVSSAFQAGASILKGKRPDIFVVNSFGSGFQALVVFLLLPLLSNLRGIKLAELSGHLNGGAECFLNVGESPIDCGGAPFLPLLFIFVNMAFNISLLNLVKMSSAVVASLTATSAVPISIYILSLPLPYIPQGAELSASFIFGGIVLLMGLILYNLPQSSKESKTD

SEQ ID NO: 16435 - DNA, 724 bp, Triticum aestivum
  misc_feature (1)..(724): Ceres Seq. ID no. 13657920
atgtccatcaaccatcaaggcaataatccacgtacggttgtgagcggttcaccagcaagatacatagaggttacagagaagccagcagcagcaagcaagattgagcattcacggatggtggccggggccgtggtgcaggcgtcatcggtgttcgccgccttcgacaaggacggcgacggcaaggtgtcggccgccgagctgcgcggctccatgatggcggcgctgggcgaggaggtttccgaggaggaggccgcggcgatcctggccacggtggacgccgacggcgacgggctgctggaccaggaggagttctcccggctcgggctcggcgccgccggagacaacggtggggcggccggagacgacgacgacgacgaggtgaggcggcggtgcctgaaggaggcgttcgccatgtacgcgacggggggcggcgaggagggcgccaggatcacgccggcgagcctgaggcggatgctgggcaagctgctggggtccgagaagatggggctggaggagtgcagggccatgatctgcaggtttgacctcaacggcgacggcgtcctctccttcgacgagttcagggtcatgatgatggccaatttgtaaaggaaggatggtttcatttcattcgttcgcttttctcttctgtatttttgacatgtggttgcagttgttcacatgatggacgtttcaattgtatgttgaggcttgggtgtgatgcttg

SEQ ID NO: 16436 - protein, 201 aa, Triticum aestivum
  peptide (1)..(201): Ceres Seq. ID no. 13657921
  misc_feature (172)..(199): Pfam Name: Pfam Description:  EF hand
  misc_feature (50)..(199): NCBI GI NO: 20161869 NR Description: B1139B11.10
  misc_feature (41)..(199): NCBI GI NO: 20161868 NR Description: B1139B11.9
  misc_feature (39)..(199): NCBI GI NO: 20161870 NR Description: B1139B11.11
  misc_feature (49)..(197): NCBI GI NO: 15223120 NR Description: calmodulin-related protein, putative
  misc_feature (44)..(197): NCBI GI NO: 15238951 NR Description: calmodulin-related protein, putative
  misc_feature (44)..(197): NCBI GI NO: 21618164 NR Description: putative calmodulin [Arabidopsis thaliana]
  misc_feature (122)..(197): NCBI GI NO: 15723363 NR Description: calmodulin-like protein [Musa acuminata]
  misc_feature (50)..(107): NCBI GI NO: 15723363 NR Description: calmodulin-like protein [Musa acuminata]
  misc_feature (50)..(197): NCBI GI NO: 19386815 NR Description: B1147A04.10
  misc_feature (38)..(197): NCBI GI NO: 15240340 NR Description: calmodulin-related protein 2, touch-induced (TCH2)
MSINHQGNNPRTVVSGSPARYIEVTEKPAAASKIEHSRMVAGAVVQASSVFAAFDKDGDGKVSAAELRGSMMAALGEEVSEEEAAAILATVDADGDGLLDQEEFSRLGLGAAGDNGGAAGDDDDDEVRRRCLKEAFAMYATGGGEEGARITPASLRRMLGKLLGSEKMGLEECRAMICRFDLNGDGVLSFDEFRVMMMANL

SEQ ID NO: 16437 - protein, 163 aa, Triticum aestivum
  peptide (1)..(163): Ceres Seq. ID no. 13657922
  misc_feature (134)..(161): Pfam Name: Pfam Description:  EF hand
  misc_feature (12)..(161): NCBI GI NO: 20161869 NR Description: B1139B11.10
  misc_feature (3)..(161): NCBI GI NO: 20161868 NR Description: B1139B11.9
  misc_feature (1)..(161): NCBI GI NO: 20161870 NR Description: B1139B11.11
  misc_feature (11)..(159): NCBI GI NO: 15223120 NR Description: calmodulin-related protein, putative
  misc_feature (6)..(159): NCBI GI NO: 15238951 NR Description: calmodulin-related protein, putative
  misc_feature (6)..(159): NCBI GI NO: 21618164 NR Description: putative calmodulin [Arabidopsis thaliana]
  misc_feature (84)..(159): NCBI GI NO: 15723363 NR Description: calmodulin-like protein [Musa acuminata]
  misc_feature (12)..(69): NCBI GI NO: 15723363 NR Description: calmodulin-like protein [Musa acuminata]
  misc_feature (12)..(159): NCBI GI NO: 19386815 NR Description: B1147A04.10
  misc_feature (1)..(159): NCBI GI NO: 15240340 NR Description: calmodulin-related protein 2, touch-induced (TCH2)
MVAGAVVQASSVFAAFDKDGDGKVSAAELRGSMMAALGEEVSEEEAAAILATVDADGDGLLDQEEFSRLGLGAAGDNGGAAGDDDDDEVRRRCLKEAFAMYATGGGEEGARITPASLRRMLGKLLGSEKMGLEECRAMICRFDLNGDGVLSFDEFRVMMMANL

SEQ ID NO: 16438 - protein, 131 aa, Triticum aestivum
  peptide (1)..(131): Ceres Seq. ID no. 13657923
  misc_feature (102)..(129): Pfam Name: Pfam Description:  EF hand
  misc_feature (1)..(129): NCBI GI NO: 20161869 NR Description: B1139B11.10
  misc_feature (1)..(129): NCBI GI NO: 20161868 NR Description: B1139B11.9
  misc_feature (1)..(129): NCBI GI NO: 20161870 NR Description: B1139B11.11
  misc_feature (1)..(127): NCBI GI NO: 15223120 NR Description: calmodulin-related protein, putative
  misc_feature (1)..(127): NCBI GI NO: 15238951 NR Description: calmodulin-related protein, putative
  misc_feature (1)..(127): NCBI GI NO: 21618164 NR Description: putative calmodulin [Arabidopsis thaliana]
  misc_feature (52)..(127): NCBI GI NO: 15723363 NR Description: calmodulin-like protein [Musa acuminata]
  misc_feature (1)..(37): NCBI GI NO: 15723363 NR Description: calmodulin-like protein [Musa acuminata]
  misc_feature (1)..(127): NCBI GI NO: 19386815 NR Description: B1147A04.10
  misc_feature (1)..(127): NCBI GI NO: 15240340 NR Description: calmodulin-related protein 2, touch-induced (TCH2)
MMAALGEEVSEEEAAAILATVDADGDGLLDQEEFSRLGLGAAGDNGGAAGDDDDDEVRRRCLKEAFAMYATGGGEEGARITPASLRRMLGKLLGSEKMGLEECRAMICRFDLNGDGVLSFDEFRVMMMANL

SEQ ID NO: 16439 - DNA, 810 bp, Triticum aestivum
  misc_feature (1)..(810): Ceres Seq. ID no. 13657924
catccccaactggcaacgtgccaccatcccgccctcaaccggcgaccggagacgccgccccgccccgccaccggccgccgccgttcccgccgcatcatcgaccgcgccgctgccgccccgccaccgaccgctgtcgccgccgcccaccatcgaccgccgttgccgccccgtccccaacaggagacgctgccgccgccggagacccgctacaccgcgccacctacggaggccctgttttctgtgccgtcgcgcctccaatggccaggatccgcgccgccacgcctccattggcctggatccgcaccgccgcgcaccgaaacagggcccgtccacctctgccgcaacagtctaccctcccgcagctgggggcgcgtgtgatggctgccatcggtggcagcgtgcccagatgcctccctcccccacggtgcagcaagctcgaggccgtcaccagactcccacctggtcgtggacatctcccctcctgccgctgcacgggctccaccatggacgcccccactcctccaccccccgagatttctgcacctacatacggccgtgatctgctgcccacccgtggttgcgtcgagcaacatcttgtgctccccaacgcgtgaggtgctgctgcctgctagtgctacaagcacgcgagttacgtaccctacctctctctcggatcagtgcaacaaggagcctcgtactttgatgatgaattagttgtacacgagcgtgttgtccatgagtacgttggtgcagatctcatgtgcttttgtatgcacgtgtgatgatgaattggttgagcattgcacccct

SEQ ID NO: 16440 - protein, 203 aa, Triticum aestivum
  peptide (1)..(203): Ceres Seq. ID no. 13657925
  misc_feature (2)..(176): NCBI GI NO: 15145793 NR Description: basic proline-rich protein [Sus scrofa]
SPTGNVPPSRPQPATGDAAPPRHRPPPFPPHHRPRRCRPATDRCRRRPPSTAVAAPSPTGDAAAAGDPLHRATYGGPVFCAVAPPMARIRAATPPLAWIRTAAHRNRARPPLPQQSTLPQLGARVMAAIGGSVPRCLPPPRCSKLEAVTRLPPGRGHLPSCRCTGSTMDAPTPPPPEISAPTYGRDLLPTRGCVEQHLVLPNA

SEQ ID NO: 16441 - protein, 185 aa, Triticum aestivum
  peptide (1)..(185): Ceres Seq. ID no. 13657926
IPNWQRATIPPSTGDRRRRPAPPPAAAVPAASSTAPLPPRHRPLSPPPTIDRRCRPVPNRRRCRRRRPATPRHLRRPCFLCRRASNGQDPRRHASIGLDPHRRAPKQGPSTSAATVYPPAAGGACDGCHRWQRAQMPPSPTVQQARGRHQTPTWSWTSPLLPLHGLHHGRPHSSTPRDFCTYIRP

SEQ ID NO: 16442 - protein, 125 aa, Triticum aestivum
  peptide (1)..(125): Ceres Seq. ID no. 13657927
HPQLATCHHPALNRRPETPPRPATGRRRSRRIIDRAAAAPPPTAVAAAHHRPPLPPRPQQETLPPPETRYTAPPTEALFSVPSRLQWPGSAPPRLHWPGSAPPRTETGPVHLCRNSLPSRSWGRV

SEQ ID NO: 16443 - protein, 118 aa, Triticum aestivum
  peptide (1)..(118): Ceres Seq. ID no. 13657928
  misc_feature (1)..(91): NCBI GI NO: 15145793 NR Description: basic proline-rich protein [Sus scrofa]
MARIRAATPPLAWIRTAAHRNRARPPLPQQSTLPQLGARVMAAIGGSVPRCLPPPRCSKLEAVTRLPPGRGHLPSCRCTGSTMDAPTPPPPEISAPTYGRDLLPTRGCVEQHLVLPNA

SEQ ID NO: 16444 - DNA, 818 bp, Triticum aestivum
  misc_feature (1)..(818): Ceres Seq. ID no. 15225989
cccctcccattccgcctcctgttgcttcgaactatggcagcagcagctgccggtgctgcatcggccgccgccgcgccagctacgcatcacgccgaccactccatgaacgccctccgctccaccgccttccgccgctccaccctccattgggacgccgccgcggccttcttttccccgcccttccgctctcgccgctgccaccgacgtgtcttgctccctcctgccgcggcgctgcccgcgaagtcccgctccagggccaaggctaagctcctggcggacgcgggggctgtggacccctggctcgcctccctctccctgctccccgccggcggcggcggctacggcggccagcgcggcggtggcggaggctacggcggcggcggcggctacggaggcggcggcggctacggcggtggtggcggctacggcggccagcgcggcggtggcggcggcgactccggcggccagtggaggaactgagcctcgaatctcccagttatcgatctatctaccgtgtcgtcgtcgtcgtcgtcgtcttcgtcagcaagttatcttcggtgtcgtcgtgttcctgtgtcagtctgagtcgtcgtgtgtgtggtgtttttgatcgcgagctcgagtgtcgctctgtccggggttaattagagctggttacgcgaggaagaaacaacatgtgttactatctttcagtcggtcggtcggtcggtcagtcggtgatgcagcaatccccttctgtcatggattgggatgtgatgttggaatatcctatgtttgaacaagtttaaatggatgaagaaaatgcaagtcatagctgc

SEQ ID NO: 16445 - protein, 159 aa, Triticum aestivum
  peptide (1)..(159): Ceres Seq. ID no. 15225990
  misc_feature (93)..(152): Pfam Name: Pfam Description:  Herpesvirus large structural phospho protein UL32
  misc_feature (14)..(112): NCBI GI NO: 34903152 NR Description: unnamed protein product
  misc_feature (110)..(159): NCBI GI NO: 7439981 NR Description: glycine-rich RNA-binding protein GRP1 - wheat
  misc_feature (110)..(155): NCBI GI NO: 7439981 NR Description: glycine-rich RNA-binding protein GRP1 - wheat
  misc_feature (110)..(159): NCBI GI NO: 82696 NR Description: glycine-rich protein - maize
  misc_feature (110)..(159): NCBI GI NO: 2331131 NR Description: glycine-rich protein [Oryza sativa]
  misc_feature (110)..(155): NCBI GI NO: 1076731 NR Description: RNA binding protein - barley
  misc_feature (110)..(159): NCBI GI NO: 1076731 NR Description: RNA binding protein - barley
  misc_feature (110)..(159): NCBI GI NO: 544423 NR Description: Glycine-rich RNA-binding protein 2
  misc_feature (110)..(159): NCBI GI NO: 7439972 NR Description: glycine-rich RNA binding protein - maize
  misc_feature (110)..(159): NCBI GI NO: 20257673 NR Description: glycine-rich RNA binding protein [Zea mays]
PLPFRLLLLRTMAAAAAGAASAAAAPATHHADHSMNALRSTAFRRSTLHWDAAAAFFSPPFRSRRCHRRVLLPPAAALPAKSRSRAKAKLLADAGAVDPWLASLSLLPAGGGGYGGQRGGGGGYGGGGGYGGGGGYGGGGGYGGQRGGGGGDSGGQWRN

SEQ ID NO: 16446 - protein, 148 aa, Triticum aestivum
  peptide (1)..(148): Ceres Seq. ID no. 15225991
  misc_feature (82)..(141): Pfam Name: Pfam Description:  Herpesvirus large structural phospho protein UL32
  misc_feature (3)..(101): NCBI GI NO: 34903152 NR Description: unnamed protein product
  misc_feature (99)..(148): NCBI GI NO: 7439981 NR Description: glycine-rich RNA-binding protein GRP1 - wheat
  misc_feature (99)..(144): NCBI GI NO: 7439981 NR Description: glycine-rich RNA-binding protein GRP1 - wheat
  misc_feature (99)..(148): NCBI GI NO: 82696 NR Description: glycine-rich protein - maize
  misc_feature (99)..(148): NCBI GI NO: 2331131 NR Description: glycine-rich protein [Oryza sativa]
  misc_feature (99)..(144): NCBI GI NO: 1076731 NR Description: RNA binding protein - barley
  misc_feature (99)..(148): NCBI GI NO: 1076731 NR Description: RNA binding protein - barley
  misc_feature (99)..(148): NCBI GI NO: 544423 NR Description: Glycine-rich RNA-binding protein 2
  misc_feature (99)..(148): NCBI GI NO: 7439972 NR Description: glycine-rich RNA binding protein - maize
  misc_feature (99)..(148): NCBI GI NO: 20257673 NR Description: glycine-rich RNA binding protein [Zea mays]
MAAAAAGAASAAAAPATHHADHSMNALRSTAFRRSTLHWDAAAAFFSPPFRSRRCHRRVLLPPAAALPAKSRSRAKAKLLADAGAVDPWLASLSLLPAGGGGYGGQRGGGGGYGGGGGYGGGGGYGGGGGYGGQRGGGGGDSGGQWRN

SEQ ID NO: 16447 - protein, 125 aa, Triticum aestivum
  peptide (1)..(125): Ceres Seq. ID no. 15225992
  misc_feature (59)..(118): Pfam Name: Pfam Description:  Herpesvirus large structural phospho protein UL32
  misc_feature (1)..(78): NCBI GI NO: 34903152 NR Description: unnamed protein product
  misc_feature (76)..(125): NCBI GI NO: 7439981 NR Description: glycine-rich RNA-binding protein GRP1 - wheat
  misc_feature (76)..(121): NCBI GI NO: 7439981 NR Description: glycine-rich RNA-binding protein GRP1 - wheat
  misc_feature (76)..(125): NCBI GI NO: 82696 NR Description: glycine-rich protein - maize
  misc_feature (76)..(125): NCBI GI NO: 2331131 NR Description: glycine-rich protein [Oryza sativa]
  misc_feature (76)..(121): NCBI GI NO: 1076731 NR Description: RNA binding protein - barley
  misc_feature (76)..(125): NCBI GI NO: 1076731 NR Description: RNA binding protein - barley
  misc_feature (76)..(125): NCBI GI NO: 544423 NR Description: Glycine-rich RNA-binding protein 2
  misc_feature (76)..(125): NCBI GI NO: 7439972 NR Description: glycine-rich RNA binding protein - maize
  misc_feature (76)..(125): NCBI GI NO: 20257669 NR Description: glycine-rich RNA binding protein [Zea mays]
MNALRSTAFRRSTLHWDAAAAFFSPPFRSRRCHRRVLLPPAAALPAKSRSRAKAKLLADAGAVDPWLASLSLLPAGGGGYGGQRGGGGGYGGGGGYGGGGGYGGGGGYGGQRGGGGGDSGGQWRN

SEQ ID NO: 16448 - DNA, 1842 bp, Triticum aestivum
  misc_feature (1)..(1842): Ceres Seq. ID no. 14303706
acaacgaagcaccagaaaagaacaaaaatataaaaaaataagacgagagagccacccccatcgcctcgtctctcctctcctcgcagatctttcccgtctccggccaccatgaactcctactccggcgaccggtcctcctcccgtcccaccacaacctccttcgactcctaccagtttgacttcggggccaacgcctcccgctcctccacctcccgccccctccgcgaccagaggccaggtggcgccaccaacccttcaccgaggccaaccaccacaaacacatggtcacaccagccggtgaagacgtcctggactcatcagccatccccgtccgccgccgcggcgctcggatccgggcctgtgtccatggtcggcgacatctccggccggagctggtccgccactgcgccctcctccggcatcggcctccctcagtccaacaaccccaacctcttcagcgacctcctcgggcccgcgcttggatccacccgagcccagtccaacgcgccgctcagatcagcagcggcccagccctccaagccgtcaagcgctaaccctaggaccaacagctcttccttctcgatgggcggtatggcgagcacgctcccgaaaaccaccggggcaccgatagcttctggtagttatggggttggtggccggccaatgaagccggtgggcatggcgccggcgaccgcgtcacagcccacggcgcagaagaaggatccgttcggctccatagatcccttcgcggcgaagcctgggtctatgaatgctgcaaagcaggcaggttcggccaaatcggatcagggatttggcgtgtttcagggcgtgagttcgggcgccaacgctggattcagtagtttccagaaagccggtgctggatccagtggcttccagagttctggtgccacgaagccttccaatgttacgcctccgcctgcacccgctccagcgcctgtttctgcagcggtgaactctggcgtggatcattttgacacgctgtttccttcgtccgcatctgcaccaactgcttctgcggcgagtaatggtggtggtgacatgtttggtgagatggatggttgggtggacgtggagtcggagtatgttggtggtggtgatagcagtggcacaaccacagagctggagggattaccgccaccaccctctgggttgacggcatctgctgctaaggcaaaaggaatggataattacaagggtgggcagtatgctgatgctatcaaatggttgtcttgggctgttctgctcatcgagaagactgggaaaaatgctggtattgcagaggtgttgtcatcaagggcctcgtcctataaggaggtcggcgagtacaagaaggctattgccgactgttcgaaggtgctcgagcaagataaggacaatgtgtcggtgctagtgcaacgtgctctcttatatgagagcagtgagaaatataggcttggggctgaggacctgcgtttggttctgaagattgaccctgggaatcgtcttgccaggagtatgattcatcgattgaacaaaatggctgactagggatgtttgtcaagttccctgatgtaccaccattgtaatcatccttgacacggaaactgtgagttatttcaaattgttttactatacttgtggctttgggggtaataatttacaactttggtgttatgaagcacatcattgcatcttcacacacagtatatctttgatatgtattgtatatcatatattgtattgaactttaatagttcactttgtgtttgaaaaaaaaaaaaaaaaaaaaaaaaaaaaaaaaaaaaaaaaaaaaaaaaaaaaaaaaaaaaaaaaaaaaaaagg

SEQ ID NO: 16449 - protein, 479 aa, Triticum aestivum
  peptide (1)..(479): Ceres Seq. ID no. 14303707
  misc_feature (10)..(279): Pfam Name: BLLF1 Pfam Description: Herpes virus major outer envelope glycoprotein
  misc_feature (1)..(478): NCBI GI NO: 30684217 NR Description: tetratricopeptide repeat (TPR)-containing protein
  misc_feature (16)..(478): NCBI GI NO: 30684223 NR Description: tetratricopeptide repeat (TPR)-containing protein
  misc_feature (1)..(392): NCBI GI NO: 11994631 NR Description: gene_id:MGL6.23~unknown protein
  misc_feature (388)..(423): NCBI GI NO: 11994631 NR Description: gene_id:MGL6.23~unknown protein
  misc_feature (1)..(312): NCBI GI NO: 13592175 NR Description: ppg3 [Leishmania major]
  misc_feature (1)..(312): NCBI GI NO: 13592175 NR Description: ppg3 [Leishmania major]
  misc_feature (1)..(312): NCBI GI NO: 13592175 NR Description: ppg3 [Leishmania major]
  misc_feature (1)..(312): NCBI GI NO: 13592175 NR Description: ppg3 [Leishmania major]
  misc_feature (1)..(312): NCBI GI NO: 13592175 NR Description: ppg3 [Leishmania major]
  misc_feature (1)..(312): NCBI GI NO: 13592175 NR Description: ppg3 [Leishmania major]
MNSYSGDRSSSRPTTTSFDSYQFDFGANASRSSTSRPLRDQRPGGATNPSPRPTTTNTWSHQPVKTSWTHQPSPSAAAALGSGPVSMVGDISGRSWSATAPSSGIGLPQSNNPNLFSDLLGPALGSTRAQSNAPLRSAAAQPSKPSSANPRTNSSSFSMGGMASTLPKTTGAPIASGSYGVGGRPMKPVGMAPATASQPTAQKKDPFGSIDPFAAKPGSMNAAKQAGSAKSDQGFGVFQGVSSGANAGFSSFQKAGAGSSGFQSSGATKPSNVTPPPAPAPAPVSAAVNSGVDHFDTLFPSSASAPTASAASNGGGDMFGEMDGWVDVESEYVGGGDSSGTTTELEGLPPPPSGLTASAAKAKGMDNYKGGQYADAIKWLSWAVLLIEKTGKNAGIAEVLSSRASSYKEVGEYKKAIADCSKVLEQDKDNVSVLVQRALLYESSEKYRLGAEDLRLVLKIDPGNRLARSMIHRLNKMAD

SEQ ID NO: 16450 - protein, 393 aa, Triticum aestivum
  peptide (1)..(393): Ceres Seq. ID no. 14303708
  misc_feature (1)..(193): Pfam Name: BLLF1 Pfam Description: Herpes virus major outer envelope glycoprotein
  misc_feature (1)..(392): NCBI GI NO: 30684217 NR Description: tetratricopeptide repeat (TPR)-containing protein
  misc_feature (1)..(392): NCBI GI NO: 30684223 NR Description: tetratricopeptide repeat (TPR)-containing protein
  misc_feature (1)..(306): NCBI GI NO: 11994631 NR Description: gene_id:MGL6.23~unknown protein
  misc_feature (302)..(337): NCBI GI NO: 11994631 NR Description: gene_id:MGL6.23~unknown protein
  misc_feature (1)..(226): NCBI GI NO: 13592175 NR Description: ppg3 [Leishmania major]
  misc_feature (1)..(226): NCBI GI NO: 13592175 NR Description: ppg3 [Leishmania major]
  misc_feature (1)..(226): NCBI GI NO: 13592175 NR Description: ppg3 [Leishmania major]
  misc_feature (1)..(226): NCBI GI NO: 13592175 NR Description: ppg3 [Leishmania major]
  misc_feature (1)..(226): NCBI GI NO: 13592175 NR Description: ppg3 [Leishmania major]
  misc_feature (1)..(226): NCBI GI NO: 13592175 NR Description: ppg3 [Leishmania major]
MVGDISGRSWSATAPSSGIGLPQSNNPNLFSDLLGPALGSTRAQSNAPLRSAAAQPSKPSSANPRTNSSSFSMGGMASTLPKTTGAPIASGSYGVGGRPMKPVGMAPATASQPTAQKKDPFGSIDPFAAKPGSMNAAKQAGSAKSDQGFGVFQGVSSGANAGFSSFQKAGAGSSGFQSSGATKPSNVTPPPAPAPAPVSAAVNSGVDHFDTLFPSSASAPTASAASNGGGDMFGEMDGWVDVESEYVGGGDSSGTTTELEGLPPPPSGLTASAAKAKGMDNYKGGQYADAIKWLSWAVLLIEKTGKNAGIAEVLSSRASSYKEVGEYKKAIADCSKVLEQDKDNVSVLVQRALLYESSEKYRLGAEDLRLVLKIDPGNRLARSMIHRLNKMAD

SEQ ID NO: 16451 - protein, 321 aa, Triticum aestivum
  peptide (1)..(321): Ceres Seq. ID no. 14303709
  misc_feature (1)..(121): Pfam Name: BLLF1 Pfam Description: Herpes virus major outer envelope glycoprotein
  misc_feature (1)..(320): NCBI GI NO: 30684217 NR Description: tetratricopeptide repeat (TPR)-containing protein
  misc_feature (1)..(320): NCBI GI NO: 30684223 NR Description: tetratricopeptide repeat (TPR)-containing protein
  misc_feature (1)..(234): NCBI GI NO: 11994631 NR Description: gene_id:MGL6.23~unknown protein
  misc_feature (230)..(265): NCBI GI NO: 11994631 NR Description: gene_id:MGL6.23~unknown protein
  misc_feature (1)..(154): NCBI GI NO: 13592175 NR Description: ppg3 [Leishmania major]
  misc_feature (1)..(154): NCBI GI NO: 13592175 NR Description: ppg3 [Leishmania major]
  misc_feature (1)..(154): NCBI GI NO: 13592175 NR Description: ppg3 [Leishmania major]
  misc_feature (1)..(154): NCBI GI NO: 13592175 NR Description: ppg3 [Leishmania major]
  misc_feature (1)..(154): NCBI GI NO: 13592175 NR Description: ppg3 [Leishmania major]
  misc_feature (1)..(154): NCBI GI NO: 13592175 NR Description: ppg3 [Leishmania major]
MGGMASTLPKTTGAPIASGSYGVGGRPMKPVGMAPATASQPTAQKKDPFGSIDPFAAKPGSMNAAKQAGSAKSDQGFGVFQGVSSGANAGFSSFQKAGAGSSGFQSSGATKPSNVTPPPAPAPAPVSAAVNSGVDHFDTLFPSSASAPTASAASNGGGDMFGEMDGWVDVESEYVGGGDSSGTTTELEGLPPPPSGLTASAAKAKGMDNYKGGQYADAIKWLSWAVLLIEKTGKNAGIAEVLSSRASSYKEVGEYKKAIADCSKVLEQDKDNVSVLVQRALLYESSEKYRLGAEDLRLVLKIDPGNRLARSMIHRLNKMAD

SEQ ID NO: 16452 - DNA, 1960 bp, Triticum aestivum
  misc_feature (1)..(1960): Ceres Seq. ID no. 13590904
aaaaatccctctcccaaaacaagcggcataaaccacgacctcgacccgctccgtctccgctcccccgcttccagtccactccccttcctccccctccgctccgccccctcaagcgaaggcaccggatggcggcgtcccccacccccggcggcggcctcggggccatcctcgccgccggcgacagggactacctcgtccgcaactccggcgagcaggtgaagatcagcagcattgagggagacactgtagctatctatttctcggcctcatggtgcccgccatgccagcggtttacaccaaagcttattgaagcatacaaagaacttacctcaaatggcaagagctttgaggtgatctttgtttcaggcgaccgagatgaggaagcattcaatgcctattttgcaaagatgccgtggttggcagttcctttctccgactccgaaggccgtaaaagccttgatgagcggtttgacgtcaacggtattccacaccttgttttccttgatgcaaaaactggcgaagttcttactgacgaaggagttgagtttgtgagtgaatatggaatagaagcttatccttttacaactgagaggatcaatgaattgaaggaacaagaaaaggctgctaaggataaccaaactattcatagtgtgcttgctacaccaaatcgtaactatgtaatttcaaacacgggggagaaggtacccatcgttgatcttgaggggaagtatgttggtatatgctttgtagtgaacggctaccctccagttgaggaatttaccccagtgcttgccaagatatatgcgaaactcaaagaagtgggggagaagtttgaagttgtagctgtatccttggacagtgatgaggaatcattcaataacagtttttcaagcatgccttggctcgccattccccatggcgacaagatgtgtcagaagcttgtcagttactttgagcttagtgatcttcctacactagtgctgattggtcctgatgggaagacactgagcagcaatattgcagacataatcaatgagcatggtttggatgcatgggaggggttccccttcaatgcagagaagctggaaattctagctgagaaggcaaaggctaaagcagcctcacagacattggagtcccttctggttactggtgacgtggactttgtcatcgggaaagatggagcaaaggttcctgtagcagaacttgttgggaagactgtcctcctctacttttcagctaaatggtgtgggccatgcagagccttcctgcctacacttgtggatgtctacaacaagatcaaggagaagaacagcgatttcgagatcgtcttcgtctctagcgacagggaccagagctcattcgacgacttcttctctggcatgccatggctcgccatccccttggaagacgaaaggaaggcgtacctgaaaaagaagttcaagatccgtggaatcccttctctggtcgccattggccccgatgggaagacggtcaacacggacgcgaagacttcgctggcggtccatggcgccgacgcgtttccgttcaccgacgagaggatccaggagctggagaagaagatcgaggagatggcaaaggggtggcctgagaagctgaagcacgagctgcacgagcacgagctcgtgctgatccgccgccccaggccgtacggctgcgacgggtgcgaagagatgggcacctcctggtcctacaactgcgcggagtgcgacttcgatctgcacaccaagtgtgcgctgggtgaggagaagaagggagaggaggtgaatgggcaggagcatgctgctgccccagctgggtacgtgtgcgagggagacgtctgcaggaaggcctaggtatcgttgtgttgtgtgtgttccttgccagctgaggcgtgtctgaatcatgtgctgtgtggtgtgatgataaataaatcttgcatccgatggtttggcttggg

SEQ ID NO: 16453 - protein, 617 aa, Triticum aestivum
  peptide (1)..(617): Ceres Seq. ID no. 13590905
  misc_feature (78)..(119): Pfam Name: Pfam Description:  Thioredoxin
  misc_feature (44)..(617): NCBI GI NO: 4056568 NR Description: PDI-like protein [Zea mays]
  misc_feature (52)..(617): NCBI GI NO: 18406743 NR Description: expressed protein [Arabidopsis thaliana]
  misc_feature (52)..(617): NCBI GI NO: 21592996 NR Description: PDI-like protein [Arabidopsis thaliana]
  misc_feature (54)..(533): NCBI GI NO: 23304737 NR Description: PDI-like protein [Quercus suber]
  misc_feature (214)..(589): NCBI GI NO: 18417767 NR Description: receptor kinase -related [Arabidopsis thaliana]
  misc_feature (210)..(530): NCBI GI NO: 18406743 NR Description: expressed protein [Arabidopsis thaliana]
  misc_feature (27)..(367): NCBI GI NO: 18406743 NR Description: expressed protein [Arabidopsis thaliana]
  misc_feature (210)..(530): NCBI GI NO: 21592996 NR Description: PDI-like protein [Arabidopsis thaliana]
  misc_feature (52)..(372): NCBI GI NO: 23304737 NR Description: PDI-like protein [Quercus suber]
  misc_feature (64)..(459): NCBI GI NO: 38567893 NR Description: OSJNBa0060N03.13
KSLSQNKRHKPRPRPAPSPLPRFQSTPLPPPPLRPLKRRHRMAASPTPGGGLGAILAAGDRDYLVRNSGEQVKISSIEGDTVAIYFSASWCPPCQRFTPKLIEAYKELTSNGKSFEVIFVSGDRDEEAFNAYFAKMPWLAVPFSDSEGRKSLDERFDVNGIPHLVFLDAKTGEVLTDEGVEFVSEYGIEAYPFTTERINELKEQEKAAKDNQTIHSVLATPNRNYVISNTGEKVPIVDLEGKYVGICFVVNGYPPVEEFTPVLAKIYAKLKEVGEKFEVVAVSLDSDEESFNNSFSSMPWLAIPHGDKMCQKLVSYFELSDLPTLVLIGPDGKTLSSNIADIINEHGLDAWEGFPFNAEKLEILAEKAKAKAASQTLESLLVTGDVDFVIGKDGAKVPVAELVGKTVLLYFSAKWCGPCRAFLPTLVDVYNKIKEKNSDFEIVFVSSDRDQSSFDDFFSGMPWLAIPLEDERKAYLKKKFKIRGIPSLVAIGPDGKTVNTDAKTSLAVHGADAFPFTDERIQELEKKIEEMAKGWPEKLKHELHEHELVLIRRPRPYGCDGCEEMGTSWSYNCAECDFDLHTKCALGEEKKGEEVNGQEHAAAPAGYVCEGDVCRKA

SEQ ID NO: 16454 - protein, 576 aa, Triticum aestivum
  peptide (1)..(576): Ceres Seq. ID no. 13590906
  misc_feature (37)..(78): Pfam Name: Pfam Description:  Thioredoxin
  misc_feature (3)..(576): NCBI GI NO: 4056568 NR Description: PDI-like protein [Zea mays]
  misc_feature (11)..(576): NCBI GI NO: 18406743 NR Description: expressed protein [Arabidopsis thaliana]
  misc_feature (11)..(576): NCBI GI NO: 21592996 NR Description: PDI-like protein [Arabidopsis thaliana]
  misc_feature (13)..(492): NCBI GI NO: 23304737 NR Description: PDI-like protein [Quercus suber]
  misc_feature (173)..(548): NCBI GI NO: 18417767 NR Description: receptor kinase -related [Arabidopsis thaliana]
  misc_feature (169)..(489): NCBI GI NO: 18406743 NR Description: expressed protein [Arabidopsis thaliana]
  misc_feature (1)..(326): NCBI GI NO: 18406743 NR Description: expressed protein [Arabidopsis thaliana]
  misc_feature (169)..(489): NCBI GI NO: 21592996 NR Description: PDI-like protein [Arabidopsis thaliana]
  misc_feature (11)..(331): NCBI GI NO: 23304737 NR Description: PDI-like protein [Quercus suber]
  misc_feature (23)..(418): NCBI GI NO: 38567893 NR Description: OSJNBa0060N03.13
MAASPTPGGGLGAILAAGDRDYLVRNSGEQVKISSIEGDTVAIYFSASWCPPCQRFTPKLIEAYKELTSNGKSFEVIFVSGDRDEEAFNAYFAKMPWLAVPFSDSEGRKSLDERFDVNGIPHLVFLDAKTGEVLTDEGVEFVSEYGIEAYPFTTERINELKEQEKAAKDNQTIHSVLATPNRNYVISNTGEKVPIVDLEGKYVGICFVVNGYPPVEEFTPVLAKIYAKLKEVGEKFEVVAVSLDSDEESFNNSFSSMPWLAIPHGDKMCQKLVSYFELSDLPTLVLIGPDGKTLSSNIADIINEHGLDAWEGFPFNAEKLEILAEKAKAKAASQTLESLLVTGDVDFVIGKDGAKVPVAELVGKTVLLYFSAKWCGPCRAFLPTLVDVYNKIKEKNSDFEIVFVSSDRDQSSFDDFFSGMPWLAIPLEDERKAYLKKKFKIRGIPSLVAIGPDGKTVNTDAKTSLAVHGADAFPFTDERIQELEKKIEEMAKGWPEKLKHELHEHELVLIRRPRPYGCDGCEEMGTSWSYNCAECDFDLHTKCALGEEKKGEEVNGQEHAAAPAGYVCEGDVCRKA

SEQ ID NO: 16455 - protein, 482 aa, Triticum aestivum
  peptide (1)..(482): Ceres Seq. ID no. 13590907
  misc_feature (422)..(450): Pfam Name: Pfam Description:  DC1 domain
  misc_feature (1)..(482): NCBI GI NO: 4056568 NR Description: PDI-like protein [Zea mays]
  misc_feature (1)..(482): NCBI GI NO: 18406743 NR Description: expressed protein [Arabidopsis thaliana]
  misc_feature (1)..(482): NCBI GI NO: 21592996 NR Description: PDI-like protein [Arabidopsis thaliana]
  misc_feature (1)..(398): NCBI GI NO: 23304737 NR Description: PDI-like protein [Quercus suber]
  misc_feature (79)..(454): NCBI GI NO: 18417767 NR Description: receptor kinase -related [Arabidopsis thaliana]
  misc_feature (75)..(395): NCBI GI NO: 18406743 NR Description: expressed protein [Arabidopsis thaliana]
  misc_feature (1)..(232): NCBI GI NO: 18406743 NR Description: expressed protein [Arabidopsis thaliana]
  misc_feature (75)..(395): NCBI GI NO: 21592996 NR Description: PDI-like protein [Arabidopsis thaliana]
  misc_feature (1)..(237): NCBI GI NO: 23304737 NR Description: PDI-like protein [Quercus suber]
  misc_feature (1)..(324): NCBI GI NO: 38567893 NR Description: OSJNBa0060N03.13
MPWLAVPFSDSEGRKSLDERFDVNGIPHLVFLDAKTGEVLTDEGVEFVSEYGIEAYPFTTERINELKEQEKAAKDNQTIHSVLATPNRNYVISNTGEKVPIVDLEGKYVGICFVVNGYPPVEEFTPVLAKIYAKLKEVGEKFEVVAVSLDSDEESFNNSFSSMPWLAIPHGDKMCQKLVSYFELSDLPTLVLIGPDGKTLSSNIADIINEHGLDAWEGFPFNAEKLEILAEKAKAKAASQTLESLLVTGDVDFVIGKDGAKVPVAELVGKTVLLYFSAKWCGPCRAFLPTLVDVYNKIKEKNSDFEIVFVSSDRDQSSFDDFFSGMPWLAIPLEDERKAYLKKKFKIRGIPSLVAIGPDGKTVNTDAKTSLAVHGADAFPFTDERIQELEKKIEEMAKGWPEKLKHELHEHELVLIRRPRPYGCDGCEEMGTSWSYNCAECDFDLHTKCALGEEKKGEEVNGQEHAAAPAGYVCEGDVCRKA

SEQ ID NO: 16456 - DNA, 1727 bp, Triticum aestivum
  misc_feature (1)..(1727): Ceres Seq. ID no. 15169585
ttttttttcgattacactccgtccagtgcagctaggctagggcgctaggctaggcagcagacatgatgaccgtcccgcttgttgtcgcgctgttcaactcgcccttcgtcctcaccaccctcgccttcctcctcttcaccctcctcgtctccaagacgcgcagcaatgttgctgcccggggaacgttgcctccgtcgccgcccagcctgccagtcttcggccaccttcgtctactcgggagcctgccgcacaggagcctccggtcactggccgcgtcctacggcccggtcatgtacctacgcctcgggcgtgtgcccaccgtcgtggcgtactccgcggccgccgcggaggaggccatgaagacccgcgacctggccttcgccagccgccccaagctgttcatggtcgaccggttctactacggcaccggcggcatcggcttcgcgccgtacggcgagcactggcgccaggcccgccgcgtctgcgtcacccacatgcttaacccgcaccgcctcctgtccttcaggcgcgtccgggggcaggaggtcgccgccctcgtcgaccgggtccgccgcgccggtaccgtcgtgaacctgagcgacaacctcatcgtctactctttcaccgccatctctcgcgccacctttggcgacacggactacgggatcgacggcgaggaggggggagcgaggctgaggaaggtgttcgccgagatcgaggagcttctcggcacggcccccatgggggagaaggtgccatggctgcggtgggtcgacgtcctgacgggactggagcggaagacgaggcgcgcgttcgaggagatggatggactgctcgagcgggtcatcacggaccatcgccaaaagagcggcgccggggacaacgaccagcgtgacttcgtggacgtgctgttaggggccaacgagctcgacacgaacggcatcaaggccatcatcctggacatgcttgccgccgccacggattcaacgttcacgttgctggaatgggccatggcggagctcatcaaccacccgcaagaaatgcgcaagctccaggacgaggtccgcacggccgtcggcgacgccggccacgtcaccgaggatcatctgccggatctacgctacctgaaggccgtcgtcaaggagaccctccggctccaccctcccacgccgctcctcctgccccgggagactgtcgaggacacccagctgctcggctaccacgtcccggcaggcacgcgggtgctgatccacgcctgggccatcggccgtgacccggcgacgtggggcgaccgcgccgaggagttcgtgccggagaggttcttggagtacacccacgagatggggcaagacttcgcgttcttgcccttcggcaccgggaggagaggttgccccggggtcaagttcgccatgccgtccaacgagctggccctcgcgagcctggtgtaccatttcgactgggagctagccggcgggaggaagccgcccgtggacatgaccgagctgcacgggctctccgtgcgcctgaagacgcctctgcttctggctgctaaaccgtggtcaagccgtggtgtcgaatgagagaaaagcgtctctacatgcttcttctaagtagtacgagctagctcagagctcggatgatcattatcgaccaagtctagtaatgtactccttcatgtattgttcacttgttaatttccttacccgtatttgttgagcagtaacttc

SEQ ID NO: 16457 - protein, 505 aa, Triticum aestivum
  peptide (1)..(505): Ceres Seq. ID no. 15169586
  misc_feature (43)..(303): Pfam Name: Pfam Description:  Cytochrome P450
  misc_feature (7)..(303): NCBI GI NO: 34904238 NR Description: putative cytochrome P-450LXXIA1 (cyp71A1) family
  misc_feature (285)..(501): NCBI GI NO: 34904238 NR Description: putative cytochrome P-450LXXIA1 (cyp71A1) family
  misc_feature (2)..(303): NCBI GI NO: 34904240 NR Description: putative cytochrome P-450LXXIA1 (cyp71A1) family
  misc_feature (300)..(500): NCBI GI NO: 34904240 NR Description: putative cytochrome P-450LXXIA1 (cyp71A1) family
  misc_feature (2)..(295): NCBI GI NO: 34904246 NR Description: putative cytochrome P-450LXXIA1 (cyp71A1) family
  misc_feature (300)..(498): NCBI GI NO: 34904246 NR Description: putative cytochrome P-450LXXIA1 (cyp71A1) family
  misc_feature (16)..(497): NCBI GI NO: 25282608 NR Description: cytochrome P-450LXXIA1 [similarity] - avocado
  misc_feature (13)..(498): NCBI GI NO: 3582021 NR Description: cytochrome P450 [Nepeta racemosa]
  misc_feature (16)..(470): NCBI GI NO: 117188 NR Description: CYTOCHROME P450 71A1 (CYPLXXIA1) (ARP-2)
  misc_feature (16)..(501): NCBI GI NO: 15723953 NR Description: menthofuran synthase [Mentha x piperita]
MMTVPLVVALFNSPFVLTTLAFLLFTLLVSKTRSNVAARGTLPPSPPSLPVFGHLRLLGSLPHRSLRSLAASYGPVMYLRLGRVPTVVAYSAAAAEEAMKTRDLAFASRPKLFMVDRFYYGTGGIGFAPYGEHWRQARRVCVTHMLNPHRLLSFRRVRGQEVAALVDRVRRAGTVVNLSDNLIVYSFTAISRATFGDTDYGIDGEEGGARLRKVFAEIEELLGTAPMGEKVPWLRWVDVLTGLERKTRRAFEEMDGLLERVITDHRQKSGAGDNDQRDFVDVLLGANELDTNGIKAIILDMLAAATDSTFTLLEWAMAELINHPQEMRKLQDEVRTAVGDAGHVTEDHLPDLRYLKAVVKETLRLHPPTPLLLPRETVEDTQLLGYHVPAGTRVLIHAWAIGRDPATWGDRAEEFVPERFLEYTHEMGQDFAFLPFGTGRRGCPGVKFAMPSNELALASLVYHFDWELAGGRKPPVDMTELHGLSVRLKTPLLLAAKPWSSRGVE

SEQ ID NO: 16458 - protein, 504 aa, Triticum aestivum
  peptide (1)..(504): Ceres Seq. ID no. 15169587
  misc_feature (42)..(302): Pfam Name: Pfam Description:  Cytochrome P450
  misc_feature (6)..(302): NCBI GI NO: 34904238 NR Description: putative cytochrome P-450LXXIA1 (cyp71A1) family
  misc_feature (284)..(500): NCBI GI NO: 34904238 NR Description: putative cytochrome P-450LXXIA1 (cyp71A1) family
  misc_feature (1)..(302): NCBI GI NO: 34904240 NR Description: putative cytochrome P-450LXXIA1 (cyp71A1) family
  misc_feature (299)..(499): NCBI GI NO: 34904240 NR Description: putative cytochrome P-450LXXIA1 (cyp71A1) family
  misc_feature (1)..(294): NCBI GI NO: 34904246 NR Description: putative cytochrome P-450LXXIA1 (cyp71A1) family
  misc_feature (299)..(497): NCBI GI NO: 34904246 NR Description: putative cytochrome P-450LXXIA1 (cyp71A1) family
  misc_feature (15)..(496): NCBI GI NO: 25282608 NR Description: cytochrome P-450LXXIA1 [similarity] - avocado
  misc_feature (12)..(497): NCBI GI NO: 3582021 NR Description: cytochrome P450 [Nepeta racemosa]
  misc_feature (15)..(469): NCBI GI NO: 117188 NR Description: CYTOCHROME P450 71A1 (CYPLXXIA1) (ARP-2)
  misc_feature (15)..(500): NCBI GI NO: 15723953 NR Description: menthofuran synthase [Mentha x piperita]
MTVPLVVALFNSPFVLTTLAFLLFTLLVSKTRSNVAARGTLPPSPPSLPVFGHLRLLGSLPHRSLRSLAASYGPVMYLRLGRVPTVVAYSAAAAEEAMKTRDLAFASRPKLFMVDRFYYGTGGIGFAPYGEHWRQARRVCVTHMLNPHRLLSFRRVRGQEVAALVDRVRRAGTVVNLSDNLIVYSFTAISRATFGDTDYGIDGEEGGARLRKVFAEIEELLGTAPMGEKVPWLRWVDVLTGLERKTRRAFEEMDGLLERVITDHRQKSGAGDNDQRDFVDVLLGANELDTNGIKAIILDMLAAATDSTFTLLEWAMAELINHPQEMRKLQDEVRTAVGDAGHVTEDHLPDLRYLKAVVKETLRLHPPTPLLLPRETVEDTQLLGYHVPAGTRVLIHAWAIGRDPATWGDRAEEFVPERFLEYTHEMGQDFAFLPFGTGRRGCPGVKFAMPSNELALASLVYHFDWELAGGRKPPVDMTELHGLSVRLKTPLLLAAKPWSSRGVE

SEQ ID NO: 16459 - protein, 429 aa, Triticum aestivum
  peptide (1)..(429): Ceres Seq. ID no. 15169588
  misc_feature (1)..(227): Pfam Name: Pfam Description:  Cytochrome P450
  misc_feature (1)..(227): NCBI GI NO: 34904238 NR Description: putative cytochrome P-450LXXIA1 (cyp71A1) family
  misc_feature (209)..(425): NCBI GI NO: 34904238 NR Description: putative cytochrome P-450LXXIA1 (cyp71A1) family
  misc_feature (1)..(227): NCBI GI NO: 34904240 NR Description: putative cytochrome P-450LXXIA1 (cyp71A1) family
  misc_feature (224)..(424): NCBI GI NO: 34904240 NR Description: putative cytochrome P-450LXXIA1 (cyp71A1) family
  misc_feature (1)..(219): NCBI GI NO: 34904246 NR Description: putative cytochrome P-450LXXIA1 (cyp71A1) family
  misc_feature (224)..(422): NCBI GI NO: 34904246 NR Description: putative cytochrome P-450LXXIA1 (cyp71A1) family
  misc_feature (1)..(421): NCBI GI NO: 25282608 NR Description: cytochrome P-450LXXIA1 [similarity] - avocado
  misc_feature (1)..(422): NCBI GI NO: 3582021 NR Description: cytochrome P450 [Nepeta racemosa]
  misc_feature (1)..(394): NCBI GI NO: 117188 NR Description: CYTOCHROME P450 71A1 (CYPLXXIA1) (ARP-2)
  misc_feature (1)..(425): NCBI GI NO: 15723953 NR Description: menthofuran synthase [Mentha x piperita]
MYLRLGRVPTVVAYSAAAAEEAMKTRDLAFASRPKLFMVDRFYYGTGGIGFAPYGEHWRQARRVCVTHMLNPHRLLSFRRVRGQEVAALVDRVRRAGTVVNLSDNLIVYSFTAISRATFGDTDYGIDGEEGGARLRKVFAEIEELLGTAPMGEKVPWLRWVDVLTGLERKTRRAFEEMDGLLERVITDHRQKSGAGDNDQRDFVDVLLGANELDTNGIKAIILDMLAAATDSTFTLLEWAMAELINHPQEMRKLQDEVRTAVGDAGHVTEDHLPDLRYLKAVVKETLRLHPPTPLLLPRETVEDTQLLGYHVPAGTRVLIHAWAIGRDPATWGDRAEEFVPERFLEYTHEMGQDFAFLPFGTGRRGCPGVKFAMPSNELALASLVYHFDWELAGGRKPPVDMTELHGLSVRLKTPLLLAAKPWSSRGVE

SEQ ID NO: 16460 - DNA, 1792 bp, Triticum aestivum
  misc_feature (1)..(1792): Ceres Seq. ID no. 14301587
acaaaatttctccccccaaatttcctactcgtccgtttcacgctcccacggtctcactctcacctccaaacccaaatccccaaaccctaaccacagcacctacctcctccgccgccgccgccatggcaggagcaggagtcggcggccgcaaggctcgcaactttgcgacctttcgcctattcccccgcgacggtgccgccgaccccaacgaccgcgtcttcgtccgcgtcgacaacaacgcctacaccatccccggcttcggcgacgacgaagacccttccctctcgcccaccgccgccgccgaccaattcccttcctccacctctgggcccctccccgaccacgtccgccagcagatccttgagctcggcctccccgacgatggctacaactaccttctccatctccgcgagctgcggccctccgctgtggcctcctccttcgtacccagccataccgcccgcccagagcaacttcccctggacgtgaaggcctatgatgcaagcaaggtgcgggttgcttctggcaaggtcgaggaagagttggacgaggggaggaccatgtgtaaggtggccgcaaagacggcaccggtgaggcgagttgagaaggccgtcgaccctgacgttgcaaggttgctcgatgagagcgaggatgagggtttggaggaggatttcgtcataatggcaaaccaagccgaaggggatgatatggaggatgaaagtgaggaagaggggggtggtgtgttcagtgatgtggaaaatgatgaggagttcgaggatgaagagggtgagcccaagccgagggtgccacggctgctggatgaacaatttgatctgcttgctttggaagaatatggagctagtgatgatgatgatggagctgttagagatggggaacatgaactcccgtctgaggttatagatgaactgaagttgttccacaatcaaaatgtatgcgttgatgaagaatatagaacaccagcagattttgttcgtggaaaacttgactcaaccaccgccgaggaggtggatgaatctgctaatgtgatccagaagtgtgctgaatatgctgaaaggtatttaaatgaaactgcagaagatgaagaggtcttgcttgtttcggaaagcagtgatgaatctgaagtttgggactgtgagaccattgtttccacatactctaacttggacaatcaccctggcaaaattcaaactccaggaaatcctagaaatcgtcttcccaaagtttttcctggggaaacagctacaacgaaagatatcatcaagcttcatggtaaagagaaacttcctgtagattacctgccacagaggaaaagaaaagttgaaaaggagaagaaagcaaagcccacagaagcttcagatgctgaatattattttgaaaaggttgtagttcagaaggaaacaaaagatgaaaagaaagctagaaagtccgcggtaaaagaagagaagagagaagcccggaaagcaaagaaagagctcaaagaactgtataaatttgaaacacagaaggctcagaaagttgctgctgttacaggaccatcttccatacggctaatataattgtcctgtgtcatatgtaacgtgtttcctacatctgctgaactgttgaagccttgaagacagtagtccagagcaagataggcatgtcatatgtaactgctggtacctgagacatttcatgccttgcttaaggttgtcccattctctggactggaggcagtgaatgattctgcttggcattacctttttactgctgaatgtatgagttttgtgtt

SEQ ID NO: 16461 - protein, 524 aa, Triticum aestivum
  peptide (1)..(524): Ceres Seq. ID no. 14301588
  misc_feature (88)..(524): NCBI GI NO: 28927687 NR Description: unknown protein
  misc_feature (41)..(291): NCBI GI NO: 28927687 NR Description: unknown protein
  misc_feature (305)..(524): NCBI GI NO: 31249721 NR Description: hypothetical protein
  misc_feature (55)..(520): NCBI GI NO: 15229649 NR Description: expressed protein [Arabidopsis thaliana]
  misc_feature (49)..(261): NCBI GI NO: 33146615 NR Description: unknown protein
  misc_feature (49)..(261): NCBI GI NO: 34913326 NR Description: hypothetical protein~predicted by FGENESH etc.
  misc_feature (126)..(511): NCBI GI NO: 31324539 NR Description: RIKEN cDNA 2610020N02 gene [Mus musculus]
  misc_feature (126)..(511): NCBI GI NO: 21361875 NR Description: hypothetical protein FLJ14909 [Homo sapiens]
  misc_feature (88)..(510): NCBI GI NO: 19921998 NR Description: CG7686-PA [Drosophila melanogaster]
  misc_feature (166)..(511): NCBI GI NO: 31211149 NR Description: ENSANGP00000016262 [Anopheles gambiae]
KISPPKFPTRPFHAPTVSLSPPNPNPQTLTTAPTSSAAAAMAGAGVGGRKARNFATFRLFPRDGAADPNDRVFVRVDNNAYTIPGFGDDEDPSLSPTAAADQFPSSTSGPLPDHVRQQILELGLPDDGYNYLLHLRELRPSAVASSFVPSHTARPEQLPLDVKAYDASKVRVASGKVEEELDEGRTMCKVAAKTAPVRRVEKAVDPDVARLLDESEDEGLEEDFVIMANQAEGDDMEDESEEEGGGVFSDVENDEEFEDEEGEPKPRVPRLLDEQFDLLALEEYGASDDDDGAVRDGEHELPSEVIDELKLFHNQNVCVDEEYRTPADFVRGKLDSTTAEEVDESANVIQKCAEYAERYLNETAEDEEVLLVSESSDESEVWDCETIVSTYSNLDNHPGKIQTPGNPRNRLPKVFPGETATTKDIIKLHGKEKLPVDYLPQRKRKVEKEKKAKPTEASDAEYYFEKVVVQKETKDEKKARKSAVKEEKREARKAKKELKELYKFETQKAQKVAAVTGPSSIRLI

SEQ ID NO: 16462 - protein, 484 aa, Triticum aestivum
  peptide (1)..(484): Ceres Seq. ID no. 14301589
  misc_feature (48)..(484): NCBI GI NO: 28927687 NR Description: unknown protein
  misc_feature (1)..(251): NCBI GI NO: 28927687 NR Description: unknown protein
  misc_feature (265)..(484): NCBI GI NO: 31249721 NR Description: hypothetical protein
  misc_feature (15)..(480): NCBI GI NO: 15229649 NR Description: expressed protein [Arabidopsis thaliana]
  misc_feature (9)..(221): NCBI GI NO: 33146615 NR Description: unknown protein
  misc_feature (9)..(221): NCBI GI NO: 34913326 NR Description: hypothetical protein~predicted by FGENESH etc.
  misc_feature (86)..(471): NCBI GI NO: 31324539 NR Description: RIKEN cDNA 2610020N02 gene [Mus musculus]
  misc_feature (86)..(471): NCBI GI NO: 21361875 NR Description: hypothetical protein FLJ14909 [Homo sapiens]
  misc_feature (48)..(470): NCBI GI NO: 19921998 NR Description: CG7686-PA [Drosophila melanogaster]
  misc_feature (126)..(471): NCBI GI NO: 31211149 NR Description: ENSANGP00000016262 [Anopheles gambiae]
MAGAGVGGRKARNFATFRLFPRDGAADPNDRVFVRVDNNAYTIPGFGDDEDPSLSPTAAADQFPSSTSGPLPDHVRQQILELGLPDDGYNYLLHLRELRPSAVASSFVPSHTARPEQLPLDVKAYDASKVRVASGKVEEELDEGRTMCKVAAKTAPVRRVEKAVDPDVARLLDESEDEGLEEDFVIMANQAEGDDMEDESEEEGGGVFSDVENDEEFEDEEGEPKPRVPRLLDEQFDLLALEEYGASDDDDGAVRDGEHELPSEVIDELKLFHNQNVCVDEEYRTPADFVRGKLDSTTAEEVDESANVIQKCAEYAERYLNETAEDEEVLLVSESSDESEVWDCETIVSTYSNLDNHPGKIQTPGNPRNRLPKVFPGETATTKDIIKLHGKEKLPVDYLPQRKRKVEKEKKAKPTEASDAEYYFEKVVVQKETKDEKKARKSAVKEEKREARKAKKELKELYKFETQKAQKVAAVTGPSSIRLI

SEQ ID NO: 16463 - protein, 338 aa, Triticum aestivum
  peptide (1)..(338): Ceres Seq. ID no. 14301590
  misc_feature (1)..(338): NCBI GI NO: 28927687 NR Description: unknown protein
  misc_feature (1)..(105): NCBI GI NO: 28927687 NR Description: unknown protein
  misc_feature (119)..(338): NCBI GI NO: 31249721 NR Description: hypothetical protein
  misc_feature (1)..(334): NCBI GI NO: 15229649 NR Description: expressed protein [Arabidopsis thaliana]
  misc_feature (1)..(75): NCBI GI NO: 33146615 NR Description: unknown protein
  misc_feature (1)..(75): NCBI GI NO: 34913326 NR Description: hypothetical protein~predicted by FGENESH etc.
  misc_feature (1)..(325): NCBI GI NO: 31324539 NR Description: RIKEN cDNA 2610020N02 gene [Mus musculus]
  misc_feature (1)..(325): NCBI GI NO: 21361875 NR Description: hypothetical protein FLJ14909 [Homo sapiens]
  misc_feature (1)..(324): NCBI GI NO: 19921998 NR Description: CG7686-PA [Drosophila melanogaster]
  misc_feature (1)..(325): NCBI GI NO: 31211149 NR Description: ENSANGP00000016262 [Anopheles gambiae]
MCKVAAKTAPVRRVEKAVDPDVARLLDESEDEGLEEDFVIMANQAEGDDMEDESEEEGGGVFSDVENDEEFEDEEGEPKPRVPRLLDEQFDLLALEEYGASDDDDGAVRDGEHELPSEVIDELKLFHNQNVCVDEEYRTPADFVRGKLDSTTAEEVDESANVIQKCAEYAERYLNETAEDEEVLLVSESSDESEVWDCETIVSTYSNLDNHPGKIQTPGNPRNRLPKVFPGETATTKDIIKLHGKEKLPVDYLPQRKRKVEKEKKAKPTEASDAEYYFEKVVVQKETKDEKKARKSAVKEEKREARKAKKELKELYKFETQKAQKVAAVTGPSSIRLI

SEQ ID NO: 16464 - DNA, 899 bp, Triticum aestivum
  misc_feature (1)..(899): Ceres Seq. ID no. 13657435
atcgaaaaactcgcgcacctcacaacacccctccatccaccttttgccagcgtgagagcttcttctttcttgcgagggagaggacagcgagcaaccagggagctaggcgtcaatggcgaccatagccacgatgaccatgctcaagcccgccaagatcacggccaggtcggcgccttcctcgccgtcgttcagcgccaaggtggcgtcgccgagcatctcgctgcgcagcctgcagaagaacgcggccaagaagggagccctggccgtgtcgccggcggccgcggccatggcgagcgccttcttcacctcgctggcctcgtcggacgccgcgatggcgtcgcagcggatcgcggacgtggcggcggtggcgcccgcggacgacaaccggggcctgctgctgctcttcgtggtggcgcccgcgctcgggtgggtgctctacaacatcctccagccggcgctgaaccagctcaataagatgcggtccgagaaggcgctcgtcgccgggctcggcatcagcgccgccgcggccgccggcctggccgccgcgccggagccggcctccgccgccgtgcaggagctcgccgcgctggcggcggtagcgcccgccgacgacaaccggggcctgctgctgctcttcgtggtggcgcccgccctcggatgggtgctctacaacatcctgcagccggcgctgaaccagctcaacaaaatgcggtccaactgagcgtcgtcgtcgtcgtggcatcgcatgcggtccggccgagtgggttcgtatgtgtgtgttcgtctattaagagtcgtggtagtagcgtggaacgtggtgtgagtgcctgcttgcatactctctaatcttgttccttccattgatcaaatgcagtacagctcttcttgttttctcttcg

SEQ ID NO: 16465 - protein, 202 aa, Triticum aestivum
  peptide (1)..(202): Ceres Seq. ID no. 13657436
  misc_feature (90)..(124): Pfam Name: PsbY Pfam Description: Photosystem II protein Y
  misc_feature (1)..(201): NCBI GI NO: 6093830 NR Description: Photosystem II core complex proteins psbY
  misc_feature (21)..(201): NCBI GI NO: 15220530 NR Description: F12A21.13 [Arabidopsis thaliana]
  misc_feature (21)..(201): NCBI GI NO: 21593330 NR Description: unknown [Arabidopsis thaliana]
  misc_feature (132)..(202): NCBI GI NO: 15220530 NR Description: F12A21.13 [Arabidopsis thaliana]
  misc_feature (132)..(202): NCBI GI NO: 21593330 NR Description: unknown [Arabidopsis thaliana]
  misc_feature (36)..(125): NCBI GI NO: 6093830 NR Description: Photosystem II core complex proteins psbY
MATIATMTMLKPAKITARSAPSSPSFSAKVASPSISLRSLQKNAAKKGALAVSPAAAAMASAFFTSLASSDAAMASQRIADVAAVAPADDNRGLLLLFVVAPALGWVLYNILQPALNQLNKMRSEKALVAGLGISAAAAAGLAAAPEPASAAVQELAALAAVAPADDNRGLLLLFVVAPALGWVLYNILQPALNQLNKMRSN

SEQ ID NO: 16466 - protein, 196 aa, Triticum aestivum
  peptide (1)..(196): Ceres Seq. ID no. 13657437
  misc_feature (84)..(118): Pfam Name: PsbY Pfam Description: Photosystem II protein Y
  misc_feature (1)..(195): NCBI GI NO: 6093830 NR Description: Photosystem II core complex proteins psbY
  misc_feature (15)..(195): NCBI GI NO: 15220530 NR Description: F12A21.13 [Arabidopsis thaliana]
  misc_feature (15)..(195): NCBI GI NO: 21593330 NR Description: unknown [Arabidopsis thaliana]
  misc_feature (126)..(196): NCBI GI NO: 15220530 NR Description: F12A21.13 [Arabidopsis thaliana]
  misc_feature (126)..(196): NCBI GI NO: 21593330 NR Description: unknown [Arabidopsis thaliana]
  misc_feature (30)..(119): NCBI GI NO: 6093830 NR Description: Photosystem II core complex proteins psbY
MTMLKPAKITARSAPSSPSFSAKVASPSISLRSLQKNAAKKGALAVSPAAAAMASAFFTSLASSDAAMASQRIADVAAVAPADDNRGLLLLFVVAPALGWVLYNILQPALNQLNKMRSEKALVAGLGISAAAAAGLAAAPEPASAAVQELAALAAVAPADDNRGLLLLFVVAPALGWVLYNILQPALNQLNKMRSN

SEQ ID NO: 16467 - protein, 194 aa, Triticum aestivum
  peptide (1)..(194): Ceres Seq. ID no. 13657438
  misc_feature (82)..(116): Pfam Name: PsbY Pfam Description: Photosystem II protein Y
  misc_feature (1)..(193): NCBI GI NO: 6093830 NR Description: Photosystem II core complex proteins psbY
  misc_feature (13)..(193): NCBI GI NO: 15220530 NR Description: F12A21.13 [Arabidopsis thaliana]
  misc_feature (13)..(193): NCBI GI NO: 21593330 NR Description: unknown [Arabidopsis thaliana]
  misc_feature (124)..(194): NCBI GI NO: 15220530 NR Description: F12A21.13 [Arabidopsis thaliana]
  misc_feature (124)..(194): NCBI GI NO: 21593330 NR Description: unknown [Arabidopsis thaliana]
  misc_feature (28)..(117): NCBI GI NO: 6093830 NR Description: Photosystem II core complex proteins psbY
MLKPAKITARSAPSSPSFSAKVASPSISLRSLQKNAAKKGALAVSPAAAAMASAFFTSLASSDAAMASQRIADVAAVAPADDNRGLLLLFVVAPALGWVLYNILQPALNQLNKMRSEKALVAGLGISAAAAAGLAAAPEPASAAVQELAALAAVAPADDNRGLLLLFVVAPALGWVLYNILQPALNQLNKMRSN

SEQ ID NO: 16468 - DNA, 1741 bp, Triticum aestivum
  misc_feature (1)..(1741): Ceres Seq. ID no. 15225244
acctaccgcaaacccccaaagccacagcgaactcgagctccccccaatggcagctccgcccatctccggccacccccattcctccgtcgactcgccgctccccaccgacgccctcctcgcgcacccccaactcccctccgcccccgcgccccaggcccccaccgcctcccgcttcctcatcatcctcaccgccgccctcgccgtctccacctcctacctcctcctcctccgcccgcccttctccgccgtgtccgccgccgcctccacctcatccttcgcacggcctctatccaagctcccgaagccggtggtcctcctcatatcctccgatggcttccgcttcggctaccaccacaaggcccccaccccgcacatccgccgcctcatcgccaatggcacctccgccgccgagggcctcatccccgtcttccccaccctcaccttccccaaccactactccatcgtcaccggccttcacccttcctcccacggcatcatcaacaacttcttccccgaccccatctcgggggacaacttcaacatgggctcccacgagcccaagtggtggctcggggagcccctctgggtcaccgccgccgaccagggggtccaggcctccacgttcttctggccgggctcggaggtgaagaagggctcctgggactgccccgataagtattgccgccactataatggctctgtgccattcgaggacagggttgacgccgtccttggttactttgatctcccggttgatgaaatgccgcagtttctgacactgtactttgaggatccagatcaccaggggcaccaggttggtcctgatgacccagccatcaccgatgctgtgacgcacattgacgagatgatcgggaggctcattgctggtttggaagctaggggggtgttcgaggatgtgaacatcatattggttggggatcatgggatggttgggacctgcgaccagaagctactgtttctcgaggaattggctccatggattgaggtgaaggctgattgggttctgtcgaggacaccattgctggcaatcaggccaccagatggtatatccccgtcagaggtcgtggccaagatgaatgaagggctgagctctgggaaggtgaagaatgggcaatatctgaagatgtacttgaaggaggatttgccttctcgcctgcattactcggaaagctataggataccaccaattattgggctggtagctgaaggttataaggtagagatgaaagtatcaaagaaaaatgagtgtggaggggcgcacgggtatgacaatgccttcttctcaatgaggaccatattcatcgcacatgggcctcgtttcgaagagggtaaaattgtgccctcatttgtgaatgtggagatatacaatgccattgcttccattctcagtttgaagccagctccaaacaatggctccagttctttccctgaaacagttcttttaccgagtgaatgatcatcggtgtatgtgagggctttggttctggaggaggaaagcccacactgatggtattatcttctggttgtagttgtatttgtacactattttagttcaaattctgccatgtgcagctattcgctactgataatactgcaagcagagtttctttttccttaaggatgtaatttgccaatgcaaatcacatctaacttttgatcttctgtgatgaatgtataatgctacttcttttaagtgccatgtgtttctacttgagttgat

SEQ ID NO: 16469 - protein, 491 aa, Triticum aestivum
  peptide (1)..(491): Ceres Seq. ID no. 15225245
  misc_feature (102)..(471): Pfam Name: Pfam Description:  Type I phosphodiesterase / nucleotide pyrophosphatase
  misc_feature (16)..(491): NCBI GI NO: 34903578 NR Description: nucleotide pyrophosphatase homolog
  misc_feature (11)..(489): NCBI GI NO: 12081942 NR Description: nucleotide pyrophosphatase-like protein
  misc_feature (60)..(489): NCBI GI NO: 15233659 NR Description: nucleotide pyrophosphatase - like protein
  misc_feature (68)..(489): NCBI GI NO: 15233662 NR Description: nucleotide pyrophosphatase - like protein
  misc_feature (68)..(489): NCBI GI NO: 27808612 NR Description: At4g29690 [Arabidopsis thaliana]
  misc_feature (95)..(490): NCBI GI NO: 15233665 NR Description: nucleotide pyrophosphatase -related protein
  misc_feature (258)..(489): NCBI GI NO: 13877571 NR Description: nucleotide pyrophosphatase-like protein
  misc_feature (102)..(479): NCBI GI NO: 9453796 NR Description: dJ131F15
  misc_feature (102)..(479): NCBI GI NO: 13324677 NR Description: ectonucleotide pyrophosphatase/phosphodiesterase 1
  misc_feature (102)..(479): NCBI GI NO: 23503088 NR Description: Ectonucleotide pyrophosphatase/phosphodiesterase 1
PTANPQSHSELELPPMAAPPISGHPHSSVDSPLPTDALLAHPQLPSAPAPQAPTASRFLIILTAALAVSTSYLLLLRPPFSAVSAAASTSSFARPLSKLPKPVVLLISSDGFRFGYHHKAPTPHIRRLIANGTSAAEGLIPVFPTLTFPNHYSIVTGLHPSSHGIINNFFPDPISGDNFNMGSHEPKWWLGEPLWVTAADQGVQASTFFWPGSEVKKGSWDCPDKYCRHYNGSVPFEDRVDAVLGYFDLPVDEMPQFLTLYFEDPDHQGHQVGPDDPAITDAVTHIDEMIGRLIAGLEARGVFEDVNIILVGDHGMVGTCDQKLLFLEELAPWIEVKADWVLSRTPLLAIRPPDGISPSEVVAKMNEGLSSGKVKNGQYLKMYLKEDLPSRLHYSESYRIPPIIGLVAEGYKVEMKVSKKNECGGAHGYDNAFFSMRTIFIAHGPRFEEGKIVPSFVNVEIYNAIASILSLKPAPNNGSSSFPETVLLPSE

SEQ ID NO: 16470 - protein, 476 aa, Triticum aestivum
  peptide (1)..(476): Ceres Seq. ID no. 15225246
  misc_feature (87)..(456): Pfam Name: Pfam Description:  Type I phosphodiesterase / nucleotide pyrophosphatase
  misc_feature (1)..(476): NCBI GI NO: 34903578 NR Description: nucleotide pyrophosphatase homolog
  misc_feature (1)..(474): NCBI GI NO: 12081942 NR Description: nucleotide pyrophosphatase-like protein
  misc_feature (45)..(474): NCBI GI NO: 15233659 NR Description: nucleotide pyrophosphatase - like protein
  misc_feature (53)..(474): NCBI GI NO: 15233662 NR Description: nucleotide pyrophosphatase - like protein
  misc_feature (53)..(474): NCBI GI NO: 27808612 NR Description: At4g29690 [Arabidopsis thaliana]
  misc_feature (80)..(475): NCBI GI NO: 15233665 NR Description: nucleotide pyrophosphatase -related protein
  misc_feature (243)..(474): NCBI GI NO: 13877571 NR Description: nucleotide pyrophosphatase-like protein
  misc_feature (87)..(464): NCBI GI NO: 9453796 NR Description: dJ131F15
  misc_feature (87)..(464): NCBI GI NO: 23503088 NR Description: Ectonucleotide pyrophosphatase/phosphodiesterase 1
  misc_feature (87)..(464): NCBI GI NO: 13324677 NR Description: ectonucleotide pyrophosphatase/phosphodiesterase 1
MAAPPISGHPHSSVDSPLPTDALLAHPQLPSAPAPQAPTASRFLIILTAALAVSTSYLLLLRPPFSAVSAAASTSSFARPLSKLPKPVVLLISSDGFRFGYHHKAPTPHIRRLIANGTSAAEGLIPVFPTLTFPNHYSIVTGLHPSSHGIINNFFPDPISGDNFNMGSHEPKWWLGEPLWVTAADQGVQASTFFWPGSEVKKGSWDCPDKYCRHYNGSVPFEDRVDAVLGYFDLPVDEMPQFLTLYFEDPDHQGHQVGPDDPAITDAVTHIDEMIGRLIAGLEARGVFEDVNIILVGDHGMVGTCDQKLLFLEELAPWIEVKADWVLSRTPLLAIRPPDGISPSEVVAKMNEGLSSGKVKNGQYLKMYLKEDLPSRLHYSESYRIPPIIGLVAEGYKVEMKVSKKNECGGAHGYDNAFFSMRTIFIAHGPRFEEGKIVPSFVNVEIYNAIASILSLKPAPNNGSSSFPETVLLPSE

SEQ ID NO: 16471 - protein, 311 aa, Triticum aestivum
  peptide (1)..(311): Ceres Seq. ID no. 15225247
  misc_feature (1)..(291): Pfam Name: Pfam Description:  Type I phosphodiesterase / nucleotide pyrophosphatase
  misc_feature (1)..(311): NCBI GI NO: 34903578 NR Description: nucleotide pyrophosphatase homolog
  misc_feature (1)..(309): NCBI GI NO: 12081942 NR Description: nucleotide pyrophosphatase-like protein
  misc_feature (1)..(309): NCBI GI NO: 15233659 NR Description: nucleotide pyrophosphatase - like protein
  misc_feature (1)..(309): NCBI GI NO: 15233662 NR Description: nucleotide pyrophosphatase - like protein
  misc_feature (1)..(309): NCBI GI NO: 27808612 NR Description: At4g29690 [Arabidopsis thaliana]
  misc_feature (1)..(310): NCBI GI NO: 15233665 NR Description: nucleotide pyrophosphatase -related protein
  misc_feature (78)..(309): NCBI GI NO: 13877571 NR Description: nucleotide pyrophosphatase-like protein
  misc_feature (1)..(299): NCBI GI NO: 9453796 NR Description: dJ131F15
  misc_feature (1)..(299): NCBI GI NO: 23503088 NR Description: Ectonucleotide pyrophosphatase/phosphodiesterase 1
  misc_feature (1)..(299): NCBI GI NO: 13324677 NR Description: ectonucleotide pyrophosphatase/phosphodiesterase 1
MGSHEPKWWLGEPLWVTAADQGVQASTFFWPGSEVKKGSWDCPDKYCRHYNGSVPFEDRVDAVLGYFDLPVDEMPQFLTLYFEDPDHQGHQVGPDDPAITDAVTHIDEMIGRLIAGLEARGVFEDVNIILVGDHGMVGTCDQKLLFLEELAPWIEVKADWVLSRTPLLAIRPPDGISPSEVVAKMNEGLSSGKVKNGQYLKMYLKEDLPSRLHYSESYRIPPIIGLVAEGYKVEMKVSKKNECGGAHGYDNAFFSMRTIFIAHGPRFEEGKIVPSFVNVEIYNAIASILSLKPAPNNGSSSFPETVLLPSE

SEQ ID NO: 16472 - DNA, 1768 bp, Triticum aestivum
  misc_feature (1)..(1768): Ceres Seq. ID no. 13658032
tgctcaaggcacatggcgcgctgctccgtcgcgaagccgcttacaaccgccgccgcggctccgcgcctccctcgccgccgcgctctgctcgttagcgccgccgccgcctccctggccacggcaacaacaagaacgcagcggctgtccgccctatcgaagccgcctaaaccaccgcctctcctcccgcgcccaaggctccccacctccaaccacgcccccaccaacgacaagcaagacgaccgccgtgaagcatcgacgggcgcggcgtcctctggctctgggtcgccctcgggcgccggagacgtgctccgcctgatggatgccctcggcgtcgcgcccgacgaggacgtctacgtctccctcctcagggactccgtcgacgccgccgaggtcgccgccgtgcacgcccacttygacgccgcacgcgccgcgcctggcctccccctgccgctggccaaccggctgctgctcgcctacgcggcctgcggcgacatggcggccgcccgcaaggtgttcgacgaaattcccgtcaaggacggcatcacgtgggcgaccatggtgtcggcctactccgatgggtgtttccatgaagaagcgctaaggctcttcacccgcatgtgccaagaagaacatgggcttgctggtgatctgctcggccatgccattgtggcagtgctgcggtcatgtgctcggctgggcagattaaggggctttggtgagcaggtacatgcgctcgtcgtcaagacaaagagagtctgcggtgataccggtagttcgctgctgcagctgtacatcgcaagtaatcagcatgacagtgcgcggcaagtgcttcaggcgatgaggtgttgttcccatgagccagtgcccgaggcagcctggactagcttcatgacagcttgccaccgggacggactgctagatgaggccatctatgtctttagggacatggtgtcctccggagtcgccaggagcagcttctccctgtcgactatccttgcggtatgtgcagaatcagataactgcaggtgttatggacagcaagtgcatggcgacgccatcaagcacggcgtggaaacagaccagttcgttgtgtctgggttggtccacatgtatgcgaagcaaggacggcttgcagacgccgcgagggcatttgaggcagtgggtggcaagcctgacgcggtgtgctggaacgccatggccatggggtatgcacgcggtgggtggtacagagaggccaccagaatgatgtaccagatgaaagctgctggactggatcttccaggactaaatgtggttggaatggcctgctccagattgatgcatgtagggattgatgcatccatggcaggattgatgcatgttttcccattttgggcgatggatcccaaggaggacatgaaccagaaggtgctcctcttcgcccgcaggaactgtgaccaccagtgtttgttcacctactggagcagctgagaagaggaggaagaaaaacaggacaactcttcaggaactagggttcatacaacactgttcatgatgtgagtatatcaccatgttcttgattttttagttaacaatattcagtcactaggagtacaacagtagcagtacatagctggaatatgcatttacatagacttactgatggctcaacattcgagctgattactagcagtgcaacactagcagtacacatatggatactcacagattactcctttgttactgtatttatctagagatgggagtagagctgaagcagtacgacttc

SEQ ID NO: 16473 - protein, 489 aa, Triticum aestivum
  peptide (1)..(489): Ceres Seq. ID no. 15220618
  misc_feature (394)..(425): Pfam Name: Pfam Description:  PPR repeat
  misc_feature (5)..(438): NCBI GI NO: 34900752 NR Description: OJ1341_A08.34
  misc_feature (95)..(424): NCBI GI NO: 15222460 NR Description: pentatricopeptide (PPR) repeat-containing protein
  misc_feature (104)..(443): NCBI GI NO: 15226301 NR Description: pentatricopeptide (PPR) repeat-containing protein
  misc_feature (76)..(444): NCBI GI NO: 27260973 NR Description: OJ1705_C03.3
  misc_feature (102)..(444): NCBI GI NO: 34897884 NR Description: Similar to Arabidopsis thaliana DNA chromosome 4
  misc_feature (76)..(463): NCBI GI NO: 15221304 NR Description: pentatricopeptide (PPR) repeat-containing protein
  misc_feature (113)..(405): NCBI GI NO: 34905780 NR Description: selenium-binding protein-like
  misc_feature (110)..(439): NCBI GI NO: 18409250 NR Description: pentatricopeptide (PPR) repeat-containing protein
  misc_feature (241)..(426): NCBI GI NO: 30684439 NR Description: pentatricopeptide (PPR) repeat-containing protein
  misc_feature (155)..(217): NCBI GI NO: 30684439 NR Description: pentatricopeptide (PPR) repeat-containing protein
  misc_feature (138)..(138): Xaa is any aa, unknown or other
CSRHMARCSVAKPLTTAAAAPRLPRRRALLVSAAAASLATATTRTQRLSALSKPPKPPPLLPRPRLPTSNHAPTNDKQDDRREASTGAASSGSGSPSGAGDVLRLMDALGVAPDEDVYVSLLRDSVDAAEVAAVHAHXDAARAAPGLPLPLANRLLLAYAACGDMAAARKVFDEIPVKDGITWATMVSAYSDGCFHEEALRLFTRMCQEEHGLAGDLLGHAIVAVLRSCARLGRLRGFGEQVHALVVKTKRVCGDTGSSLLQLYIASNQHDSARQVLQAMRCCSHEPVPEAAWTSFMTACHRDGLLDEAIYVFRDMVSSGVARSSFSLSTILAVCAESDNCRCYGQQVHGDAIKHGVETDQFVVSGLVHMYAKQGRLADAARAFEAVGGKPDAVCWNAMAMGYARGGWYREATRMMYQMKAAGLDLPGLNVVGMACSRLMHVGIDASMAGLMHVFPFWAMDPKEDMNQKVLLFARRNCDHQCLFTYWSS

SEQ ID NO: 16474 - protein, 485 aa, Triticum aestivum
  peptide (1)..(485): Ceres Seq. ID no. 15220619
  misc_feature (390)..(421): Pfam Name: Pfam Description:  PPR repeat
  misc_feature (1)..(434): NCBI GI NO: 34900752 NR Description: OJ1341_A08.34
  misc_feature (91)..(420): NCBI GI NO: 15222460 NR Description: pentatricopeptide (PPR) repeat-containing protein
  misc_feature (100)..(439): NCBI GI NO: 15226301 NR Description: pentatricopeptide (PPR) repeat-containing protein
  misc_feature (72)..(440): NCBI GI NO: 27260973 NR Description: OJ1705_C03.3
  misc_feature (98)..(440): NCBI GI NO: 34897884 NR Description: Similar to Arabidopsis thaliana DNA chromosome 4
  misc_feature (72)..(459): NCBI GI NO: 15221304 NR Description: pentatricopeptide (PPR) repeat-containing protein
  misc_feature (109)..(401): NCBI GI NO: 34905780 NR Description: selenium-binding protein-like
  misc_feature (106)..(435): NCBI GI NO: 18409250 NR Description: pentatricopeptide (PPR) repeat-containing protein
  misc_feature (237)..(422): NCBI GI NO: 30684439 NR Description: pentatricopeptide (PPR) repeat-containing protein
  misc_feature (151)..(213): NCBI GI NO: 30684439 NR Description: pentatricopeptide (PPR) repeat-containing protein
  misc_feature (134)..(134): Xaa is any aa, unknown or other
MARCSVAKPLTTAAAAPRLPRRRALLVSAAAASLATATTRTQRLSALSKPPKPPPLLPRPRLPTSNHAPTNDKQDDRREASTGAASSGSGSPSGAGDVLRLMDALGVAPDEDVYVSLLRDSVDAAEVAAVHAHXDAARAAPGLPLPLANRLLLAYAACGDMAAARKVFDEIPVKDGITWATMVSAYSDGCFHEEALRLFTRMCQEEHGLAGDLLGHAIVAVLRSCARLGRLRGFGEQVHALVVKTKRVCGDTGSSLLQLYIASNQHDSARQVLQAMRCCSHEPVPEAAWTSFMTACHRDGLLDEAIYVFRDMVSSGVARSSFSLSTILAVCAESDNCRCYGQQVHGDAIKHGVETDQFVVSGLVHMYAKQGRLADAARAFEAVGGKPDAVCWNAMAMGYARGGWYREATRMMYQMKAAGLDLPGLNVVGMACSRLMHVGIDASMAGLMHVFPFWAMDPKEDMNQKVLLFARRNCDHQCLFTYWSS

SEQ ID NO: 16475 - protein, 384 aa, Triticum aestivum
  peptide (1)..(384): Ceres Seq. ID no. 15220620
  misc_feature (289)..(320): Pfam Name: Pfam Description:  PPR repeat
  misc_feature (1)..(333): NCBI GI NO: 34900752 NR Description: OJ1341_A08.34
  misc_feature (1)..(319): NCBI GI NO: 15222460 NR Description: pentatricopeptide (PPR) repeat-containing protein
  misc_feature (1)..(338): NCBI GI NO: 15226301 NR Description: pentatricopeptide (PPR) repeat-containing protein
  misc_feature (1)..(339): NCBI GI NO: 27260973 NR Description: OJ1705_C03.3
  misc_feature (1)..(339): NCBI GI NO: 34897884 NR Description: Similar to Arabidopsis thaliana DNA chromosome 4
  misc_feature (1)..(358): NCBI GI NO: 15221304 NR Description: pentatricopeptide (PPR) repeat-containing protein
  misc_feature (8)..(300): NCBI GI NO: 34905780 NR Description: selenium-binding protein-like
  misc_feature (5)..(334): NCBI GI NO: 18409250 NR Description: pentatricopeptide (PPR) repeat-containing protein
  misc_feature (136)..(321): NCBI GI NO: 30684439 NR Description: pentatricopeptide (PPR) repeat-containing protein
  misc_feature (50)..(112): NCBI GI NO: 30684439 NR Description: pentatricopeptide (PPR) repeat-containing protein
  misc_feature (33)..(33): Xaa is any aa, unknown or other
MDALGVAPDEDVYVSLLRDSVDAAEVAAVHAHXDAARAAPGLPLPLANRLLLAYAACGDMAAARKVFDEIPVKDGITWATMVSAYSDGCFHEEALRLFTRMCQEEHGLAGDLLGHAIVAVLRSCARLGRLRGFGEQVHALVVKTKRVCGDTGSSLLQLYIASNQHDSARQVLQAMRCCSHEPVPEAAWTSFMTACHRDGLLDEAIYVFRDMVSSGVARSSFSLSTILAVCAESDNCRCYGQQVHGDAIKHGVETDQFVVSGLVHMYAKQGRLADAARAFEAVGGKPDAVCWNAMAMGYARGGWYREATRMMYQMKAAGLDLPGLNVVGMACSRLMHVGIDASMAGLMHVFPFWAMDPKEDMNQKVLLFARRNCDHQCLFTYWSS

SEQ ID NO: 16476 - DNA, 1966 bp, Triticum aestivum
  misc_feature (1)..(1966): Ceres Seq. ID no. 15169599
agcaaccaacaacatccgagcatcagcaccagctcaaacacacatactgtagtacattgcacgccaagctagcacccgcgcagagcacagcatggctgtctccgcgcgcagggtggccttcgccacggcagcctccttggccgtgtactggctcctcaaatcgttcctccacgcaccgcaccccgcgctgctgccggcagcggccgccctcgtcgccgtcgccgtgggagcgggagggaagcgtggaggccccggcgcccctccaggccccgcggccgtgccggtgttcggcaactggctgcaggtgggcaacgacctgaaccaccgcttcctggcgcggctgtcggcgcggtacggccccgtgttccggctgcggctgggcgtgcgcaacctggtggtggtgtcggacccgcggctggccacggaggtgctccacacgcagggcgtggagttcggctcccgcccgcggaacgtcgtcttcgacatcttcacggccaatggcgccgacatggtcttcaccgagtacggcgaccactggcgccgcatgcgccgcgtcatgacgctgcccttcttcacggcgcgggttgtgcagcagtaccgcgccatgtgggaggccgagatggacgacgtcgtgtccgacctgcgcgccgactcggcggcccgcggcgccggcgtcgtcgtgcgccgcaggctgcagctcatgctctacaacatcatgtaccgcatgatgttcgacgcccgcttcgactccgtggacgaccccatgttcgtggaggccaccaagttcaactcggagcgcagccgcctcgcgcagagcttcgattacaactacggcgacttcatccccatcctcaggcccttcctgcgtggctacctcaacaagtgcagggacctgcagacgaggaggctggccttcttcaacagcaactacgtcgagaagagaagggaggtgatggacaccccaggacaagacaagaacaagctccggtgcgcgatcgaccacatcctcgcagcagagaagagcggcgagatcacgccggagaacgtcatctacatcgtcgagaacatcaacgtcgcggccatcgagacgacgctatggtccatcgagtgggcgctggccgaggtggtgaaccacccggacgtgcagcgcaaggtccgcggcgagatcagggacgtgctcggcgacgacgagcccatcaccgagtccaacatcagcaagctgccgtacctgcaggccgtgatcaaggagacgctgcggctgcactccccgatcccgctcctcgtcccccacatgaacctggaggaggccagcctcggcggctacaccattcccaagggctccaaggtcgtcgtcaacgcctggtggctggccaacaacccagagctatgggagaagccggaggagttcaagccggagaggttcttgggcgaggagagcaacgtggacgccacggtcggcggcaaggtggacttccggttcctcccgttcggcgtggggcggcgcagctgccccggtatcatcctcgcgctgcccatcctggcgctcatcgtcgggaagctggtgaggagcttcgagatggtgccgccgccaggcgtggacaagctcgacgtgagcgagaaaggcgggcagttcagcctgcacattgccaaccattccgtcgtcgcattccaccccatctcaccctgagcaattgcatcttcaacccaatagcctgatccacaagcacaatttttcttcagattacaaatacagtagattacacgaaagtatgtcagttgatttatggggtttacatttttttttctttataaaaaggaggatcacgcgtggcctctgcataaggggtttaaaaaatgcttttcagctttaagaaattggtttacataacgcttttcagctttaagaaatgtatgtattttgcaaatcaaaatgttttttatgggtgcaaattgaaatgttattgcc

SEQ ID NO: 16477 - protein, 531 aa, Triticum aestivum
  peptide (1)..(531): Ceres Seq. ID no. 15169600
  misc_feature (57)..(524): Pfam Name: Pfam Description:  Cytochrome P450
  misc_feature (57)..(529): NCBI GI NO: 7650489 NR Description: cinnamate 4-hydroxylase CYP73 [Citrus sinensis]
  misc_feature (12)..(530): NCBI GI NO: 14423323 NR Description: elicitor-inducible cytochrome P450
  misc_feature (57)..(529): NCBI GI NO: 4206116 NR Description: cinnamate 4-hydroxylase
  misc_feature (21)..(530): NCBI GI NO: 14423325 NR Description: elicitor-inducible cytochrome P450
  misc_feature (21)..(529): NCBI GI NO: 7430650 NR Description: trans-cinnamate 4-monooxygenase (EC 1
  misc_feature (57)..(530): NCBI GI NO: 4566493 NR Description: trans-cinnamate 4-hydroxylase [Pinus taeda]
  misc_feature (38)..(530): NCBI GI NO: 3915095 NR Description: Trans-cinnamate 4-monooxygenase
  misc_feature (33)..(528): NCBI GI NO: 3915112 NR Description: Trans-cinnamate 4-monooxygenase
  misc_feature (38)..(530): NCBI GI NO: 586082 NR Description: Trans-cinnamate 4-monooxygenase
  misc_feature (33)..(528): NCBI GI NO: 1351206 NR Description: Trans-cinnamate 4-monooxygenase
MAVSARRVAFATAASLAVYWLLKSFLHAPHPALLPAAAALVAVAVGAGGKRGGPGAPPGPAAVPVFGNWLQVGNDLNHRFLARLSARYGPVFRLRLGVRNLVVVSDPRLATEVLHTQGVEFGSRPRNVVFDIFTANGADMVFTEYGDHWRRMRRVMTLPFFTARVVQQYRAMWEAEMDDVVSDLRADSAARGAGVVVRRRLQLMLYNIMYRMMFDARFDSVDDPMFVEATKFNSERSRLAQSFDYNYGDFIPILRPFLRGYLNKCRDLQTRRLAFFNSNYVEKRREVMDTPGQDKNKLRCAIDHILAAEKSGEITPENVIYIVENINVAAIETTLWSIEWALAEVVNHPDVQRKVRGEIRDVLGDDEPITESNISKLPYLQAVIKETLRLHSPIPLLVPHMNLEEASLGGYTIPKGSKVVVNAWWLANNPELWEKPEEFKPERFLGEESNVDATVGGKVDFRFLPFGVGRRSCPGIILALPILALIVGKLVRSFEMVPPPGVDKLDVSEKGGQFSLHIANHSVVAFHPISP

SEQ ID NO: 16478 - protein, 392 aa, Triticum aestivum
  peptide (1)..(392): Ceres Seq. ID no. 15169601
  misc_feature (1)..(385): Pfam Name: Pfam Description:  Cytochrome P450
  misc_feature (1)..(390): NCBI GI NO: 7650489 NR Description: cinnamate 4-hydroxylase CYP73 [Citrus sinensis]
  misc_feature (1)..(391): NCBI GI NO: 14423323 NR Description: elicitor-inducible cytochrome P450
  misc_feature (1)..(390): NCBI GI NO: 4206116 NR Description: cinnamate 4-hydroxylase
  misc_feature (1)..(391): NCBI GI NO: 14423325 NR Description: elicitor-inducible cytochrome P450
  misc_feature (1)..(390): NCBI GI NO: 7430650 NR Description: trans-cinnamate 4-monooxygenase (EC 1
  misc_feature (1)..(391): NCBI GI NO: 4566493 NR Description: trans-cinnamate 4-hydroxylase [Pinus taeda]
  misc_feature (1)..(391): NCBI GI NO: 3915095 NR Description: Trans-cinnamate 4-monooxygenase
  misc_feature (1)..(389): NCBI GI NO: 3915112 NR Description: Trans-cinnamate 4-monooxygenase
  misc_feature (1)..(391): NCBI GI NO: 586082 NR Description: Trans-cinnamate 4-monooxygenase
  misc_feature (1)..(389): NCBI GI NO: 1351206 NR Description: Trans-cinnamate 4-monooxygenase
MVFTEYGDHWRRMRRVMTLPFFTARVVQQYRAMWEAEMDDVVSDLRADSAARGAGVVVRRRLQLMLYNIMYRMMFDARFDSVDDPMFVEATKFNSERSRLAQSFDYNYGDFIPILRPFLRGYLNKCRDLQTRRLAFFNSNYVEKRREVMDTPGQDKNKLRCAIDHILAAEKSGEITPENVIYIVENINVAAIETTLWSIEWALAEVVNHPDVQRKVRGEIRDVLGDDEPITESNISKLPYLQAVIKETLRLHSPIPLLVPHMNLEEASLGGYTIPKGSKVVVNAWWLANNPELWEKPEEFKPERFLGEESNVDATVGGKVDFRFLPFGVGRRSCPGIILALPILALIVGKLVRSFEMVPPPGVDKLDVSEKGGQFSLHIANHSVVAFHPISP

SEQ ID NO: 16479 - protein, 380 aa, Triticum aestivum
  peptide (1)..(380): Ceres Seq. ID no. 15169602
  misc_feature (1)..(373): Pfam Name: Pfam Description:  Cytochrome P450
  misc_feature (1)..(378): NCBI GI NO: 7650489 NR Description: cinnamate 4-hydroxylase CYP73 [Citrus sinensis]
  misc_feature (1)..(379): NCBI GI NO: 14423323 NR Description: elicitor-inducible cytochrome P450
  misc_feature (1)..(378): NCBI GI NO: 4206116 NR Description: cinnamate 4-hydroxylase
  misc_feature (1)..(379): NCBI GI NO: 14423325 NR Description: elicitor-inducible cytochrome P450
  misc_feature (1)..(378): NCBI GI NO: 7430650 NR Description: trans-cinnamate 4-monooxygenase (EC 1
  misc_feature (1)..(379): NCBI GI NO: 4566493 NR Description: trans-cinnamate 4-hydroxylase [Pinus taeda]
  misc_feature (1)..(379): NCBI GI NO: 3915095 NR Description: Trans-cinnamate 4-monooxygenase
  misc_feature (1)..(377): NCBI GI NO: 3915112 NR Description: Trans-cinnamate 4-monooxygenase
  misc_feature (1)..(379): NCBI GI NO: 586082 NR Description: Trans-cinnamate 4-monooxygenase
  misc_feature (1)..(377): NCBI GI NO: 1351206 NR Description: Trans-cinnamate 4-monooxygenase
MRRVMTLPFFTARVVQQYRAMWEAEMDDVVSDLRADSAARGAGVVVRRRLQLMLYNIMYRMMFDARFDSVDDPMFVEATKFNSERSRLAQSFDYNYGDFIPILRPFLRGYLNKCRDLQTRRLAFFNSNYVEKRREVMDTPGQDKNKLRCAIDHILAAEKSGEITPENVIYIVENINVAAIETTLWSIEWALAEVVNHPDVQRKVRGEIRDVLGDDEPITESNISKLPYLQAVIKETLRLHSPIPLLVPHMNLEEASLGGYTIPKGSKVVVNAWWLANNPELWEKPEEFKPERFLGEESNVDATVGGKVDFRFLPFGVGRRSCPGIILALPILALIVGKLVRSFEMVPPPGVDKLDVSEKGGQFSLHIANHSVVAFHPISP

SEQ ID NO: 16480 - DNA, 531 bp, Triticum aestivum
  misc_feature (1)..(531): Ceres Seq. ID no. 14305395
cgtatacctgatgggaaatttcaggctgctttcctgacgtaccattctcttggacactgggttcatcgaggaagctcatcagaccaggctggccatagtcatgctgtcttgccagtcatgggtttgcaatcttacaacgacaagggggagtggtggtttcagacgagcagatctggttcgggggatgcagagtcctcgtcgagtcggccgtctcaggttcttcaagaaaggttgtcgacgctgaaccaagccgcggcggcgatggccagggccgacgtgtggaagaaggaccaggctcgcagaaacaggcacccggactacgagttcttcctgtcccggcagcaacggtagacagacgactccaggctttttgcgcgtacaatgtgttcaaaatgctgacggacgaacgtttgttcccttgtaaccagaagcaagcatgcggactgagcggtgccgtctgcgtgtgttaccaccctgtatatatttgagatagaggtacatgtcatgtggaggtgctgctcaattgaaagg

SEQ ID NO: 16481 - protein, 116 aa, Triticum aestivum
  peptide (1)..(116): Ceres Seq. ID no. 14305396
  misc_feature (1)..(113): NCBI GI NO: 38344926 NR Description: OSJNBa0018M05.17
RIPDGKFQAAFLTYHSLGHWVHRGSSSDQAGHSHAVLPVMGLQSYNDKGEWWFQTSRSGSGDAESSSSRPSQVLQERLSTLNQAAAAMARADVWKKDQARRNRHPDYEFFLSRQQR

SEQ ID NO: 16482 - protein, 77 aa, Triticum aestivum
  peptide (1)..(77): Ceres Seq. ID no. 14305397
  misc_feature (1)..(74): NCBI GI NO: 38344926 NR Description: OSJNBa0018M05.17
MGLQSYNDKGEWWFQTSRSGSGDAESSSSRPSQVLQERLSTLNQAAAAMARADVWKKDQARRNRHPDYEFFLSRQQR

SEQ ID NO: 16483 - DNA, 1838 bp, Triticum aestivum
  misc_feature (1)..(1838): Ceres Seq. ID no. 14313216
atgcggagctccatggcctgctggtcgccaaccatggcgccgctggcaatgctgctcgtctctgctctattcttcgtcacctcccatgcttcccttcctatccctatccaagctgccgccgacgacttcctccggtgcatgtcggcgtccgtcccaggcaaccttctctttccccgcagctcgccgtcgttcgcgtcggtccttgcgtcctccgtccggaacccgcggttcctcgggccggccgtggtgcgtccgctctgcatcgtcacggcgaccaacgcgtcccacgtccaggccgccgtcgtgtgcggccgccggcacggcgtgcgcctccgcgtgcgcagcggcgggcacgactacgagggcctctcgttccggtccgcgcgccaggaggacttcgccgtcgtggacctcgccgccctccgctccgtgcgcgtcaccgtgcgggagccggccgaggcgtgggtggagtccggcgccacgctcggggagctgtaccacgccatcgggagggcgaccgaccggcacgcgttcccggggggcctctgcccgacggtgggcgtcgggggccacctgagcggcggcggcttcggcatgctgctgcgcaagtacggcctcgcctccgaccacgtcatcaacgccgtgatggtggacgcggaggggcggctgctggacaagcaggccatggggcgcgacgtgttctgggccatccgcggcggcggcggcgggagcttcgggatcgtgctgtcgtggaaggtgaggctggtggccgtgccgccgagggtgacggtgttcaccgtcgtgaagacggcccgggagggcgcggcggacctcctcgccaagtggcaggaggtcgcccctgctctccccgacgacctgctggtgagggtggtcgtccagggggacaaggcgaggttccaggccctgtacctgggcgcccgcgacgcgctgctgccggtgatgggcagccggttcccggagctgggagtgaacccgacgcactgcaaggagatgtcgtggatccagtcggtgccctacatctacatcggcgaggcagccagcgtggacgacatcctgaaccggaccgtcgcgagggactcctccccgagcaagtcgacgtccgactacgtgcggcgggccatcccgagggacgtgtgggcgcggatcttctccgactggctggcgaggcgggacgcggggctgatgatcctggacccctacggcgggagcatcgcgggcgtggcggagtcggcgacgcccttctcgcaccgggccggcgtgctgtacaacgtgcagtacatgaacttctggggcgtgggcggcgacggcgcggcaaacacgaggtggatcagggacatgtacgcgttcatggagccgcacgtgagcaagaacccgcgggaggcgtacgtgaactacagggacctggacctcgggcagaacgtggtgggcgccggcgacgtctcgagcttcgaggccggtagggtgtggggggagaagtactactccaaggccaacttccggaggctcgccatggccaaggggcagatcgatccccgcgactacttcaggagcgagcagagcatcccgccgcttgttggctcgcagctggagctgacctccgccaggaacgcgccgcacgttgatggcgtgaatcctccgggttggtgggcagtggggtgtgggacaggcagtccgtgttcagtccttagctctgtcttggctaaactgatgcctagtttcttttagacatagctcattctgttttaccacgtagtacttgttggtcttattgtcaatggtgtttgctagcggaaataaagtctgaaattatggttaag

SEQ ID NO: 16484 - protein, 581 aa, Triticum aestivum
  peptide (1)..(581): Ceres Seq. ID no. 14313217
  misc_feature (85)..(242): Pfam Name: Pfam Description:  FAD binding domain
  misc_feature (12)..(529): NCBI GI NO: 15241495 NR Description: FAD-linked oxidoreductase family
  misc_feature (14)..(532): NCBI GI NO: 15241494 NR Description: FAD-linked oxidoreductase family
  misc_feature (23)..(530): NCBI GI NO: 15233411 NR Description: FAD-linked oxidoreductase family
  misc_feature (41)..(529): NCBI GI NO: 15241498 NR Description: FAD-linked oxidoreductase family
  misc_feature (21)..(533): NCBI GI NO: 15226830 NR Description: FAD-linked oxidoreductase family
  misc_feature (70)..(531): NCBI GI NO: 15233424 NR Description: FAD-linked oxidoreductase family
  misc_feature (70)..(531): NCBI GI NO: 14194127 NR Description: AT4g20860/T13K14_20 [Arabidopsis thaliana]
  misc_feature (9)..(531): NCBI GI NO: 34905176 NR Description: putative berberine bridge enzyme
  misc_feature (50)..(529): NCBI GI NO: 28058799 NR Description: berberine bridge enzyme-like protein
  misc_feature (23)..(534): NCBI GI NO: 18652398 NR Description: carbohydrate oxidase [Lactuca sativa]
MRSSMACWSPTMAPLAMLLVSALFFVTSHASLPIPIQAAADDFLRCMSASVPGNLLFPRSSPSFASVLASSVRNPRFLGPAVVRPLCIVTATNASHVQAAVVCGRRHGVRLRVRSGGHDYEGLSFRSARQEDFAVVDLAALRSVRVTVREPAEAWVESGATLGELYHAIGRATDRHAFPGGLCPTVGVGGHLSGGGFGMLLRKYGLASDHVINAVMVDAEGRLLDKQAMGRDVFWAIRGGGGGSFGIVLSWKVRLVAVPPRVTVFTVVKTAREGAADLLAKWQEVAPALPDDLLVRVVVQGDKARFQALYLGARDALLPVMGSRFPELGVNPTHCKEMSWIQSVPYIYIGEAASVDDILNRTVARDSSPSKSTSDYVRRAIPRDVWARIFSDWLARRDAGLMILDPYGGSIAGVAESATPFSHRAGVLYNVQYMNFWGVGGDGAANTRWIRDMYAFMEPHVSKNPREAYVNYRDLDLGQNVVGAGDVSSFEAGRVWGEKYYSKANFRRLAMAKGQIDPRDYFRSEQSIPPLVGSQLELTSARNAPHVDGVNPPGWWAVGCGTGSPCSVLSSVLAKLMPSFF

SEQ ID NO: 16485 - protein, 577 aa, Triticum aestivum
  peptide (1)..(577): Ceres Seq. ID no. 14313218
  misc_feature (81)..(238): Pfam Name: Pfam Description:  FAD binding domain
  misc_feature (8)..(525): NCBI GI NO: 15241495 NR Description: FAD-linked oxidoreductase family
  misc_feature (10)..(528): NCBI GI NO: 15241494 NR Description: FAD-linked oxidoreductase family
  misc_feature (19)..(526): NCBI GI NO: 15233411 NR Description: FAD-linked oxidoreductase family
  misc_feature (37)..(525): NCBI GI NO: 15241498 NR Description: FAD-linked oxidoreductase family
  misc_feature (17)..(529): NCBI GI NO: 15226830 NR Description: FAD-linked oxidoreductase family
  misc_feature (66)..(527): NCBI GI NO: 15233424 NR Description: FAD-linked oxidoreductase family
  misc_feature (66)..(527): NCBI GI NO: 14194127 NR Description: AT4g20860/T13K14_20 [Arabidopsis thaliana]
  misc_feature (5)..(527): NCBI GI NO: 34905176 NR Description: putative berberine bridge enzyme
  misc_feature (46)..(525): NCBI GI NO: 28058799 NR Description: berberine bridge enzyme-like protein
  misc_feature (19)..(530): NCBI GI NO: 18652398 NR Description: carbohydrate oxidase [Lactuca sativa]
MACWSPTMAPLAMLLVSALFFVTSHASLPIPIQAAADDFLRCMSASVPGNLLFPRSSPSFASVLASSVRNPRFLGPAVVRPLCIVTATNASHVQAAVVCGRRHGVRLRVRSGGHDYEGLSFRSARQEDFAVVDLAALRSVRVTVREPAEAWVESGATLGELYHAIGRATDRHAFPGGLCPTVGVGGHLSGGGFGMLLRKYGLASDHVINAVMVDAEGRLLDKQAMGRDVFWAIRGGGGGSFGIVLSWKVRLVAVPPRVTVFTVVKTAREGAADLLAKWQEVAPALPDDLLVRVVVQGDKARFQALYLGARDALLPVMGSRFPELGVNPTHCKEMSWIQSVPYIYIGEAASVDDILNRTVARDSSPSKSTSDYVRRAIPRDVWARIFSDWLARRDAGLMILDPYGGSIAGVAESATPFSHRAGVLYNVQYMNFWGVGGDGAANTRWIRDMYAFMEPHVSKNPREAYVNYRDLDLGQNVVGAGDVSSFEAGRVWGEKYYSKANFRRLAMAKGQIDPRDYFRSEQSIPPLVGSQLELTSARNAPHVDGVNPPGWWAVGCGTGSPCSVLSSVLAKLMPSFF

SEQ ID NO: 16486 - protein, 570 aa, Triticum aestivum
  peptide (1)..(570): Ceres Seq. ID no. 14313219
  misc_feature (74)..(231): Pfam Name: Pfam Description:  FAD binding domain
  misc_feature (1)..(518): NCBI GI NO: 15241495 NR Description: FAD-linked oxidoreductase family
  misc_feature (3)..(521): NCBI GI NO: 15241494 NR Description: FAD-linked oxidoreductase family
  misc_feature (12)..(519): NCBI GI NO: 15233411 NR Description: FAD-linked oxidoreductase family
  misc_feature (30)..(518): NCBI GI NO: 15241498 NR Description: FAD-linked oxidoreductase family
  misc_feature (10)..(522): NCBI GI NO: 15226830 NR Description: FAD-linked oxidoreductase family
  misc_feature (59)..(520): NCBI GI NO: 15233424 NR Description: FAD-linked oxidoreductase family
  misc_feature (59)..(520): NCBI GI NO: 14194127 NR Description: AT4g20860/T13K14_20 [Arabidopsis thaliana]
  misc_feature (1)..(520): NCBI GI NO: 34905176 NR Description: putative berberine bridge enzyme
  misc_feature (39)..(518): NCBI GI NO: 28058799 NR Description: berberine bridge enzyme-like protein
  misc_feature (12)..(523): NCBI GI NO: 18652398 NR Description: carbohydrate oxidase [Lactuca sativa]
MAPLAMLLVSALFFVTSHASLPIPIQAAADDFLRCMSASVPGNLLFPRSSPSFASVLASSVRNPRFLGPAVVRPLCIVTATNASHVQAAVVCGRRHGVRLRVRSGGHDYEGLSFRSARQEDFAVVDLAALRSVRVTVREPAEAWVESGATLGELYHAIGRATDRHAFPGGLCPTVGVGGHLSGGGFGMLLRKYGLASDHVINAVMVDAEGRLLDKQAMGRDVFWAIRGGGGGSFGIVLSWKVRLVAVPPRVTVFTVVKTAREGAADLLAKWQEVAPALPDDLLVRVVVQGDKARFQALYLGARDALLPVMGSRFPELGVNPTHCKEMSWIQSVPYIYIGEAASVDDILNRTVARDSSPSKSTSDYVRRAIPRDVWARIFSDWLARRDAGLMILDPYGGSIAGVAESATPFSHRAGVLYNVQYMNFWGVGGDGAANTRWIRDMYAFMEPHVSKNPREAYVNYRDLDLGQNVVGAGDVSSFEAGRVWGEKYYSKANFRRLAMAKGQIDPRDYFRSEQSIPPLVGSQLELTSARNAPHVDGVNPPGWWAVGCGTGSPCSVLSSVLAKLMPSFF

SEQ ID NO: 16487 - DNA, 1861 bp, Triticum aestivum
  misc_feature (1)..(1861): Ceres Seq. ID no. 15178460
accactctcccattcccgtataacccccgcagccgccgccgctcctccccctctcttcctcccttggccaaattttgcgggaaacgcgacgccacccggagaaaccctcctcccgcacctcgcctcccaccctgccaaaaccctcgcccctcctcctcctcctcctcctacgatggccgcgccgacgcctccgcccgccgccgcccccgccgcggcgccaggaccgacgccgccggcgcaagtggtgggcaacgccttcgtgcagcagtactacaacatcctccaccagtcaccggagctcgtcttccgcttctaccaggaggccagccgcatcggccgccccgccaccaccggcgccgacatggacaccgtcaccaccatggaggcgattaacgagaagatcatgtccatggacatcgcgcgggcggagatcaggggggtggacgcgcaggagtcgctatgtggcggtgtgaccgtgctcgtcacgggccacctcacagggaaggacgacgtctgccgcgagttcgcgcagtccttcttcctcgcgccgcaggagaagggttacttcgtgctcaacgacatactacgttatgtcgggcagggtgaggccgacccgtcattgccgccacctcagcagcagccgccggcaccggagttggatgcagtggttgcccctgctgccgccttggcaaatggtactgttgcccctgtggagactgtgcctcgcgagcaggaggcttcgccgcagccagagctggatctctctgagtctgttcctcataccaacgaggaggaggatcccaaggaggaggtttacaacccaccgaatgacgtggaggtgcctgttgtggaggaaacactggttcctgaggtcatagatgaagtgccaaataatgtagcagcctccataccggtttcggctccccctgtaccacatgaggaggcccctaagaagtcgtacgcttcaattgtcaaagtcatgaaagcagttctgccaccaaattccacagttccttacaggcctgcaccaccaaaaccagagaagcaagctcctgctcctgcccagtctgtggctgttgatgctccaactttcagtcctaatcctgagagcagcaacattcaagaccaagaagttgatgcgcttgcggtgtatgtaaaaaatctgcccttacatgccacacctagccaattagaagaggagttcaaaagatttggtactattaaacatgatggtatccaagttagaagccacaagattcaagggttctgctatggcttcatagagtttgaggatgccagctcagttcaaagtgcactagcggcttctcctgtgacgattgatgaccggccatgccacgtcgaagaaaaaagaactcctggttcacgtggtagtagcaggggaaggtttccaccgggtagaggtggtaatttccgaggtgaaggcatgagaggccgtggtagttacactggagggagaggctatggaaggggcgagtacaacaactatcgatctgattttggaggcagaggcggtggtagaggcggctcaggtcgtggaggtgatgttggctaccagcgggttgatcactctggcaccggtggtcgtggtggtgcccgggcagctgcaaagtgagtttggtagctatgcgttggtagaagtttgctatttcattgtcgttgaacgtactaagattcacaaaaatggtgtgtcgtgagctgggttcctgtgcggtcgttgtcagcgtattcaggtcataaattggtgctctccttgttttgtggcaaggaaagcagtggtgatattggttactaattgtagaatattacaatctattcagatgcagtcctagtaagttttgac

SEQ ID NO: 16488 - protein, 543 aa, Triticum aestivum
  peptide (1)..(543): Ceres Seq. ID no. 15178461
  misc_feature (82)..(197): Pfam Name: NTF2 Pfam Description: Nuclear transport factor 2
  misc_feature (58)..(543): NCBI GI NO: 21742151 NR Description: OSJNBa0069D17.2
  misc_feature (69)..(541): NCBI GI NO: 30687772 NR Description: NTF2-containing RNA-binding protein, putative
  misc_feature (82)..(541): NCBI GI NO: 9294171 NR Description: RNA-binding protein-like [Arabidopsis thaliana]
  misc_feature (75)..(519): NCBI GI NO: 34394922 NR Description: putative Ras-GTPase activating protein SH3 domain-binding protein 2
  misc_feature (67)..(525): NCBI GI NO: 31126693 NR Description: putative GAP SH3 binding protein
  misc_feature (222)..(537): NCBI GI NO: 30697455 NR Description: NTF2-containing RNA-binding protein, putative
  misc_feature (75)..(518): NCBI GI NO: 15240057 NR Description: NTF2-containing RNA-binding protein, putative
  misc_feature (222)..(537): NCBI GI NO: 21553535 NR Description: ras-GTPase-activating protein SH3-domain bindingprotein-like
  misc_feature (222)..(537): NCBI GI NO: 30697452 NR Description: NTF2-containing RNA-binding protein, putative
  misc_feature (75)..(350): NCBI GI NO: 30697452 NR Description: NTF2-containing RNA-binding protein, putative
PLSHSRITPAAAAAPPPLFLPWPNFAGNATPPGETLLPHLASHPAKTLAPPPPPPPTMAAPTPPPAAAPAAAPGPTPPAQVVGNAFVQQYYNILHQSPELVFRFYQEASRIGRPATTGADMDTVTTMEAINEKIMSMDIARAEIRGVDAQESLCGGVTVLVTGHLTGKDDVCREFAQSFFLAPQEKGYFVLNDILRYVGQGEADPSLPPPQQQPPAPELDAVVAPAAALANGTVAPVETVPREQEASPQPELDLSESVPHTNEEEDPKEEVYNPPNDVEVPVVEETLVPEVIDEVPNNVAASIPVSAPPVPHEEAPKKSYASIVKVMKAVLPPNSTVPYRPAPPKPEKQAPAPAQSVAVDAPTFSPNPESSNIQDQEVDALAVYVKNLPLHATPSQLEEEFKRFGTIKHDGIQVRSHKIQGFCYGFIEFEDASSVQSALAASPVTIDDRPCHVEEKRTPGSRGSSRGRFPPGRGGNFRGEGMRGRGSYTGGRGYGRGEYNNYRSDFGGRGGGRGGSGRGGDVGYQRVDHSGTGGRGGARAAAK

SEQ ID NO: 16489 - protein, 486 aa, Triticum aestivum
  peptide (1)..(486): Ceres Seq. ID no. 15178462
  misc_feature (25)..(140): Pfam Name: NTF2 Pfam Description: Nuclear transport factor 2
  misc_feature (1)..(486): NCBI GI NO: 21742151 NR Description: OSJNBa0069D17.2
  misc_feature (12)..(484): NCBI GI NO: 30687772 NR Description: NTF2-containing RNA-binding protein, putative
  misc_feature (25)..(484): NCBI GI NO: 9294171 NR Description: RNA-binding protein-like [Arabidopsis thaliana]
  misc_feature (18)..(462): NCBI GI NO: 34394922 NR Description: putative Ras-GTPase activating protein SH3 domain-binding protein 2
  misc_feature (10)..(468): NCBI GI NO: 31126693 NR Description: putative GAP SH3 binding protein
  misc_feature (165)..(480): NCBI GI NO: 30697455 NR Description: NTF2-containing RNA-binding protein, putative
  misc_feature (18)..(461): NCBI GI NO: 15240057 NR Description: NTF2-containing RNA-binding protein, putative
  misc_feature (165)..(480): NCBI GI NO: 21553535 NR Description: ras-GTPase-activating protein SH3-domain bindingprotein-like
  misc_feature (165)..(480): NCBI GI NO: 30697452 NR Description: NTF2-containing RNA-binding protein, putative
  misc_feature (18)..(293): NCBI GI NO: 30697452 NR Description: NTF2-containing RNA-binding protein, putative
MAAPTPPPAAAPAAAPGPTPPAQVVGNAFVQQYYNILHQSPELVFRFYQEASRIGRPATTGADMDTVTTMEAINEKIMSMDIARAEIRGVDAQESLCGGVTVLVTGHLTGKDDVCREFAQSFFLAPQEKGYFVLNDILRYVGQGEADPSLPPPQQQPPAPELDAVVAPAAALANGTVAPVETVPREQEASPQPELDLSESVPHTNEEEDPKEEVYNPPNDVEVPVVEETLVPEVIDEVPNNVAASIPVSAPPVPHEEAPKKSYASIVKVMKAVLPPNSTVPYRPAPPKPEKQAPAPAQSVAVDAPTFSPNPESSNIQDQEVDALAVYVKNLPLHATPSQLEEEFKRFGTIKHDGIQVRSHKIQGFCYGFIEFEDASSVQSALAASPVTIDDRPCHVEEKRTPGSRGSSRGRFPPGRGGNFRGEGMRGRGSYTGGRGYGRGEYNNYRSDFGGRGGGRGGSGRGGDVGYQRVDHSGTGGRGGARAAAK

SEQ ID NO: 16490 - protein, 423 aa, Triticum aestivum
  peptide (1)..(423): Ceres Seq. ID no. 15178463
  misc_feature (1)..(77): Pfam Name: NTF2 Pfam Description: Nuclear transport factor 2
  misc_feature (1)..(423): NCBI GI NO: 21742151 NR Description: OSJNBa0069D17.2
  misc_feature (1)..(421): NCBI GI NO: 30687772 NR Description: NTF2-containing RNA-binding protein, putative
  misc_feature (1)..(421): NCBI GI NO: 9294171 NR Description: RNA-binding protein-like [Arabidopsis thaliana]
  misc_feature (1)..(399): NCBI GI NO: 34394922 NR Description: putative Ras-GTPase activating protein SH3 domain-binding protein 2
  misc_feature (1)..(405): NCBI GI NO: 31126693 NR Description: putative GAP SH3 binding protein
  misc_feature (102)..(417): NCBI GI NO: 30697455 NR Description: NTF2-containing RNA-binding protein, putative
  misc_feature (1)..(398): NCBI GI NO: 15240057 NR Description: NTF2-containing RNA-binding protein, putative
  misc_feature (102)..(417): NCBI GI NO: 21553535 NR Description: ras-GTPase-activating protein SH3-domain bindingprotein-like
  misc_feature (102)..(417): NCBI GI NO: 30697452 NR Description: NTF2-containing RNA-binding protein, putative
  misc_feature (1)..(230): NCBI GI NO: 30697452 NR Description: NTF2-containing RNA-binding protein, putative
MDTVTTMEAINEKIMSMDIARAEIRGVDAQESLCGGVTVLVTGHLTGKDDVCREFAQSFFLAPQEKGYFVLNDILRYVGQGEADPSLPPPQQQPPAPELDAVVAPAAALANGTVAPVETVPREQEASPQPELDLSESVPHTNEEEDPKEEVYNPPNDVEVPVVEETLVPEVIDEVPNNVAASIPVSAPPVPHEEAPKKSYASIVKVMKAVLPPNSTVPYRPAPPKPEKQAPAPAQSVAVDAPTFSPNPESSNIQDQEVDALAVYVKNLPLHATPSQLEEEFKRFGTIKHDGIQVRSHKIQGFCYGFIEFEDASSVQSALAASPVTIDDRPCHVEEKRTPGSRGSSRGRFPPGRGGNFRGEGMRGRGSYTGGRGYGRGEYNNYRSDFGGRGGGRGGSGRGGDVGYQRVDHSGTGGRGGARAAAK

SEQ ID NO: 16491 - DNA, 1380 bp, Triticum aestivum
  misc_feature (1)..(1380): Ceres Seq. ID no. 12784228
actctcccccgaaccttctagaaccctacccacccatggcggcctcgctcctctcgcgcgccgcctcggccgccttcgccctccgcggcggcgcccggctcctccccaagggaagggtcggatgggcgcgcgcggcggaggtcggctgcggggcgtcgctgtcgccgtcgatgacgcggttcgggatcgccgcgcgcttcaacgccacctcgtcggccgtgtcggaggccgccgccgccgcgtcgggcgccgtccacgcggtgccgcggacggagcctgtcgtgtccgccgagtggctccacgccaacctcagggaccccgatgtgaaggtacttgatgcctcttggtatatgcctgcagaacaaaggaatccccttcaggagtaccaggtggctcatatccctggtgccttattctttgatgtcgatggaatatctgacagagcatctagtctgccacacatgctgccatctgagaaagcattttctgctgctgtgtcttctcttggcatctacaacaaagatggaatagtagtttatgatggaaagggtctatttagcgctgctcgtgtttggtggatgtttcgtgcttatggacatgacaaagtttgggttttggatggaggtttgccccaatggcgtgcttctgggtatgatgtcgaatcaagtgcctctagtgatgctatcttaaaagccagtgctgctagtgaagcaatcgagaaagtttatcaggggcaatcggttggtcccaccacatttgaagcgaagttgcagcctcatcttctttggaatcttggtcaggtgaaagagaacatcgagacccagacacatcaacttatagatgctcgagggaagcctagatttgatggtgcagttccagagccacgcaagggaataagaagcgggcatgtgcctgggagcaaatgcgttccttttcctcaggtccttgacagtacacagaagctattgcctgcagatgatctccgtaagcgattcgagcaagaaggtatatcacttgatcaacccattgtgacctcttgcggcactggtgtgacagcatgtgtattggctttgggccttcatcgcctcggcaaaactgatgttgccgtgtacgatggatcatggactgaatggggtgctcaccctgacactccagttgctactgctgtttagtctcacgcggcgtgtatggaggaccatcttttgtacccgcacttctcagcgatgtatgaaggtcagaaggcaaaggaaactgaagagtgtgggtgggtgtaaggttgtggaagcgatgctgttcggcgttttcaatgtaaattatcgaaacagagaaaaattgaatacatactgtgtgaatcaatagttgatgatccacctttctgtg

SEQ ID NO: 16492 - protein, 389 aa, Triticum aestivum
  peptide (1)..(389): Ceres Seq. ID no. 12784229
  misc_feature (95)..(215): Pfam Name: Pfam Description:  Rhodanese-like domain
  misc_feature (12)..(387): NCBI GI NO: 4406372 NR Description: thiosulfate sulfurtransferase [Datisca glomerata]
  misc_feature (12)..(385): NCBI GI NO: 18412307 NR Description: mercaptopyruvate sulfurtransferase
  misc_feature (12)..(385): NCBI GI NO: 25288794 NR Description: thiosulfate sulfurtransferase (EC 2
  misc_feature (73)..(385): NCBI GI NO: 18394364 NR Description: mercaptopyruvate sulfurtransferase
  misc_feature (73)..(385): NCBI GI NO: 30684873 NR Description: mercaptopyruvate sulfurtransferase (Mst2/Rdh2)
  misc_feature (73)..(385): NCBI GI NO: 25456716 NR Description: thiosulfate sulfurtransferase (EC 2.8.1.1)
  misc_feature (73)..(385): NCBI GI NO: 25288797 NR Description: hypothetical protein F3O9.26
  misc_feature (91)..(388): NCBI GI NO: 14571545 NR Description: thiosulfate transferase [Triticum aestivum]
  misc_feature (88)..(243): NCBI GI NO: 27381801 NR Description: thiosulfate sulfurtransferase
  misc_feature (249)..(387): NCBI GI NO: 27381801 NR Description: thiosulfate sulfurtransferase
SPPNLLEPYPPMAASLLSRAASAAFALRGGARLLPKGRVGWARAAEVGCGASLSPSMTRFGIAARFNATSSAVSEAAAAASGAVHAVPRTEPVVSAEWLHANLRDPDVKVLDASWYMPAEQRNPLQEYQVAHIPGALFFDVDGISDRASSLPHMLPSEKAFSAAVSSLGIYNKDGIVVYDGKGLFSAARVWWMFRAYGHDKVWVLDGGLPQWRASGYDVESSASSDAILKASAASEAIEKVYQGQSVGPTTFEAKLQPHLLWNLGQVKENIETQTHQLIDARGKPRFDGAVPEPRKGIRSGHVPGSKCVPFPQVLDSTQKLLPADDLRKRFEQEGISLDQPIVTSCGTGVTACVLALGLHRLGKTDVAVYDGSWTEWGAHPDTPVATAV

SEQ ID NO: 16493 - protein, 378 aa, Triticum aestivum
  peptide (1)..(378): Ceres Seq. ID no. 12784230
  misc_feature (84)..(204): Pfam Name: Pfam Description:  Rhodanese-like domain
  misc_feature (1)..(376): NCBI GI NO: 4406372 NR Description: thiosulfate sulfurtransferase [Datisca glomerata]
  misc_feature (1)..(374): NCBI GI NO: 18412307 NR Description: mercaptopyruvate sulfurtransferase
  misc_feature (1)..(374): NCBI GI NO: 25288794 NR Description: thiosulfate sulfurtransferase (EC 2
  misc_feature (62)..(374): NCBI GI NO: 18394364 NR Description: mercaptopyruvate sulfurtransferase
  misc_feature (62)..(374): NCBI GI NO: 30684873 NR Description: mercaptopyruvate sulfurtransferase (Mst2/Rdh2)
  misc_feature (62)..(374): NCBI GI NO: 25456716 NR Description: thiosulfate sulfurtransferase (EC 2.8.1.1)
  misc_feature (62)..(374): NCBI GI NO: 25288797 NR Description: hypothetical protein F3O9.26
  misc_feature (80)..(377): NCBI GI NO: 14571545 NR Description: thiosulfate transferase [Triticum aestivum]
  misc_feature (77)..(232): NCBI GI NO: 27381801 NR Description: thiosulfate sulfurtransferase
  misc_feature (238)..(376): NCBI GI NO: 27381801 NR Description: thiosulfate sulfurtransferase
MAASLLSRAASAAFALRGGARLLPKGRVGWARAAEVGCGASLSPSMTRFGIAARFNATSSAVSEAAAAASGAVHAVPRTEPVVSAEWLHANLRDPDVKVLDASWYMPAEQRNPLQEYQVAHIPGALFFDVDGISDRASSLPHMLPSEKAFSAAVSSLGIYNKDGIVVYDGKGLFSAARVWWMFRAYGHDKVWVLDGGLPQWRASGYDVESSASSDAILKASAASEAIEKVYQGQSVGPTTFEAKLQPHLLWNLGQVKENIETQTHQLIDARGKPRFDGAVPEPRKGIRSGHVPGSKCVPFPQVLDSTQKLLPADDLRKRFEQEGISLDQPIVTSCGTGVTACVLALGLHRLGKTDVAVYDGSWTEWGAHPDTPVATAV

SEQ ID NO: 16494 - protein, 333 aa, Triticum aestivum
  peptide (1)..(333): Ceres Seq. ID no. 12784231
  misc_feature (39)..(159): Pfam Name: Pfam Description:  Rhodanese-like domain
  misc_feature (1)..(331): NCBI GI NO: 4406372 NR Description: thiosulfate sulfurtransferase [Datisca glomerata]
  misc_feature (1)..(329): NCBI GI NO: 18412307 NR Description: mercaptopyruvate sulfurtransferase
  misc_feature (1)..(329): NCBI GI NO: 25288794 NR Description: thiosulfate sulfurtransferase (EC 2
  misc_feature (17)..(329): NCBI GI NO: 18394364 NR Description: mercaptopyruvate sulfurtransferase
  misc_feature (17)..(329): NCBI GI NO: 30684873 NR Description: mercaptopyruvate sulfurtransferase (Mst2/Rdh2)
  misc_feature (17)..(329): NCBI GI NO: 25456716 NR Description: thiosulfate sulfurtransferase (EC 2.8.1.1)
  misc_feature (17)..(329): NCBI GI NO: 25288797 NR Description: hypothetical protein F3O9.26
  misc_feature (35)..(332): NCBI GI NO: 14571545 NR Description: thiosulfate transferase [Triticum aestivum]
  misc_feature (32)..(187): NCBI GI NO: 27381801 NR Description: thiosulfate sulfurtransferase
  misc_feature (193)..(331): NCBI GI NO: 27381801 NR Description: thiosulfate sulfurtransferase
MTRFGIAARFNATSSAVSEAAAAASGAVHAVPRTEPVVSAEWLHANLRDPDVKVLDASWYMPAEQRNPLQEYQVAHIPGALFFDVDGISDRASSLPHMLPSEKAFSAAVSSLGIYNKDGIVVYDGKGLFSAARVWWMFRAYGHDKVWVLDGGLPQWRASGYDVESSASSDAILKASAASEAIEKVYQGQSVGPTTFEAKLQPHLLWNLGQVKENIETQTHQLIDARGKPRFDGAVPEPRKGIRSGHVPGSKCVPFPQVLDSTQKLLPADDLRKRFEQEGISLDQPIVTSCGTGVTACVLALGLHRLGKTDVAVYDGSWTEWGAHPDTPVATAV

SEQ ID NO: 16495 - DNA, 1750 bp, Triticum aestivum
  misc_feature (1)..(1750): Ceres Seq. ID no. 13657460
gcaaccaaaatcaccatgaaatcttactaattaagcagacaatattattgcaccagtgcagatcatgttcatatatataagctctatatagaaggcagtgagcaagcaaaccctaggtcaccgtcgtcgactgttcgtagtcgccggtatgcatgcatgcacagagtagaaggcgcgcgcgccaatggcacctactgccacgccgacacggacagcagcggccgcgtctgccacccgaggaagcacgcgccgcgggactcctgcaccaggtatccctccgacgggtagtgcagccgcagcagtagccgcgcctgggaaacggcgaacgcgctgagcggccgcgcggcgaacccagtgccgcgtgcggcggtagcccaccgctcgagcccgcgccaccacctcccgcctgtcccgcccaccgcggcctcgatctccctgccgaggacctcctgctccaccgccagcctctcccggctccccggcggcaccgtcgcctcaagcgcctcgaacaccgccgaatagtgatccatggccacaccaacacggcgcgggagctcgtcgatggggtcgatctctcctccgctcgcctccctctcggcgacggtcaccacggcgggggccatggccttcacccacttgaggaacgctgcgagctcgtcctgcccgccgagcttgtgcaagaacagcacgcagttcacggccagcgtctcgtcgggatgtagctccaggctcgtgacagcggtgctcggggtggtgctcgtgccggcgacgtggtgcgtgctggcggcgcaggagaggaggagcggggtgaagtggaaagggaggtggatcgagcgggcgaaagcgcgtagccggttgcctgtacgaaggagtgtgtcgcggtcggcgccagcgccggtgatgcggacctcgggcgggcccagcgccgggtcggctcgttcggcgatcgcctggaggagtggcggccactgcacgccgtgcgccgcgtcgaggtcgaggatgtggacgcggcgcgaaccctccacggcctcgaggatggcctggttggccgtcaggtgggcgaaccgcaggaacggcgcgatctggttgaacgccaggtacgccccggacggtgccggcgctgtcccagctggcggccgcggggagaacggcagcccggccttggagtccacgcggagcacgagcgcgcgcgcgaagtggtacgcgaggcggtcggtggcgtcgccgcgcggggacgccgcggagaggaggatctcggcagcgcggcgcgcggcggcgaggtccccgcgctgcagcaggtcggcgcaggccagcacgaggtcccgcgtggacggtgccgccgcgagcgcacgcccgccgccgcccagcaaggcagcgtcgcccccgccctcgccgctgctgttcctgaggtcggcgttgctgttgttgtcggtgtcggaggacgaggaagagtggagtgagctgatcatgtcttcttcttcgctcgcggcgccctgggactaggatcgtcgtgagcggccggaggtggaggagaagacggagacggagacggagcatgagggcgcgcatctctgggggggtttaatagggacgatgagggcgcacgtccagcagcatctgggctcgcagcttccttgacaggacatcatctgccaaaaatacacaagtatgctgctgctgctagctagcttgtgtgagtgagtgagaggggagaacccagcagcaccatcttttcgattaggatgttcta

SEQ ID NO: 16496 - protein, 324 aa, Triticum aestivum
  peptide (1)..(324): Ceres Seq. ID no. 13657461
  misc_feature (1)..(321): NCBI GI NO: 15901602 NR Description: cell wall surface anchor family protein
  misc_feature (1)..(288): NCBI GI NO: 15901602 NR Description: cell wall surface anchor family protein
  misc_feature (1)..(288): NCBI GI NO: 15901602 NR Description: cell wall surface anchor family protein
  misc_feature (1)..(321): NCBI GI NO: 15901602 NR Description: cell wall surface anchor family protein
  misc_feature (1)..(322): NCBI GI NO: 13592175 NR Description: ppg3 [Leishmania major]
  misc_feature (1)..(322): NCBI GI NO: 13592175 NR Description: ppg3 [Leishmania major]
  misc_feature (1)..(284): NCBI GI NO: 15901602 NR Description: cell wall surface anchor family protein
  misc_feature (1)..(284): NCBI GI NO: 15901602 NR Description: cell wall surface anchor family protein
  misc_feature (1)..(284): NCBI GI NO: 15901602 NR Description: cell wall surface anchor family protein
  misc_feature (1)..(288): NCBI GI NO: 13592175 NR Description: ppg3 [Leishmania major]
MATPTRRGSSSMGSISPPLASLSATVTTAGAMAFTHLRNAASSSCPPSLCKNSTQFTASVSSGCSSRLVTAVLGVVLVPATWCVLAAQERRSGVKWKGRWIERAKARSRLPVRRSVSRSAPAPVMRTSGGPSAGSARSAIAWRSGGHCTPCAASRSRMWTRREPSTASRMAWLAVRWANRRNGAIWLNARYAPDGAGAVPAGGRGENGSPALESTRSTSARAKWYARRSVASPRGDAAERRISAARRAAARSPRCSRSAQASTRSRVDGAAASARPPPPSKAASPPPSPLLFLRSALLLLSVSEDEEEWSELIMSSSSLAAPWD

SEQ ID NO: 16497 - protein, 313 aa, Triticum aestivum
  peptide (1)..(313): Ceres Seq. ID no. 13657462
  misc_feature (1)..(310): NCBI GI NO: 15901602 NR Description: cell wall surface anchor family protein
  misc_feature (1)..(277): NCBI GI NO: 15901602 NR Description: cell wall surface anchor family protein
  misc_feature (1)..(277): NCBI GI NO: 15901602 NR Description: cell wall surface anchor family protein
  misc_feature (1)..(310): NCBI GI NO: 15901602 NR Description: cell wall surface anchor family protein
  misc_feature (1)..(311): NCBI GI NO: 13592175 NR Description: ppg3 [Leishmania major]
  misc_feature (1)..(311): NCBI GI NO: 13592175 NR Description: ppg3 [Leishmania major]
  misc_feature (1)..(273): NCBI GI NO: 15901602 NR Description: cell wall surface anchor family protein
  misc_feature (1)..(273): NCBI GI NO: 15901602 NR Description: cell wall surface anchor family protein
  misc_feature (1)..(273): NCBI GI NO: 15901602 NR Description: cell wall surface anchor family protein
  misc_feature (1)..(277): NCBI GI NO: 13592175 NR Description: ppg3 [Leishmania major]
MGSISPPLASLSATVTTAGAMAFTHLRNAASSSCPPSLCKNSTQFTASVSSGCSSRLVTAVLGVVLVPATWCVLAAQERRSGVKWKGRWIERAKARSRLPVRRSVSRSAPAPVMRTSGGPSAGSARSAIAWRSGGHCTPCAASRSRMWTRREPSTASRMAWLAVRWANRRNGAIWLNARYAPDGAGAVPAGGRGENGSPALESTRSTSARAKWYARRSVASPRGDAAERRISAARRAAARSPRCSRSAQASTRSRVDGAAASARPPPPSKAASPPPSPLLFLRSALLLLSVSEDEEEWSELIMSSSSLAAPWD

SEQ ID NO: 16498 - protein, 293 aa, Triticum aestivum
  peptide (1)..(293): Ceres Seq. ID no. 13657463
  misc_feature (1)..(290): NCBI GI NO: 15901602 NR Description: cell wall surface anchor family protein
  misc_feature (1)..(257): NCBI GI NO: 15901602 NR Description: cell wall surface anchor family protein
  misc_feature (1)..(257): NCBI GI NO: 15901602 NR Description: cell wall surface anchor family protein
  misc_feature (1)..(290): NCBI GI NO: 15901602 NR Description: cell wall surface anchor family protein
  misc_feature (1)..(291): NCBI GI NO: 13592175 NR Description: ppg3 [Leishmania major]
  misc_feature (1)..(291): NCBI GI NO: 13592175 NR Description: ppg3 [Leishmania major]
  misc_feature (1)..(253): NCBI GI NO: 15901602 NR Description: cell wall surface anchor family protein
  misc_feature (1)..(253): NCBI GI NO: 15901602 NR Description: cell wall surface anchor family protein
  misc_feature (1)..(253): NCBI GI NO: 15901602 NR Description: cell wall surface anchor family protein
  misc_feature (1)..(257): NCBI GI NO: 13592175 NR Description: ppg3 [Leishmania major]
MAFTHLRNAASSSCPPSLCKNSTQFTASVSSGCSSRLVTAVLGVVLVPATWCVLAAQERRSGVKWKGRWIERAKARSRLPVRRSVSRSAPAPVMRTSGGPSAGSARSAIAWRSGGHCTPCAASRSRMWTRREPSTASRMAWLAVRWANRRNGAIWLNARYAPDGAGAVPAGGRGENGSPALESTRSTSARAKWYARRSVASPRGDAAERRISAARRAAARSPRCSRSAQASTRSRVDGAAASARPPPPSKAASPPPSPLLFLRSALLLLSVSEDEEEWSELIMSSSSLAAPWD

SEQ ID NO: 16499 - DNA, 1854 bp, Triticum aestivum
  misc_feature (1)..(1854): Ceres Seq. ID no. 13657677
cgcctccaccgccccactcacaaccttatcgtcgccgcggcctgagcacagatggcgccgccggcagcagcgccgcctcccgccatgtccgccctccccaccttcgcctcctcccacccatacccttccctcaccacgcccaaaaccgccgccctcaaaccgcgcctcaacctggcctatgccggcgccgccgcggcccccaatgccgtcccccaccgcagcgccgccgcctccaacgaccgcctgcggggtctggtccgccgcggcgacctcgaggaggccctccggctcgtcgagtccatggcgggcatcgagccgtccgcggccgccgcggggccctgcgccgcgctcatcaagaagctgtgcgcgtccgggcgcaccgcggaggcccggcgcgtgctggccgcctgcgagcccgacgtcatggcctacaacgcgatggtcgccgggtactgcgtcacggggcagctcgacaacgcccgccggctcgtcgcggcgatgcccatggagcccgacgcctacacctacaacaccctcatccgcggcctgtgcgggcgcggcaggaccgacaacgccctggcgggtgctcgacgatatgctccgccgggggtgcgtgcccgacgtggtcacctacaccatcctgctcgaggccacctgcaagaggagcgggtacaagcaggccatgaagctgctcgacgagatgcgcgacaaggggtgcgccccggacatcatcacctacaacgtcgtggtcaacggcatttgccaagaggggcgagtcgatgatgccatggagttcttgaagagcctgctgtcctatggatgcgagccaaacacggtcagctacaacattgtgctgaagggcctgtgcaccgcagagcggtgggaggacgccgagaagctcatggctgagatgagtcgcaaggggtgccccccaaatgtggtgacattcaatatgctcatcagcttcttgtgccggagaggattggtcgagcctgcgatggagattcttgagcagatcccaaagtacgggtgcacgcccaattcgttgagttacaacccaatacttcacgcattctgcaagcaaaagaagatggacagagccatggcgtttgtggaactgatggtgtccagtggctgttaccccgacatcgtctcatacaacactcttcttaccgcgctgtgtcgcggcggggaagttgatgccgctgttgagctgcttcatcaactgaaggacaaaggctgcacccctgtcttgattagctacaacaccgtcatcgatggccttaccaaagccggcaagacagaggaagctttagaactgctgaatgagatggttaccaaagggctccaaccggacataatcacttactcgacaatatcttctggtctttgtcgggaagacagaatcgaagaagcgatcaaagcattttgtaaagtgcaagacatgggcataaggcccaacactgtgctgtacaacgcgatacttcttgggctctgcaaaaggcgtgaaacacacagtgctatcgatctgtttacttacatgatatcgaatggctgcatgccaaatgaatcgacctacactatattgattgaaggcttggcttacgaaggcttggtcaaggaggcacgggaaatgctggctgagttgtgctccagaggagtggtgagtaagactttggtaaataagggagccatccggttacttgatgcttgaaggaactatgcatacttaaaaaggttgagcagaccagtaggagtgtgtggatccaggaatatgttcttctgcatcttcggcagtacgtagagatacttcattgttcttaatgatgtcttattcgatgctgccttcttatg

SEQ ID NO: 16500 - protein, 570 aa, Triticum aestivum
  peptide (1)..(570): Ceres Seq. ID no. 15219871
  misc_feature (5)..(189): Pfam Name: Pfam Description:  Formin Homology 2 Domain
  misc_feature (195)..(558): NCBI GI NO: 15218325 NR Description: pentatricopeptide (PPR) repeat-containing protein
  misc_feature (195)..(553): NCBI GI NO: 34910106 NR Description: B1100D10.28
  misc_feature (194)..(562): NCBI GI NO: 34910106 NR Description: B1100D10.28
  misc_feature (194)..(557): NCBI GI NO: 18397002 NR Description: pentatricopeptide (PPR) repeat-containing protein
  misc_feature (195)..(553): NCBI GI NO: 15218325 NR Description: pentatricopeptide (PPR) repeat-containing protein
  misc_feature (195)..(560): NCBI GI NO: 34896658 NR Description: putative membrane-associated salt-inducible protein
  misc_feature (193)..(520): NCBI GI NO: 34910106 NR Description: B1100D10.28
  misc_feature (174)..(524): NCBI GI NO: 15218325 NR Description: pentatricopeptide (PPR) repeat-containing protein
  misc_feature (195)..(563): NCBI GI NO: 34896658 NR Description: putative membrane-associated salt-inducible protein
  misc_feature (194)..(570): NCBI GI NO: 34394163 NR Description: putative fertility restorer homologue
ASTAPLTTLSSPRPEHRWRRRQQRRLPPCPPSPPSPPPTHTLPSPRPKPPPSNRASTWPMPAPPRPPMPSPTAAPPPPTTACGVWSAAATSRRPSGSSSPWRASSRPRPPRGPAPRSSRSCARPGAPRRPGACWPPASPTSWPTTRWSPGTASRGSSTTPAGSSRRCPWSPTPTPTTPSSAACAGAAGPTTPWRVLDDMLRRGCVPDVVTYTILLEATCKRSGYKQAMKLLDEMRDKGCAPDIITYNVVVNGICQEGRVDDAMEFLKSLLSYGCEPNTVSYNIVLKGLCTAERWEDAEKLMAEMSRKGCPPNVVTFNMLISFLCRRGLVEPAMEILEQIPKYGCTPNSLSYNPILHAFCKQKKMDRAMAFVELMVSSGCYPDIVSYNTLLTALCRGGEVDAAVELLHQLKDKGCTPVLISYNTVIDGLTKAGKTEEALELLNEMVTKGLQPDIITYSTISSGLCREDRIEEAIKAFCKVQDMGIRPNTVLYNAILLGLCKRRETHSAIDLFTYMISNGCMPNESTYTILIEGLAYEGLVKEAREMLAELCSRGVVSKTLVNKGAIRLLDA

SEQ ID NO: 16501 - protein, 511 aa, Triticum aestivum
  peptide (1)..(511): Ceres Seq. ID no. 15219872
  misc_feature (1)..(130): Pfam Name: Pfam Description:  Formin Homology 2 Domain
  misc_feature (136)..(499): NCBI GI NO: 15218325 NR Description: pentatricopeptide (PPR) repeat-containing protein
  misc_feature (136)..(494): NCBI GI NO: 34910106 NR Description: B1100D10.28
  misc_feature (135)..(503): NCBI GI NO: 34910106 NR Description: B1100D10.28
  misc_feature (135)..(498): NCBI GI NO: 18397002 NR Description: pentatricopeptide (PPR) repeat-containing protein
  misc_feature (136)..(494): NCBI GI NO: 15218325 NR Description: pentatricopeptide (PPR) repeat-containing protein
  misc_feature (136)..(501): NCBI GI NO: 34896658 NR Description: putative membrane-associated salt-inducible protein
  misc_feature (134)..(461): NCBI GI NO: 34910106 NR Description: B1100D10.28
  misc_feature (115)..(465): NCBI GI NO: 15218325 NR Description: pentatricopeptide (PPR) repeat-containing protein
  misc_feature (136)..(504): NCBI GI NO: 34896658 NR Description: putative membrane-associated salt-inducible protein
  misc_feature (135)..(511): NCBI GI NO: 34394163 NR Description: putative fertility restorer homologue
MPAPPRPPMPSPTAAPPPPTTACGVWSAAATSRRPSGSSSPWRASSRPRPPRGPAPRSSRSCARPGAPRRPGACWPPASPTSWPTTRWSPGTASRGSSTTPAGSSRRCPWSPTPTPTTPSSAACAGAAGPTTPWRVLDDMLRRGCVPDVVTYTILLEATCKRSGYKQAMKLLDEMRDKGCAPDIITYNVVVNGICQEGRVDDAMEFLKSLLSYGCEPNTVSYNIVLKGLCTAERWEDAEKLMAEMSRKGCPPNVVTFNMLISFLCRRGLVEPAMEILEQIPKYGCTPNSLSYNPILHAFCKQKKMDRAMAFVELMVSSGCYPDIVSYNTLLTALCRGGEVDAAVELLHQLKDKGCTPVLISYNTVIDGLTKAGKTEEALELLNEMVTKGLQPDIITYSTISSGLCREDRIEEAIKAFCKVQDMGIRPNTVLYNAILLGLCKRRETHSAIDLFTYMISNGCMPNESTYTILIEGLAYEGLVKEAREMLAELCSRGVVSKTLVNKGAIRLLDA

SEQ ID NO: 16502 - protein, 503 aa, Triticum aestivum
  peptide (1)..(503): Ceres Seq. ID no. 15219873
  misc_feature (1)..(122): Pfam Name: Pfam Description:  Formin Homology 2 Domain
  misc_feature (128)..(491): NCBI GI NO: 15218325 NR Description: pentatricopeptide (PPR) repeat-containing protein
  misc_feature (128)..(486): NCBI GI NO: 34910106 NR Description: B1100D10.28
  misc_feature (127)..(495): NCBI GI NO: 34910106 NR Description: B1100D10.28
  misc_feature (127)..(490): NCBI GI NO: 18397002 NR Description: pentatricopeptide (PPR) repeat-containing protein
  misc_feature (128)..(486): NCBI GI NO: 15218325 NR Description: pentatricopeptide (PPR) repeat-containing protein
  misc_feature (128)..(493): NCBI GI NO: 34896658 NR Description: putative membrane-associated salt-inducible protein
  misc_feature (126)..(453): NCBI GI NO: 34910106 NR Description: B1100D10.28
  misc_feature (107)..(457): NCBI GI NO: 15218325 NR Description: pentatricopeptide (PPR) repeat-containing protein
  misc_feature (128)..(496): NCBI GI NO: 34896658 NR Description: putative membrane-associated salt-inducible protein
  misc_feature (127)..(503): NCBI GI NO: 34394163 NR Description: putative fertility restorer homologue
MPSPTAAPPPPTTACGVWSAAATSRRPSGSSSPWRASSRPRPPRGPAPRSSRSCARPGAPRRPGACWPPASPTSWPTTRWSPGTASRGSSTTPAGSSRRCPWSPTPTPTTPSSAACAGAAGPTTPWRVLDDMLRRGCVPDVVTYTILLEATCKRSGYKQAMKLLDEMRDKGCAPDIITYNVVVNGICQEGRVDDAMEFLKSLLSYGCEPNTVSYNIVLKGLCTAERWEDAEKLMAEMSRKGCPPNVVTFNMLISFLCRRGLVEPAMEILEQIPKYGCTPNSLSYNPILHAFCKQKKMDRAMAFVELMVSSGCYPDIVSYNTLLTALCRGGEVDAAVELLHQLKDKGCTPVLISYNTVIDGLTKAGKTEEALELLNEMVTKGLQPDIITYSTISSGLCREDRIEEAIKAFCKVQDMGIRPNTVLYNAILLGLCKRRETHSAIDLFTYMISNGCMPNESTYTILIEGLAYEGLVKEAREMLAELCSRGVVSKTLVNKGAIRLLDA

SEQ ID NO: 16503 - DNA, 1047 bp, Triticum aestivum
  misc_feature (1)..(1047): Ceres Seq. ID no. 12619999
  misc_feature (319)..(319): n is a, c, t, g, unknown, or other
gccgaagcgaaccgcccccagatcagttcgaccacgtagccacgtctccttccttccgaagtaaacagaggaggaaatcccccctctctccctcgtcgctgctcccctccaaatcccctgaaccccgcctctccccggagtagctgctgcggccgcggcggaggagagatgtcgtacgcctacctcttcaagtacatcatcatcggcgacacaggtgtcggcaagtcgtgcctgctgctgcagttcaccgacaagcgcttccagcccgtccacgacctcaccatcggcgtcgagttcggcgcccggatgatcaccatcngacaacaagcccatcaagctccagatttgggacacggcaggccaggagtcattcagatcgataactagatcatactacaggggagctgctggtgctcttttggtttatgacatcaccaggagggaaacctttaatcatcttgcaagctggctggaagatgcaaggcaacatgcaaatgccaacatgacaataatgctagttggaaacaaatgtgacctatcccataggcgtgccgtgagcttcgaggaaggcgagcagtttgccaaggagaatggtctcatctttatggaggcatctgcaaaaactgcacaaaatgtcgaggagggctttgtcaagactgctggagcaatatacaagaaaattcaggatggtgtctttgatgtatctaatgagtcgtatggaatcaaagttggctatgcagttcctggccaagctggaggtgctggtgcttcgtcttcccaaggtggcagctgctgcggctaatggaacgatccatggtgtacaaaatcgcatggcatgtgttacaatacctgttacattatttcgagttgcgagtgattgtaactccagggtgctttgttatttcacgcgcctatggattatgttccagtgagccagtcaaaataggttcagttcatttccttatactgtatacaatcactgtaatccatcagatgcttccagccgtgtcatttaggattcacgaattatatccatttgcatgtgtg

SEQ ID NO: 16504 - protein, 113 aa, Triticum aestivum
  peptide (1)..(113): Ceres Seq. ID no. 12620000
MVSSLWRHLQKLHKMSRRALSRLLEQYTRKFRMVSLMYLMSRMESKLAMQFLAKLEVLVLRLPKVAAAAANGTIHGVQNRMACVTIPVTLFRVASDCNSRVLCYFTRLWIMFQ

SEQ ID NO: 16505 - protein, 99 aa, Triticum aestivum
  peptide (1)..(99): Ceres Seq. ID no. 12620001
MSRRALSRLLEQYTRKFRMVSLMYLMSRMESKLAMQFLAKLEVLVLRLPKVAAAAANGTIHGVQNRMACVTIPVTLFRVASDCNSRVLCYFTRLWIMFQ

SEQ ID NO: 16506 - protein, 99 aa, Triticum aestivum
  peptide (1)..(99): Ceres Seq. ID no. 12620002
  misc_feature (1)..(58): Pfam Name: Pfam Description:  Ras family
  misc_feature (1)..(98): NCBI GI NO: 1346957 NR Description: RAS-RELATED PROTEIN RAB-2-B
  misc_feature (1)..(98): NCBI GI NO: 1346956 NR Description: RAS-RELATED PROTEIN RAB-2-A
  misc_feature (1)..(98): NCBI GI NO: 4837727 NR Description: small GTP binding protein Rab2
  misc_feature (1)..(98): NCBI GI NO: 38344743 NR Description: OSJNBa0089K21.1
  misc_feature (1)..(98): NCBI GI NO: 7438438 NR Description: GTP-binding protein yptm3 - maize
  misc_feature (1)..(99): NCBI GI NO: 15235981 NR Description: GTP-binding protein
  misc_feature (1)..(98): NCBI GI NO: 16755592 NR Description: small GTPase Rab2 [Nicotiana tabacum]
  misc_feature (1)..(98): NCBI GI NO: 1370176 NR Description: RAB2A [Lotus japonicus]
  misc_feature (1)..(95): NCBI GI NO: 7438379 NR Description: GTP-binding protein RAB2A - Arabidopsis thaliana
  misc_feature (1)..(98): NCBI GI NO: 7438383 NR Description: GTP-binding protein rab2 - soybean
MTIMLVGNKCDLSHRRAVSFEEGEQFAKENGLIFMEASAKTAQNVEEGFVKTAGAIYKKIQDGVFDVSNESYGIKVGYAVPGQAGGAGASSSQGGSCCG

SEQ ID NO: 16507 - DNA, 2023 bp, Triticum aestivum
  misc_feature (1)..(2023): Ceres Seq. ID no. 14302458
gttagatctctgcttacagtagccgagtccccactgtgtagcgtagtgtgttctcttctcttctcccgtcacgcccaccccccttcttcccccctcactctccctcccacactctcagcagccgccgcccaagctgagagggcggggcacacacagaggcacgcatccggccagcagaccagcacggtgcgagcaatggagtatgagaggattcacaagccccaggcaggcgccctttctcccacaaagctgaggatgaagctcctgggagcccacaaccgcgtgagggtcatcagcagcagctcgtcgcgaacatcgccttcaaagaacgccgagccatcgctagcgcacaacagattattagtatgcgatgttcttgacgaagtttcagacagctccggtgcctccaaatgccctgcagcagtcagcaacaccgaagttatagacaaggatccagcagtagataggtacaaggttcagaacacgcccaagagttcagttcaccaaccggcgccgagcaactcaagcatgatacatccagtgcgaactgtcgaggaggacagtaacgaatgcgacagtggtcttgacaatgccagtaccagcagcttcgagttccatggaggtgagaagacggcggcgaagaacccaacggcggggtacttctcgagacaggcttcctccaagtggaacgacgcggagaaatggattgtgaacaagcagactgttcagcagaacaccaccaccaagggcgcatcgcagaaccagagtgcgcaccaggtgagttccgctgcgcccaggggcggtggcgttgtgcccaaacaccacggaacatttgctcgccccattcagaacatgaagagattcaatccggcttcgtcagcctctcggagcatattagagaggctgtctttcgcttcgcatcagccgaagctggtcaggcatgctgatgtctgtgcagatcaaggttctagcgccatctcggactatcagaagggtcaagctgaaaccgattcaattgcaattaagccctgcaatgatactgaagctatttctacagttcaggcggtgtctgtgagagatgtgggcacagaaatgactccaataccaagtcaagatccgtcaagaacaggaacaccacttgggtctgtgacaccgactcgcagccctaattgttcgataccatcaactcctgtaggtggacgatcgtcggcatcaataggagaagacaacgcagatgatggtccttatttcaacagaaaaggtggcatgaatgaaatgtcagaggatgaaatcaggctcaaggcaaggaaagaaatcgctgccctaggtgtacaactaggaaagatgaacattgcttcatgggctagtaaagaggagctagaattagtctctgcgacaccgagcatcgctgatctggagcggatgaagcaggaatacgctactcgtgctgcagcattcgaggatgctgaaaattctaaacacacggcacgattcaagaaggaagagctgaagatcgaagcatgggagagccgccaaagaacaaaagttgaatccgaaatgaagagactagaggaacgcgcggagaaaatgagaagcgaggccatggcgaggatggccgaaaggctggagctggcacgccgtgtggccgaggagaagcgggcatcagccaacgccaagatgaacaagcaagcagcaagggcagttcagaaggccgatctgattcgccagacaggacggattccagggtcgcgtatcctatgctgcggctgcttctgtgaaccttagcacttgtttaactactagcctgttaaaatatggtcgtgagaggaatctaatttcctcctatagtcagcattccctggttttttagtatgcaaaagggaatgtctggtctaggtgattcaggtgtacacattcttcattgtcatataaataatttgcttagtgtgaggtgtgccaggttcttgttttttttagaaaaaaaaaaaaaaaaaaaaaaaaaaaaaaaaaaaaaaaaaaaaag

SEQ ID NO: 16508 - protein, 594 aa, Triticum aestivum
  peptide (1)..(594): Ceres Seq. ID no. 14302459
  misc_feature (476)..(583): Pfam Name: Pfam Description:  Remorin, C-terminal region
  misc_feature (66)..(593): NCBI GI NO: 38344336 NR Description: OSJNBa0058K23.18
  misc_feature (314)..(591): NCBI GI NO: 15220725 NR Description: expressed protein [Arabidopsis thaliana]
  misc_feature (351)..(592): NCBI GI NO: 18395321 NR Description: expressed protein [Arabidopsis thaliana]
  misc_feature (302)..(592): NCBI GI NO: 34902218 NR Description: Unknown protein
  misc_feature (66)..(550): NCBI GI NO: 15220725 NR Description: expressed protein [Arabidopsis thaliana]
  misc_feature (482)..(583): NCBI GI NO: 18408804 NR Description: expressed protein [Arabidopsis thaliana]
  misc_feature (482)..(583): NCBI GI NO: 21536537 NR Description: unknown [Arabidopsis thaliana]
  misc_feature (482)..(583): NCBI GI NO: 28393368 NR Description: unknown protein [Arabidopsis thaliana]
  misc_feature (346)..(584): NCBI GI NO: 30103007 NR Description: remorin-like protein
  misc_feature (476)..(584): NCBI GI NO: 33146770 NR Description: remorin-like protein
VRSLLTVAESPLCSVVCSLLFSRHAHPPSSPLTLPPTLSAAAAQAERAGHTQRHASGQQTSTVRAMEYERIHKPQAGALSPTKLRMKLLGAHNRVRVISSSSSRTSPSKNAEPSLAHNRLLVCDVLDEVSDSSGASKCPAAVSNTEVIDKDPAVDRYKVQNTPKSSVHQPAPSNSSMIHPVRTVEEDSNECDSGLDNASTSSFEFHGGEKTAAKNPTAGYFSRQASSKWNDAEKWIVNKQTVQQNTTTKGASQNQSAHQVSSAAPRGGGVVPKHHGTFARPIQNMKRFNPASSASRSILERLSFASHQPKLVRHADVCADQGSSAISDYQKGQAETDSIAIKPCNDTEAISTVQAVSVRDVGTEMTPIPSQDPSRTGTPLGSVTPTRSPNCSIPSTPVGGRSSASIGEDNADDGPYFNRKGGMNEMSEDEIRLKARKEIAALGVQLGKMNIASWASKEELELVSATPSIADLERMKQEYATRAAAFEDAENSKHTARFKKEELKIEAWESRQRTKVESEMKRLEERAEKMRSEAMARMAERLELARRVAEEKRASANAKMNKQAARAVQKADLIRQTGRIPGSRILCCGCFCEP

SEQ ID NO: 16509 - protein, 529 aa, Triticum aestivum
  peptide (1)..(529): Ceres Seq. ID no. 14302460
  misc_feature (411)..(518): Pfam Name: Pfam Description:  Remorin, C-terminal region
  misc_feature (1)..(528): NCBI GI NO: 38344336 NR Description: OSJNBa0058K23.18
  misc_feature (249)..(526): NCBI GI NO: 15220725 NR Description: expressed protein [Arabidopsis thaliana]
  misc_feature (286)..(527): NCBI GI NO: 18395321 NR Description: expressed protein [Arabidopsis thaliana]
  misc_feature (237)..(527): NCBI GI NO: 34902218 NR Description: Unknown protein
  misc_feature (1)..(485): NCBI GI NO: 15220725 NR Description: expressed protein [Arabidopsis thaliana]
  misc_feature (417)..(518): NCBI GI NO: 18408804 NR Description: expressed protein [Arabidopsis thaliana]
  misc_feature (417)..(518): NCBI GI NO: 21536537 NR Description: unknown [Arabidopsis thaliana]
  misc_feature (417)..(518): NCBI GI NO: 28393368 NR Description: unknown protein [Arabidopsis thaliana]
  misc_feature (281)..(519): NCBI GI NO: 30103007 NR Description: remorin-like protein
  misc_feature (411)..(519): NCBI GI NO: 33146770 NR Description: remorin-like protein
MEYERIHKPQAGALSPTKLRMKLLGAHNRVRVISSSSSRTSPSKNAEPSLAHNRLLVCDVLDEVSDSSGASKCPAAVSNTEVIDKDPAVDRYKVQNTPKSSVHQPAPSNSSMIHPVRTVEEDSNECDSGLDNASTSSFEFHGGEKTAAKNPTAGYFSRQASSKWNDAEKWIVNKQTVQQNTTTKGASQNQSAHQVSSAAPRGGGVVPKHHGTFARPIQNMKRFNPASSASRSILERLSFASHQPKLVRHADVCADQGSSAISDYQKGQAETDSIAIKPCNDTEAISTVQAVSVRDVGTEMTPIPSQDPSRTGTPLGSVTPTRSPNCSIPSTPVGGRSSASIGEDNADDGPYFNRKGGMNEMSEDEIRLKARKEIAALGVQLGKMNIASWASKEELELVSATPSIADLERMKQEYATRAAAFEDAENSKHTARFKKEELKIEAWESRQRTKVESEMKRLEERAEKMRSEAMARMAERLELARRVAEEKRASANAKMNKQAARAVQKADLIRQTGRIPGSRILCCGCFCEP

SEQ ID NO: 16510 - protein, 509 aa, Triticum aestivum
  peptide (1)..(509): Ceres Seq. ID no. 14302461
  misc_feature (391)..(498): Pfam Name: Pfam Description:  Remorin, C-terminal region
  misc_feature (1)..(508): NCBI GI NO: 38344336 NR Description: OSJNBa0058K23.18
  misc_feature (229)..(506): NCBI GI NO: 15220725 NR Description: expressed protein [Arabidopsis thaliana]
  misc_feature (266)..(507): NCBI GI NO: 18395321 NR Description: expressed protein [Arabidopsis thaliana]
  misc_feature (217)..(507): NCBI GI NO: 34902218 NR Description: Unknown protein
  misc_feature (1)..(465): NCBI GI NO: 15220725 NR Description: expressed protein [Arabidopsis thaliana]
  misc_feature (397)..(498): NCBI GI NO: 18408804 NR Description: expressed protein [Arabidopsis thaliana]
  misc_feature (397)..(498): NCBI GI NO: 21536537 NR Description: unknown [Arabidopsis thaliana]
  misc_feature (397)..(498): NCBI GI NO: 28393368 NR Description: unknown protein [Arabidopsis thaliana]
  misc_feature (261)..(499): NCBI GI NO: 30103007 NR Description: remorin-like protein
  misc_feature (391)..(499): NCBI GI NO: 33146770 NR Description: remorin-like protein
MKLLGAHNRVRVISSSSSRTSPSKNAEPSLAHNRLLVCDVLDEVSDSSGASKCPAAVSNTEVIDKDPAVDRYKVQNTPKSSVHQPAPSNSSMIHPVRTVEEDSNECDSGLDNASTSSFEFHGGEKTAAKNPTAGYFSRQASSKWNDAEKWIVNKQTVQQNTTTKGASQNQSAHQVSSAAPRGGGVVPKHHGTFARPIQNMKRFNPASSASRSILERLSFASHQPKLVRHADVCADQGSSAISDYQKGQAETDSIAIKPCNDTEAISTVQAVSVRDVGTEMTPIPSQDPSRTGTPLGSVTPTRSPNCSIPSTPVGGRSSASIGEDNADDGPYFNRKGGMNEMSEDEIRLKARKEIAALGVQLGKMNIASWASKEELELVSATPSIADLERMKQEYATRAAAFEDAENSKHTARFKKEELKIEAWESRQRTKVESEMKRLEERAEKMRSEAMARMAERLELARRVAEEKRASANAKMNKQAARAVQKADLIRQTGRIPGSRILCCGCFCEP

SEQ ID NO: 16511 - DNA, 3063 bp, Triticum aestivum
  misc_feature (1)..(3063): Ceres Seq. ID no. 15224315
ttcaacatgctaccacttgatggctaagaaacatcaaacctgaagtctctggtgtacgcacaccacaaccgtgccctcaccaaatccactactactgtttgcatctctctctatacatgtcctgcacattcttgcttccttggctaccaaaaaactcgccatcgagctctgcttccattcttcagactatcagcgcagctgtttctggacgcggcgttgctcgctagtttgcttcacgaccgcggctgacgggcatggagaggaacggcaatgccaatgccgggccaccgctggaagagaacaagggcgcggacggcaagagcgggagccggcggagcacgcggttcaaggaggagaacgagtacgtggaggtcacgctcgacgtcggggccgacgacgccgtggccgtccagggcgtcagggccgccggcgagacccccgaggcggcgctgctgccccggagcggcggcctgtcctcgaggctcaaggccgagctgaggcgcatcgcgtcggccaagcgtgggggcggcgacaacgcgccggcgagccagccccggctggaccggagcatgaccggcgccgcgcgcgcgctcaggggcctccacttcctcaaccagagcgtggtcacgcggggcagctggcccgaggtggacaagcggttcgaccgcctcgccgtcgacggcctgctcctccgctcacgcttcggccagtgcattgggatggttggatcggaggaattcgcggcgcagatgtacgacgcgcttgcacggcgaaggggggtcgttgctcaggtgctgaccaaggatgagctgagggagttctgggagcagctatccgacccaggctttgatgccaagctgcagactttctttgacatggttgacaagaacgcagacggtcggatcaccgaagaggagctcaaagaggtcctcactctgacggcctctgcaaacaagctcaccaagatcctggagcgcgtcgacgagtacacggcgttgatcatggaggagctcgaccccgaccagctcggctacatcgagcttgcgacactggagtccctgctgctgctgcccccttcccaggcgccgacgagcctggtggcgcacagctccaacatcagccagctgatcagccagaggctggtgccggcgcgggacgcgaacccgctccggcggggcctcacggcggcgcgctacttcctggaggacaactggaagcgcgtgtgggtgatgtcgctgtggctgtccatcaacgccggcctcttcgcctggaagttctacgcgtaccgccgccacccgacgttcgacgtgatgggctactgcgtgtgcgtggccaagggcggcgccgagaccaccaagttcaacatggccctcatcctcctccccgtctgccgcaacaccctcacctggctccgctcccggaccagcctcggcgccgccgtgcccttcaacgacaacatcaacttccacaaggtggtggccgggggcgtggccgtcggcgtggcgctgcacggggtgacccacctgacttgcgacttcccgcgcctgctccacgccagcgacgaggcctacgagccgatgaagcgctactttgggcagacgagggtcccggactactggtggttcgtgaggggcgtggagggcgtcaccggcgtcctcatggtggtgctcatggccgtcgcctacacgctggcgcacccgcggttccgccggagcaagctcggcgccgggaacccgctcaagaggctcagcggcttcaacatgttctggtactcccaccacctcttcgtcgtcgtctacgtcgccttggtcgtccacggcgtctgcctctacatcaaccggacatggtacaagcagacgacatggatgtaccttgccgtccccgtgctgctgtacgccggcgagcggcttcttcgggcgctgaggtcgcacggactcaccacggtgaggatcgagaaggtggcggtgtatcctgggaatgtgatagccatccacatgagtaagccccacggcttcaggtacaggagcggccagtacatctacgtcaactgcggcgaggtctcgccgttcgagtggcacccattcaccatcacctcggctcccggcgacgactacctcagcatgcacatccggtgccggggcgactggacgagcagattcagagccatcttctcccagatatgcaggccaccgttggcagggcagagcggtctcctgagagccgacttcacgtccatggtggagcacaacgccaacgccaagttcccgcggctgctgatcgacgggccctacggcgcgccggcgcaggactaccgcaagtacgacgtgctcctcctcatcggcctcggcatcggcgccacgccgctcatcagcatcgtcaaggacgtgctcaacaacgtccaccggcagggtcaggagcaggagggcgacgaggggttcatgacgaagcgggtctacttctactggtgcacgcgggaggagggctccttcgagtggttccgcggcgtgatgaacgaggtggcggagcgcgacgccgccggcgaggagtccgtggtggagctgcacaaccactgcaccagcgtgtacgaggaaggcgacgcgcggtcggccatggtggtgatgctgcaggcgctccaccacgccaagagcggcgtggacgtggtgtccgggacccgcgtgcgcacgcacttcgccaggccctgctggcgcgacgtcttcaagcgcgtcgcctgcgaccaccaggggcagcgcgtcggggtcttctactgcggcgaccagaagctcacgccggagctcaggcggctgtcccaggacttctcgcaccggaccaccaccaagttcgtcttccacaaggagaacttctgacctgaatttcgacatgcatgttaattaggctatatatatacatgaacgtagaacatatacactttattcgcttgctgtttgctagtagtatcagacacgtacggtcttgcattgggtatgcacatttcttcctttcttctttgcgtatcttattaactaatacaagtaggagagcatctctcaaatcattaatttccac

SEQ ID NO: 16512 - protein, 869 aa, Triticum aestivum
  peptide (1)..(869): Ceres Seq. ID no. 15224316
  misc_feature (353)..(868): Pfam Name: Pfam Description:  Ferric reductase like transmembrane component
  misc_feature (21)..(869): NCBI GI NO: 16549089 NR Description: respiratory burst oxidase homolog
  misc_feature (34)..(726): NCBI GI NO: 28268680 NR Description: respiratory burst oxidase homolog
  misc_feature (710)..(869): NCBI GI NO: 28268680 NR Description: respiratory burst oxidase homolog
  misc_feature (34)..(726): NCBI GI NO: 8131846 NR Description: whitefly-induced gp91-phox
  misc_feature (713)..(869): NCBI GI NO: 8131846 NR Description: whitefly-induced gp91-phox
  misc_feature (34)..(726): NCBI GI NO: 20805911 NR Description: NADPH oxidase [Nicotiana tabacum]
  misc_feature (710)..(869): NCBI GI NO: 20805911 NR Description: NADPH oxidase [Nicotiana tabacum]
  misc_feature (33)..(869): NCBI GI NO: 11358758 NR Description: respiratory burst oxidase protein D
  misc_feature (33)..(869): NCBI GI NO: 15238842 NR Description: respiratory burst oxidase protein D
  misc_feature (34)..(726): NCBI GI NO: 19715905 NR Description: NADPH oxidase [Nicotiana tabacum]
MERNGNANAGPPLEENKGADGKSGSRRSTRFKEENEYVEVTLDVGADDAVAVQGVRAAGETPEAALLPRSGGLSSRLKAELRRIASAKRGGGDNAPASQPRLDRSMTGAARALRGLHFLNQSVVTRGSWPEVDKRFDRLAVDGLLLRSRFGQCIGMVGSEEFAAQMYDALARRRGVVAQVLTKDELREFWEQLSDPGFDAKLQTFFDMVDKNADGRITEEELKEVLTLTASANKLTKILERVDEYTALIMEELDPDQLGYIELATLESLLLLPPSQAPTSLVAHSSNISQLISQRLVPARDANPLRRGLTAARYFLEDNWKRVWVMSLWLSINAGLFAWKFYAYRRHPTFDVMGYCVCVAKGGAETTKFNMALILLPVCRNTLTWLRSRTSLGAAVPFNDNINFHKVVAGGVAVGVALHGVTHLTCDFPRLLHASDEAYEPMKRYFGQTRVPDYWWFVRGVEGVTGVLMVVLMAVAYTLAHPRFRRSKLGAGNPLKRLSGFNMFWYSHHLFVVVYVALVVHGVCLYINRTWYKQTTWMYLAVPVLLYAGERLLRALRSHGLTTVRIEKVAVYPGNVIAIHMSKPHGFRYRSGQYIYVNCGEVSPFEWHPFTITSAPGDDYLSMHIRCRGDWTSRFRAIFSQICRPPLAGQSGLLRADFTSMVEHNANAKFPRLLIDGPYGAPAQDYRKYDVLLLIGLGIGATPLISIVKDVLNNVHRQGQEQEGDEGFMTKRVYFYWCTREEGSFEWFRGVMNEVAERDAAGEESVVELHNHCTSVYEEGDARSAMVVMLQALHHAKSGVDVVSGTRVRTHFARPCWRDVFKRVACDHQGQRVGVFYCGDQKLTPELRRLSQDFSHRTTTKFVFHKENF

SEQ ID NO: 16513 - protein, 764 aa, Triticum aestivum
  peptide (1)..(764): Ceres Seq. ID no. 15224317
  misc_feature (248)..(763): Pfam Name: Pfam Description:  Ferric reductase like transmembrane component
  misc_feature (1)..(764): NCBI GI NO: 16549089 NR Description: respiratory burst oxidase homolog
  misc_feature (1)..(621): NCBI GI NO: 28268680 NR Description: respiratory burst oxidase homolog
  misc_feature (605)..(764): NCBI GI NO: 28268680 NR Description: respiratory burst oxidase homolog
  misc_feature (1)..(621): NCBI GI NO: 8131846 NR Description: whitefly-induced gp91-phox
  misc_feature (608)..(764): NCBI GI NO: 8131846 NR Description: whitefly-induced gp91-phox
  misc_feature (1)..(621): NCBI GI NO: 20805911 NR Description: NADPH oxidase [Nicotiana tabacum]
  misc_feature (605)..(764): NCBI GI NO: 20805911 NR Description: NADPH oxidase [Nicotiana tabacum]
  misc_feature (1)..(764): NCBI GI NO: 11358758 NR Description: respiratory burst oxidase protein D
  misc_feature (1)..(764): NCBI GI NO: 15238842 NR Description: respiratory burst oxidase protein D
  misc_feature (1)..(621): NCBI GI NO: 19715905 NR Description: NADPH oxidase [Nicotiana tabacum]
MTGAARALRGLHFLNQSVVTRGSWPEVDKRFDRLAVDGLLLRSRFGQCIGMVGSEEFAAQMYDALARRRGVVAQVLTKDELREFWEQLSDPGFDAKLQTFFDMVDKNADGRITEEELKEVLTLTASANKLTKILERVDEYTALIMEELDPDQLGYIELATLESLLLLPPSQAPTSLVAHSSNISQLISQRLVPARDANPLRRGLTAARYFLEDNWKRVWVMSLWLSINAGLFAWKFYAYRRHPTFDVMGYCVCVAKGGAETTKFNMALILLPVCRNTLTWLRSRTSLGAAVPFNDNINFHKVVAGGVAVGVALHGVTHLTCDFPRLLHASDEAYEPMKRYFGQTRVPDYWWFVRGVEGVTGVLMVVLMAVAYTLAHPRFRRSKLGAGNPLKRLSGFNMFWYSHHLFVVVYVALVVHGVCLYINRTWYKQTTWMYLAVPVLLYAGERLLRALRSHGLTTVRIEKVAVYPGNVIAIHMSKPHGFRYRSGQYIYVNCGEVSPFEWHPFTITSAPGDDYLSMHIRCRGDWTSRFRAIFSQICRPPLAGQSGLLRADFTSMVEHNANAKFPRLLIDGPYGAPAQDYRKYDVLLLIGLGIGATPLISIVKDVLNNVHRQGQEQEGDEGFMTKRVYFYWCTREEGSFEWFRGVMNEVAERDAAGEESVVELHNHCTSVYEEGDARSAMVVMLQALHHAKSGVDVVSGTRVRTHFARPCWRDVFKRVACDHQGQRVGVFYCGDQKLTPELRRLSQDFSHRTTTKFVFHKENF

SEQ ID NO: 16514 - protein, 714 aa, Triticum aestivum
  peptide (1)..(714): Ceres Seq. ID no. 15224318
  misc_feature (198)..(713): Pfam Name: Pfam Description:  Ferric reductase like transmembrane component
  misc_feature (1)..(714): NCBI GI NO: 16549089 NR Description: respiratory burst oxidase homolog
  misc_feature (1)..(571): NCBI GI NO: 28268680 NR Description: respiratory burst oxidase homolog
  misc_feature (555)..(714): NCBI GI NO: 28268680 NR Description: respiratory burst oxidase homolog
  misc_feature (1)..(571): NCBI GI NO: 8131846 NR Description: whitefly-induced gp91-phox
  misc_feature (558)..(714): NCBI GI NO: 8131846 NR Description: whitefly-induced gp91-phox
  misc_feature (1)..(571): NCBI GI NO: 20805911 NR Description: NADPH oxidase [Nicotiana tabacum]
  misc_feature (555)..(714): NCBI GI NO: 20805911 NR Description: NADPH oxidase [Nicotiana tabacum]
  misc_feature (1)..(714): NCBI GI NO: 11358758 NR Description: respiratory burst oxidase protein D
  misc_feature (1)..(714): NCBI GI NO: 15238842 NR Description: respiratory burst oxidase protein D
  misc_feature (1)..(571): NCBI GI NO: 19715905 NR Description: NADPH oxidase [Nicotiana tabacum]
MVGSEEFAAQMYDALARRRGVVAQVLTKDELREFWEQLSDPGFDAKLQTFFDMVDKNADGRITEEELKEVLTLTASANKLTKILERVDEYTALIMEELDPDQLGYIELATLESLLLLPPSQAPTSLVAHSSNISQLISQRLVPARDANPLRRGLTAARYFLEDNWKRVWVMSLWLSINAGLFAWKFYAYRRHPTFDVMGYCVCVAKGGAETTKFNMALILLPVCRNTLTWLRSRTSLGAAVPFNDNINFHKVVAGGVAVGVALHGVTHLTCDFPRLLHASDEAYEPMKRYFGQTRVPDYWWFVRGVEGVTGVLMVVLMAVAYTLAHPRFRRSKLGAGNPLKRLSGFNMFWYSHHLFVVVYVALVVHGVCLYINRTWYKQTTWMYLAVPVLLYAGERLLRALRSHGLTTVRIEKVAVYPGNVIAIHMSKPHGFRYRSGQYIYVNCGEVSPFEWHPFTITSAPGDDYLSMHIRCRGDWTSRFRAIFSQICRPPLAGQSGLLRADFTSMVEHNANAKFPRLLIDGPYGAPAQDYRKYDVLLLIGLGIGATPLISIVKDVLNNVHRQGQEQEGDEGFMTKRVYFYWCTREEGSFEWFRGVMNEVAERDAAGEESVVELHNHCTSVYEEGDARSAMVVMLQALHHAKSGVDVVSGTRVRTHFARPCWRDVFKRVACDHQGQRVGVFYCGDQKLTPELRRLSQDFSHRTTTKFVFHKENF

SEQ ID NO: 16515 - DNA, 1784 bp, Triticum aestivum
  misc_feature (1)..(1784): Ceres Seq. ID no. 15169466
aagtctttcctactactaccattccaacccccacccccttaccctgtcccgtccgcctcggctgccgtagctctgctcacctccccccaaaccgccgacgcgtcctccctctccctcacagccatggcgaagctcaagcacctgcccgtgtgctctctgctgctggccgtcttgctcctcgcgctctcctccttctcctgcagcgctggcaccaactcgacggcctcggccggaccactgtatggcatcgagttcccgccgtacaacacggccgtcgccgacgccggctgcgacggcaggctcgtggccgaggaggaggagctcgcgcgccgggcaccctccctcaagctccacatgacacaccgctccgccgcggagggcgcgacggggaaaggctccttcgtcctcgactcggccaagaaagacgccgcccgcatcggcaccatgcacggcattagggccgcgctgtccaggaagggctcgcggccgcgccgggcgctgtcggagcgggtggtggccacggtggggtcaggcgtggcggtgggctccggggagtacctggtggacgtgtacgttggcacgccgccgcgccggttccgcatgatcatggacaccggcagcgacctcaactggctgcagtgcgcgccctgcctcgactgcttccaccagaccggccccgtcttcgaccccgccgcctccgcctcctaccgcaacgtcacctgcggcgacgcgcgctgcggcctcgtctccccgccgccagagtctccggcggcgccgcccgggaggacgtgccgcaggccgcggagcgacccctgcccgtattactactggtacggcgaccagtccaacaccacgggggacctggcgctggaggccttcaccgtgaacctcacgggcgccgccgggtcgacccggcgcgtggacggcgtggcgttcgggtgcggccaccggaaccgcggcctcttccacggcgccgcggggctgctggggctcggccgcggcccgctctcgttcgcgtcgcagctgcgcggcgtctacggcgggcacgccttctcctactgcctcgtggagcacggcagcgccgccgggagcaagatcgtcttcggccacgacgacgcgctgctcgcgcacccgcggctcaactacacggccttcgccccggccgcggccgacgcggcggacaccttctactacgtgcagctcaggtccgtcctcgtgggcggggaggcggttgacatcccgtcgggcacgctggccgccggcggcaccatcatcgactccggcacgacgctgagctacttcccggagccggcgtaccgggcgatccggcaggcgttcatcgaccgcatgagcccgtcctacccgctcatcgccgggttcccggtgctgagcccgtgctacaacgtgtcgggggcggagagggtggaggtgccggagctgtcgctggtgttcgcggacggcgcggcgtgggagttcccggcggagaactacttcatccggctggagccggagggggtgatgtgcctggccgtcctgggcacgccgcgctccggcatgtccatcatcggcaactaccagcagcagaatttccacgtcttgtacgacctggagcacaaccggctcggcttcgcgccgcgccggtgcgccgacgtctaattagtccggcctccgtgcgtccattttgacttgctgattgggttgattgtttgaccggtaggagtatgtaggcggctctgctgactggatgggaagaagaaagaaggaagcaacggggttgggtgtag

SEQ ID NO: 16516 - protein, 551 aa, Triticum aestivum
  peptide (1)..(551): Ceres Seq. ID no. 15169467
  misc_feature (170)..(545): Pfam Name: Pfam Description:  Eukaryotic aspartyl protease
  misc_feature (170)..(551): NCBI GI NO: 15231625 NR Description: expressed protein [Arabidopsis thaliana]
  misc_feature (135)..(551): NCBI GI NO: 15228044 NR Description: chloroplast nucleoid DNA binding protein -related
  misc_feature (135)..(551): NCBI GI NO: 25408826 NR Description: hypothetical protein At2g42980
  misc_feature (264)..(548): NCBI GI NO: 34895664 NR Description: nucleoid DNA-binding protein cnd41-like protein
  misc_feature (37)..(295): NCBI GI NO: 34895664 NR Description: nucleoid DNA-binding protein cnd41-like protein
  misc_feature (49)..(548): NCBI GI NO: 15290061 NR Description: nucleoid DNA-binding protein cnd41-like protein
  misc_feature (268)..(548): NCBI GI NO: 15229656 NR Description: chloroplast nucleoid DNA-binding protein -related
  misc_feature (114)..(299): NCBI GI NO: 15229656 NR Description: chloroplast nucleoid DNA-binding protein -related
  misc_feature (268)..(548): NCBI GI NO: 19424106 NR Description: putative chloroplast nucleoid DNA-binding protein
  misc_feature (114)..(299): NCBI GI NO: 19424106 NR Description: putative chloroplast nucleoid DNA-binding protein
KSFLLLPFQPPPPYPVPSASAAVALLTSPQTADASSLSLTAMAKLKHLPVCSLLLAVLLLALSSFSCSAGTNSTASAGPLYGIEFPPYNTAVADAGCDGRLVAEEEELARRAPSLKLHMTHRSAAEGATGKGSFVLDSAKKDAARIGTMHGIRAALSRKGSRPRRALSERVVATVGSGVAVGSGEYLVDVYVGTPPRRFRMIMDTGSDLNWLQCAPCLDCFHQTGPVFDPAASASYRNVTCGDARCGLVSPPPESPAAPPGRTCRRPRSDPCPYYYWYGDQSNTTGDLALEAFTVNLTGAAGSTRRVDGVAFGCGHRNRGLFHGAAGLLGLGRGPLSFASQLRGVYGGHAFSYCLVEHGSAAGSKIVFGHDDALLAHPRLNYTAFAPAAADAADTFYYVQLRSVLVGGEAVDIPSGTLAAGGTIIDSGTTLSYFPEPAYRAIRQAFIDRMSPSYPLIAGFPVLSPCYNVSGAERVEVPELSLVFADGAAWEFPAENYFIRLEPEGVMCLAVLGTPRSGMSIIGNYQQQNFHVLYDLEHNRLGFAPRRCADV

SEQ ID NO: 16517 - protein, 510 aa, Triticum aestivum
  peptide (1)..(510): Ceres Seq. ID no. 15169468
  misc_feature (129)..(504): Pfam Name: Pfam Description:  Eukaryotic aspartyl protease
  misc_feature (129)..(510): NCBI GI NO: 15231625 NR Description: expressed protein [Arabidopsis thaliana]
  misc_feature (94)..(510): NCBI GI NO: 15228044 NR Description: chloroplast nucleoid DNA binding protein -related
  misc_feature (94)..(510): NCBI GI NO: 25408826 NR Description: hypothetical protein At2g42980
  misc_feature (223)..(507): NCBI GI NO: 34895664 NR Description: nucleoid DNA-binding protein cnd41-like protein
  misc_feature (1)..(254): NCBI GI NO: 34895664 NR Description: nucleoid DNA-binding protein cnd41-like protein
  misc_feature (8)..(507): NCBI GI NO: 15290061 NR Description: nucleoid DNA-binding protein cnd41-like protein
  misc_feature (227)..(507): NCBI GI NO: 15229656 NR Description: chloroplast nucleoid DNA-binding protein -related
  misc_feature (73)..(258): NCBI GI NO: 15229656 NR Description: chloroplast nucleoid DNA-binding protein -related
  misc_feature (227)..(507): NCBI GI NO: 19424106 NR Description: putative chloroplast nucleoid DNA-binding protein
  misc_feature (73)..(258): NCBI GI NO: 19424106 NR Description: putative chloroplast nucleoid DNA-binding protein
MAKLKHLPVCSLLLAVLLLALSSFSCSAGTNSTASAGPLYGIEFPPYNTAVADAGCDGRLVAEEEELARRAPSLKLHMTHRSAAEGATGKGSFVLDSAKKDAARIGTMHGIRAALSRKGSRPRRALSERVVATVGSGVAVGSGEYLVDVYVGTPPRRFRMIMDTGSDLNWLQCAPCLDCFHQTGPVFDPAASASYRNVTCGDARCGLVSPPPESPAAPPGRTCRRPRSDPCPYYYWYGDQSNTTGDLALEAFTVNLTGAAGSTRRVDGVAFGCGHRNRGLFHGAAGLLGLGRGPLSFASQLRGVYGGHAFSYCLVEHGSAAGSKIVFGHDDALLAHPRLNYTAFAPAAADAADTFYYVQLRSVLVGGEAVDIPSGTLAAGGTIIDSGTTLSYFPEPAYRAIRQAFIDRMSPSYPLIAGFPVLSPCYNVSGAERVEVPELSLVFADGAAWEFPAENYFIRLEPEGVMCLAVLGTPRSGMSIIGNYQQQNFHVLYDLEHNRLGFAPRRCADV

SEQ ID NO: 16518 - protein, 433 aa, Triticum aestivum
  peptide (1)..(433): Ceres Seq. ID no. 15169469
  misc_feature (52)..(427): Pfam Name: Pfam Description:  Eukaryotic aspartyl protease
  misc_feature (52)..(433): NCBI GI NO: 15231625 NR Description: expressed protein [Arabidopsis thaliana]
  misc_feature (17)..(433): NCBI GI NO: 15228044 NR Description: chloroplast nucleoid DNA binding protein -related
  misc_feature (17)..(433): NCBI GI NO: 25408826 NR Description: hypothetical protein At2g42980
  misc_feature (146)..(430): NCBI GI NO: 34895664 NR Description: nucleoid DNA-binding protein cnd41-like protein
  misc_feature (1)..(177): NCBI GI NO: 34895664 NR Description: nucleoid DNA-binding protein cnd41-like protein
  misc_feature (1)..(430): NCBI GI NO: 15290061 NR Description: nucleoid DNA-binding protein cnd41-like protein
  misc_feature (150)..(430): NCBI GI NO: 15229656 NR Description: chloroplast nucleoid DNA-binding protein -related
  misc_feature (1)..(181): NCBI GI NO: 15229656 NR Description: chloroplast nucleoid DNA-binding protein -related
  misc_feature (150)..(430): NCBI GI NO: 19424106 NR Description: putative chloroplast nucleoid DNA-binding protein
  misc_feature (1)..(181): NCBI GI NO: 19424106 NR Description: putative chloroplast nucleoid DNA-binding protein
MTHRSAAEGATGKGSFVLDSAKKDAARIGTMHGIRAALSRKGSRPRRALSERVVATVGSGVAVGSGEYLVDVYVGTPPRRFRMIMDTGSDLNWLQCAPCLDCFHQTGPVFDPAASASYRNVTCGDARCGLVSPPPESPAAPPGRTCRRPRSDPCPYYYWYGDQSNTTGDLALEAFTVNLTGAAGSTRRVDGVAFGCGHRNRGLFHGAAGLLGLGRGPLSFASQLRGVYGGHAFSYCLVEHGSAAGSKIVFGHDDALLAHPRLNYTAFAPAAADAADTFYYVQLRSVLVGGEAVDIPSGTLAAGGTIIDSGTTLSYFPEPAYRAIRQAFIDRMSPSYPLIAGFPVLSPCYNVSGAERVEVPELSLVFADGAAWEFPAENYFIRLEPEGVMCLAVLGTPRSGMSIIGNYQQQNFHVLYDLEHNRLGFAPRRCADV

SEQ ID NO: 16519 - DNA, 2111 bp, Triticum aestivum
  misc_feature (1)..(2111): Ceres Seq. ID no. 15169474
accaccgcattcccattccgcggcacacgacacgaaccctggccgcggcacggagcgcgccaaatggacccccgccgcttcctctgctgcctcttgctcgccctcgccctcgccttccgccgctgcggcgcgcagggcgccgccaacggcaccgggcgcttcgcgtgcctcgtgccggccccgtgcgacacgttcgtcctgtaccgcacgcaggccccggggtccctcgacctcggcgccatctcggacctcttcggcgtgagccgggccatgatcgccagcgccaacggcctcagcctcgacgccgagggcgcggcgctgctgcccgaccagccgctgctcgtgcccgtccgctgcggctgcaccggcaaccgctccttcgtcaacgtcacctaccccatccgctccggcgacaccttctacgcgctcgcgctcaccggcttcgagaacctcaccacccccgacgtcatccaggagctcaacccgcaggcggtcttcaacaagctcaatgtctcgcagctggtcaccgtgccgctcttctgccggtgccccacgccggcggagcggagcggcggggcgcagctgctcgtcacctacatgtggcgacctgtcgacaccatgtccgaggtgagcaagctgatgaactctagcgcgagcgcgatcgctgcggtgaacaacgtcagcgccgacttcacctccacgacgatgctgccgatgctgatcccggtggcgcggccgccggtgcttcctccgctgcaatatggcgcgagcgcgagcaccggcgatcccggagttagcaagcgcttctcgggtgccaccgtcgcggcgagcatcgccgggtctctcatcgcggtcgccgccttgtgcgcggcgatcttcgcgtaccggaggtaccgcgagaagaaggccacggtgcactcggcgtccaggttcgcgagcccgaggttttgtttcaaccagaacgcctacgggattcagagcagcagttccatcgcgcgcatgatcaacggaggggacaagctgctcaccagcgtgtcgcagttcatcgacaagcctgtcatcttcggcacagcggagatcatggaagcgacgatgaacttggacgaacggtgcaggatcggcagctcctactaccgggccaagctagaaggcgaggtgttcgcggtgaagccggcgaaaggcgacgtgtcggcggagctgaggatgatgcagatggtcaaccacgccaacctcatcaggctggccggcatatccatcggcgccgatggggactacaccttcctcgtgtacgagttcgccgagaagggctcgctcgacaagtggctgtaccagaagcctccgtcctcgctgccgtcgtcgagctcatcagcggacacgctctcgtggaaccagaggctgggcatcgcgttcgacgtcgccaacggcctactatacatgcacgagcacactcagccgagcatggtgcacggtgacgtccgcgcacggaacatcctcctcaccgcggacttcagggccaggatatccaacttctccgtggccacgccggcgatggccgacgccgcggcgacgagcagcgacgtgttcgccttcggcctacttgtcctcgagcttctctccggcaggacggccatggagacgcgcgtcggcgcggagatcggcatgctatggagggacatccgggcggtgctggaggccggggacaagagggacgccaagctgaggaagtggatggaccccgcccttggggacgagtactacttggatgcggcactcagcctggccggcatggcgagggcttgcacggaggaggacgcggcgcggcggccgaagatggccgacgtggtgttcagcctctcgatgctggtgcagccgttgccggtgggcgacgcgttcgagaagctatggcagcccagctcggaggagaacattaggattgtcaatgaagtggcagccagatgatatcggagcataactgaatttagcgactgatctagaaagttcttagtttgggtgttgcgtgcagtgatttggttcgttttgtgaatgtgtgtcactgtaatttactgcaatgctttgctttactctgaagaccaaagatcaggttttgttgc

SEQ ID NO: 16520 - protein, 652 aa, Triticum aestivum
  peptide (1)..(652): Ceres Seq. ID no. 15169475
  misc_feature (399)..(508): Pfam Name: Pfam Description:  Protein kinase domain
  misc_feature (28)..(652): NCBI GI NO: 20330767 NR Description: Putative protein kinase
  misc_feature (339)..(652): NCBI GI NO: 37651074 NR Description: Nod-factor receptor 5
  misc_feature (31)..(285): NCBI GI NO: 37651074 NR Description: Nod-factor receptor 5
  misc_feature (325)..(652): NCBI GI NO: 37651070 NR Description: SYM10 protein [Pisum sativum]
  misc_feature (31)..(263): NCBI GI NO: 37651070 NR Description: SYM10 protein [Pisum sativum]
  misc_feature (325)..(652): NCBI GI NO: 37651066 NR Description: SYM10 protein [Pisum sativum]
  misc_feature (31)..(263): NCBI GI NO: 37651066 NR Description: SYM10 protein [Pisum sativum]
  misc_feature (49)..(527): NCBI GI NO: 5441881 NR Description: Similar to putative receptor kinase. (AC002332)
  misc_feature (526)..(642): NCBI GI NO: 5441881 NR Description: Similar to putative receptor kinase. (AC002332)
  misc_feature (42)..(513): NCBI GI NO: 15226133 NR Description: protein kinase -related [Arabidopsis thaliana]
TTAFPFRGTRHEPWPRHGARQMDPRRFLCCLLLALALAFRRCGAQGAANGTGRFACLVPAPCDTFVLYRTQAPGSLDLGAISDLFGVSRAMIASANGLSLDAEGAALLPDQPLLVPVRCGCTGNRSFVNVTYPIRSGDTFYALALTGFENLTTPDVIQELNPQAVFNKLNVSQLVTVPLFCRCPTPAERSGGAQLLVTYMWRPVDTMSEVSKLMNSSASAIAAVNNVSADFTSTTMLPMLIPVARPPVLPPLQYGASASTGDPGVSKRFSGATVAASIAGSLIAVAALCAAIFAYRRYREKKATVHSASRFASPRFCFNQNAYGIQSSSSIARMINGGDKLLTSVSQFIDKPVIFGTAEIMEATMNLDERCRIGSSYYRAKLEGEVFAVKPAKGDVSAELRMMQMVNHANLIRLAGISIGADGDYTFLVYEFAEKGSLDKWLYQKPPSSLPSSSSSADTLSWNQRLGIAFDVANGLLYMHEHTQPSMVHGDVRARNILLTADFRARISNFSVATPAMADAAATSSDVFAFGLLVLELLSGRTAMETRVGAEIGMLWRDIRAVLEAGDKRDAKLRKWMDPALGDEYYLDAALSLAGMARACTEEDAARRPKMADVVFSLSMLVQPLPVGDAFEKLWQPSSEENIRIVNEVAAR

SEQ ID NO: 16521 - protein, 631 aa, Triticum aestivum
  peptide (1)..(631): Ceres Seq. ID no. 15169476
  misc_feature (378)..(487): Pfam Name: Pfam Description:  Protein kinase domain
  misc_feature (7)..(631): NCBI GI NO: 20330767 NR Description: Putative protein kinase
  misc_feature (318)..(631): NCBI GI NO: 37651074 NR Description: Nod-factor receptor 5
  misc_feature (10)..(264): NCBI GI NO: 37651074 NR Description: Nod-factor receptor 5
  misc_feature (304)..(631): NCBI GI NO: 37651070 NR Description: SYM10 protein [Pisum sativum]
  misc_feature (10)..(242): NCBI GI NO: 37651070 NR Description: SYM10 protein [Pisum sativum]
  misc_feature (304)..(631): NCBI GI NO: 37651066 NR Description: SYM10 protein [Pisum sativum]
  misc_feature (10)..(242): NCBI GI NO: 37651066 NR Description: SYM10 protein [Pisum sativum]
  misc_feature (28)..(506): NCBI GI NO: 5441881 NR Description: Similar to putative receptor kinase. (AC002332)
  misc_feature (505)..(621): NCBI GI NO: 5441881 NR Description: Similar to putative receptor kinase. (AC002332)
  misc_feature (21)..(492): NCBI GI NO: 15226133 NR Description: protein kinase -related [Arabidopsis thaliana]
MDPRRFLCCLLLALALAFRRCGAQGAANGTGRFACLVPAPCDTFVLYRTQAPGSLDLGAISDLFGVSRAMIASANGLSLDAEGAALLPDQPLLVPVRCGCTGNRSFVNVTYPIRSGDTFYALALTGFENLTTPDVIQELNPQAVFNKLNVSQLVTVPLFCRCPTPAERSGGAQLLVTYMWRPVDTMSEVSKLMNSSASAIAAVNNVSADFTSTTMLPMLIPVARPPVLPPLQYGASASTGDPGVSKRFSGATVAASIAGSLIAVAALCAAIFAYRRYREKKATVHSASRFASPRFCFNQNAYGIQSSSSIARMINGGDKLLTSVSQFIDKPVIFGTAEIMEATMNLDERCRIGSSYYRAKLEGEVFAVKPAKGDVSAELRMMQMVNHANLIRLAGISIGADGDYTFLVYEFAEKGSLDKWLYQKPPSSLPSSSSSADTLSWNQRLGIAFDVANGLLYMHEHTQPSMVHGDVRARNILLTADFRARISNFSVATPAMADAAATSSDVFAFGLLVLELLSGRTAMETRVGAEIGMLWRDIRAVLEAGDKRDAKLRKWMDPALGDEYYLDAALSLAGMARACTEEDAARRPKMADVVFSLSMLVQPLPVGDAFEKLWQPSSEENIRIVNEVAAR

SEQ ID NO: 16522 - protein, 562 aa, Triticum aestivum
  peptide (1)..(562): Ceres Seq. ID no. 15169477
  misc_feature (309)..(418): Pfam Name: Pfam Description:  Protein kinase domain
  misc_feature (1)..(562): NCBI GI NO: 20330767 NR Description: Putative protein kinase
  misc_feature (249)..(562): NCBI GI NO: 37651074 NR Description: Nod-factor receptor 5
  misc_feature (1)..(195): NCBI GI NO: 37651074 NR Description: Nod-factor receptor 5
  misc_feature (235)..(562): NCBI GI NO: 37651070 NR Description: SYM10 protein [Pisum sativum]
  misc_feature (1)..(173): NCBI GI NO: 37651070 NR Description: SYM10 protein [Pisum sativum]
  misc_feature (235)..(562): NCBI GI NO: 37651066 NR Description: SYM10 protein [Pisum sativum]
  misc_feature (1)..(173): NCBI GI NO: 37651066 NR Description: SYM10 protein [Pisum sativum]
  misc_feature (1)..(437): NCBI GI NO: 5441881 NR Description: Similar to putative receptor kinase. (AC002332)
  misc_feature (436)..(552): NCBI GI NO: 5441881 NR Description: Similar to putative receptor kinase. (AC002332)
  misc_feature (1)..(423): NCBI GI NO: 15226133 NR Description: protein kinase -related [Arabidopsis thaliana]
MIASANGLSLDAEGAALLPDQPLLVPVRCGCTGNRSFVNVTYPIRSGDTFYALALTGFENLTTPDVIQELNPQAVFNKLNVSQLVTVPLFCRCPTPAERSGGAQLLVTYMWRPVDTMSEVSKLMNSSASAIAAVNNVSADFTSTTMLPMLIPVARPPVLPPLQYGASASTGDPGVSKRFSGATVAASIAGSLIAVAALCAAIFAYRRYREKKATVHSASRFASPRFCFNQNAYGIQSSSSIARMINGGDKLLTSVSQFIDKPVIFGTAEIMEATMNLDERCRIGSSYYRAKLEGEVFAVKPAKGDVSAELRMMQMVNHANLIRLAGISIGADGDYTFLVYEFAEKGSLDKWLYQKPPSSLPSSSSSADTLSWNQRLGIAFDVANGLLYMHEHTQPSMVHGDVRARNILLTADFRARISNFSVATPAMADAAATSSDVFAFGLLVLELLSGRTAMETRVGAEIGMLWRDIRAVLEAGDKRDAKLRKWMDPALGDEYYLDAALSLAGMARACTEEDAARRPKMADVVFSLSMLVQPLPVGDAFEKLWQPSSEENIRIVNEVAAR

SEQ ID NO: 16523 - DNA, 1367 bp, Triticum aestivum
  misc_feature (1)..(1367): Ceres Seq. ID no. 14302404
ctccttttgccacggcccgcgcgcaccggtcacacatggctgagaccccccgtgccccgccgccactgaggcctccgccgcccgttccgctgccggacacgccgcctcgcccggattcgtcgccttccacgcccggcgaggattaccacacgccgacgccctcgctggacgaggcgcgcgaagaaacgccaccgtggtcgcaagaaaccaacggcaacgagagagcggccagcaaaagcccggccctctcgcccgtgcgcctcccctcgccgcaccgcctgctgccgcccaactcccccaccggcaacggcgatgacggtgccgccgccgggcatgcgccggtgccgggccgccgcccgcagctccgcctcgcgcccggcctcgtccggacgccgtcggaagggtccgtcgccaagtctccctcgccgtcgccctcttcgtcgctgacgtcgccatcgcctctaaccctggctcccacaatcacaaccaacagcaagagcgcccagagcacgccgaagcgcacggaggcatggaagccgccggccacggggatcgcggtgcagttcgaccctgtcgaggaagccgtcacgtcgccgctgcaactgggcaaggcccgaatcgaccgccatcgcgccactacgatggcggcagcagagaacggaggcgcgcccaacacggtgcctcgcgacgtggcggcggtggccgctgtcggggagaggaggccactgtcggtggcgctgcggctggccacggcagtgctcagcctggcgtccttcgcggtgatggccagcgcccggacgtccggctgggacggcgatcacttcgatcgctacgatcagtacaggtacgccctggcgatgaacgtgatcgtctgcgcctactcaatcgcgcaatcgcttggtgagatccgccgtctggtcgcggcgaggtttatttacaggagcatgtcaagctactacgtcagcctgttccttgatcaggtcctggcgtatctcctcatgtcggcgtcctcggctgccgcgtcgcgcaacgatctgtgggtgtcgaggttcagccaggacgccttcaacaggaagatcaccagctccgtgtggctgtccttccttgccttcatagcgctcgccgcaagctcgctcatctccacggctaatctcttcagcatggtctaattatgatagatacggttcatccctttccctctggggatgagtaactgccgacgttcttcatgtaaattttgcattttatattgcgagaaatcatacgatcgacttataccgtacgttgttctcggtcctgacctctgactcgtcagaaatcccttgtaaagaggttcatatagtgctctaattaagcttttcactgtc

SEQ ID NO: 16524 - protein, 388 aa, Triticum aestivum
  peptide (1)..(388): Ceres Seq. ID no. 14302405
  misc_feature (236)..(317): Pfam Name: DUF588 Pfam Description: Domain of unknown function
  misc_feature (14)..(317): NCBI GI NO: 34911616 NR Description: P0039G05.10
  misc_feature (327)..(388): NCBI GI NO: 34911616 NR Description: P0039G05.10
  misc_feature (130)..(386): NCBI GI NO: 27754604 NR Description: unknown protein [Arabidopsis thaliana]
  misc_feature (12)..(137): NCBI GI NO: 34911616 NR Description: P0039G05.10
  misc_feature (139)..(386): NCBI GI NO: 15241975 NR Description: hypothetical protein [Arabidopsis thaliana]
  misc_feature (224)..(380): NCBI GI NO: 15242642 NR Description: expressed protein [Arabidopsis thaliana]
  misc_feature (246)..(384): NCBI GI NO: 28876007 NR Description: hypothetical protein
  misc_feature (115)..(282): NCBI GI NO: 15227628 NR Description: expressed protein [Arabidopsis thaliana]
  misc_feature (318)..(386): NCBI GI NO: 15227628 NR Description: expressed protein [Arabidopsis thaliana]
  misc_feature (244)..(386): NCBI GI NO: 34898210 NR Description: P0034A04.16
PFATARAHRSHMAETPRAPPPLRPPPPVPLPDTPPRPDSSPSTPGEDYHTPTPSLDEAREETPPWSQETNGNERAASKSPALSPVRLPSPHRLLPPNSPTGNGDDGAAAGHAPVPGRRPQLRLAPGLVRTPSEGSVAKSPSPSPSSSLTSPSPLTLAPTITTNSKSAQSTPKRTEAWKPPATGIAVQFDPVEEAVTSPLQLGKARIDRHRATTMAAAENGGAPNTVPRDVAAVAAVGERRPLSVALRLATAVLSLASFAVMASARTSGWDGDHFDRYDQYRYALAMNVIVCAYSIAQSLGEIRRLVAARFIYRSMSSYYVSLFLDQVLAYLLMSASSAAASRNDLWVSRFSQDAFNRKITSSVWLSFLAFIALAASSLISTANLFSMV

SEQ ID NO: 16525 - protein, 377 aa, Triticum aestivum
  peptide (1)..(377): Ceres Seq. ID no. 14302406
  misc_feature (225)..(306): Pfam Name: DUF588 Pfam Description: Domain of unknown function
  misc_feature (3)..(306): NCBI GI NO: 34911616 NR Description: P0039G05.10
  misc_feature (316)..(377): NCBI GI NO: 34911616 NR Description: P0039G05.10
  misc_feature (119)..(375): NCBI GI NO: 27754604 NR Description: unknown protein [Arabidopsis thaliana]
  misc_feature (1)..(126): NCBI GI NO: 34911616 NR Description: P0039G05.10
  misc_feature (128)..(375): NCBI GI NO: 15241975 NR Description: hypothetical protein [Arabidopsis thaliana]
  misc_feature (213)..(369): NCBI GI NO: 15242642 NR Description: expressed protein [Arabidopsis thaliana]
  misc_feature (235)..(373): NCBI GI NO: 28876007 NR Description: hypothetical protein
  misc_feature (104)..(271): NCBI GI NO: 15227628 NR Description: expressed protein [Arabidopsis thaliana]
  misc_feature (307)..(375): NCBI GI NO: 15227628 NR Description: expressed protein [Arabidopsis thaliana]
  misc_feature (233)..(375): NCBI GI NO: 34898210 NR Description: P0034A04.16
MAETPRAPPPLRPPPPVPLPDTPPRPDSSPSTPGEDYHTPTPSLDEAREETPPWSQETNGNERAASKSPALSPVRLPSPHRLLPPNSPTGNGDDGAAAGHAPVPGRRPQLRLAPGLVRTPSEGSVAKSPSPSPSSSLTSPSPLTLAPTITTNSKSAQSTPKRTEAWKPPATGIAVQFDPVEEAVTSPLQLGKARIDRHRATTMAAAENGGAPNTVPRDVAAVAAVGERRPLSVALRLATAVLSLASFAVMASARTSGWDGDHFDRYDQYRYALAMNVIVCAYSIAQSLGEIRRLVAARFIYRSMSSYYVSLFLDQVLAYLLMSASSAAASRNDLWVSRFSQDAFNRKITSSVWLSFLAFIALAASSLISTANLFSMV

SEQ ID NO: 16526 - DNA, 1573 bp, Triticum aestivum
  misc_feature (1)..(1573): Ceres Seq. ID no. 14302887
gttaaccacacgcagcagccggagggaggagcgagcgaggaagccaccagtataaaaccaacgccgcgtccttggcagccagcgatcccgcgactcagccgacggttttctgttcccccctctgacctgtccctccatcctcctcaattctcctccccggcgcccgccgttgacgaggcctcggaggaggaggactcgagcgcgccgctgtctcctgctccgccggctgccctcgcgttgagtttcacagggttgagttaggaggactgcgaccatgaaggccctcattcttgtgggaggattcggcacccgcctgcggccgctgacgctcagcgtgcccaagccgctcgtcgatttcgccaacaagcccatgatcctgcatcagatcgaggctctgaaagatgtgggagttacagaagttgtcctagccatcaattaccagccagaggtcatgctcaactttctcaaggacttcgagagcaagcttggcatcaagatcacctgctcccaggagacagagccaatgggaaccgctggaccgctggccctggcccgcgacaagctcgacgacggatccggcgagcctttcttcgtcctcaacagtgacgtgatcagcgagtacccgttcgcagagctcatcgagttccacaagtcccatggcggcgaggccacgatcatggtcaccaaggtggagcggttcgtggagaagcccaaggtgttcgtgggcaacaagatcaacgccggcatctacctgctgagcccgtccgtgctggaccgcatcgagctgaagccgacgtccatcgagaaggaggtgttcccgcgcatcgccgccgacaagggcctgttcgccatggtgctgccggggttctggatggacatcgggcagccgagggactacatcacggggctgaggctctacctggagtccctgaggaagagggcgccggcgaggctggcggcgggcgcgcacgtgctgggcaacgtgctggtacacgagacggcgacgatcggggaggggtgcctgatcgggccggacgtggccgtcggccccgggtgcgtggtggaggccggggtgcggctgtcgaggtgcaccgtgatgcggggcgcccgcgtgaagaagcacgcgtgcatctccggcagcatcgtggggtggcactcgacggtgggcaagtgggcgcgcgtggagaacatgaccatcctcggcgaggacgtgcacgtctgcgacgaggtgtacagcaacggcggcgtcgtgctcccgcacaaggagatcaagtccagcatcctcaagcccgagatcgtcatgtgatcgggaccatcgcccgcgccacatggtgaaaaagggtcgtatatttcttcatgcgtttgttggtttatttgtctgtctgtctgcaagtgtaaccagaggtgtccaccaaactgccaagtgtctatcaagctctatgtatgtctagacgtgtcgcaagtttttttttctttcttttttgaagacaaaatgcgtctcggttaaatttaagccccgggcttcaatttgtagataggtgtcagatgcatgggaataaagcatcagttttac

SEQ ID NO: 16527 - protein, 343 aa, Triticum aestivum
  peptide (1)..(343): Ceres Seq. ID no. 14302888
  misc_feature (2)..(140): Pfam Name: Pfam Description:  Nucleotidyl transferase
  misc_feature (138)..(343): NCBI GI NO: 4103324 NR Description: GDP-mannose pyrophosphorylase [Solanum tuberosum]
  misc_feature (1)..(140): NCBI GI NO: 4103324 NR Description: GDP-mannose pyrophosphorylase [Solanum tuberosum]
  misc_feature (138)..(343): NCBI GI NO: 14971013 NR Description: GDP-D-mannose pyrophosphorylase
  misc_feature (1)..(140): NCBI GI NO: 14971013 NR Description: GDP-D-mannose pyrophosphorylase
  misc_feature (138)..(343): NCBI GI NO: 15233308 NR Description: GDP-mannose pyrophosphorylase, putative
  misc_feature (1)..(140): NCBI GI NO: 15233308 NR Description: GDP-mannose pyrophosphorylase, putative
  misc_feature (138)..(327): NCBI GI NO: 25317396 NR Description: GDP-mannose pyrophosphorylase like protein
  misc_feature (1)..(140): NCBI GI NO: 25317396 NR Description: GDP-mannose pyrophosphorylase like protein
  misc_feature (138)..(327): NCBI GI NO: 15234771 NR Description: GDP-mannose pyrophosphorylase, putative
  misc_feature (21)..(140): NCBI GI NO: 15234771 NR Description: GDP-mannose pyrophosphorylase, putative
MKALILVGGFGTRLRPLTLSVPKPLVDFANKPMILHQIEALKDVGVTEVVLAINYQPEVMLNFLKDFESKLGIKITCSQETEPMGTAGPLALARDKLDDGSGEPFFVLNSDVISEYPFAELIEFHKSHGGEATIMVTKVERFVEKPKVFVGNKINAGIYLLSPSVLDRIELKPTSIEKEVFPRIAADKGLFAMVLPGFWMDIGQPRDYITGLRLYLESLRKRAPARLAAGAHVLGNVLVHETATIGEGCLIGPDVAVGPGCVVEAGVRLSRCTVMRGARVKKHACISGSIVGWHSTVGKWARVENMTILGEDVHVCDEVYSNGGVVLPHKEIKSSILKPEIVM

SEQ ID NO: 16528 - protein, 311 aa, Triticum aestivum
  peptide (1)..(311): Ceres Seq. ID no. 14302889
  misc_feature (1)..(108): Pfam Name: Pfam Description:  Nucleotidyl transferase
  misc_feature (106)..(311): NCBI GI NO: 4103324 NR Description: GDP-mannose pyrophosphorylase [Solanum tuberosum]
  misc_feature (1)..(108): NCBI GI NO: 4103324 NR Description: GDP-mannose pyrophosphorylase [Solanum tuberosum]
  misc_feature (106)..(311): NCBI GI NO: 14971013 NR Description: GDP-D-mannose pyrophosphorylase
  misc_feature (1)..(108): NCBI GI NO: 14971013 NR Description: GDP-D-mannose pyrophosphorylase
  misc_feature (106)..(311): NCBI GI NO: 15233308 NR Description: GDP-mannose pyrophosphorylase, putative
  misc_feature (1)..(108): NCBI GI NO: 15233308 NR Description: GDP-mannose pyrophosphorylase, putative
  misc_feature (106)..(295): NCBI GI NO: 25317396 NR Description: GDP-mannose pyrophosphorylase like protein
  misc_feature (1)..(108): NCBI GI NO: 25317396 NR Description: GDP-mannose pyrophosphorylase like protein
  misc_feature (106)..(295): NCBI GI NO: 15234771 NR Description: GDP-mannose pyrophosphorylase, putative
  misc_feature (1)..(108): NCBI GI NO: 15234771 NR Description: GDP-mannose pyrophosphorylase, putative
MILHQIEALKDVGVTEVVLAINYQPEVMLNFLKDFESKLGIKITCSQETEPMGTAGPLALARDKLDDGSGEPFFVLNSDVISEYPFAELIEFHKSHGGEATIMVTKVERFVEKPKVFVGNKINAGIYLLSPSVLDRIELKPTSIEKEVFPRIAADKGLFAMVLPGFWMDIGQPRDYITGLRLYLESLRKRAPARLAAGAHVLGNVLVHETATIGEGCLIGPDVAVGPGCVVEAGVRLSRCTVMRGARVKKHACISGSIVGWHSTVGKWARVENMTILGEDVHVCDEVYSNGGVVLPHKEIKSSILKPEIVM

SEQ ID NO: 16529 - protein, 284 aa, Triticum aestivum
  peptide (1)..(284): Ceres Seq. ID no. 14302890
  misc_feature (1)..(81): Pfam Name: Pfam Description:  Nucleotidyl transferase
  misc_feature (79)..(284): NCBI GI NO: 4103324 NR Description: GDP-mannose pyrophosphorylase [Solanum tuberosum]
  misc_feature (1)..(81): NCBI GI NO: 4103324 NR Description: GDP-mannose pyrophosphorylase [Solanum tuberosum]
  misc_feature (79)..(284): NCBI GI NO: 14971013 NR Description: GDP-D-mannose pyrophosphorylase
  misc_feature (1)..(81): NCBI GI NO: 14971013 NR Description: GDP-D-mannose pyrophosphorylase
  misc_feature (79)..(284): NCBI GI NO: 15233308 NR Description: GDP-mannose pyrophosphorylase, putative
  misc_feature (1)..(81): NCBI GI NO: 15233308 NR Description: GDP-mannose pyrophosphorylase, putative
  misc_feature (79)..(268): NCBI GI NO: 25317396 NR Description: GDP-mannose pyrophosphorylase like protein
  misc_feature (1)..(81): NCBI GI NO: 25317396 NR Description: GDP-mannose pyrophosphorylase like protein
  misc_feature (79)..(268): NCBI GI NO: 15234771 NR Description: GDP-mannose pyrophosphorylase, putative
  misc_feature (1)..(81): NCBI GI NO: 15234771 NR Description: GDP-mannose pyrophosphorylase, putative
MLNFLKDFESKLGIKITCSQETEPMGTAGPLALARDKLDDGSGEPFFVLNSDVISEYPFAELIEFHKSHGGEATIMVTKVERFVEKPKVFVGNKINAGIYLLSPSVLDRIELKPTSIEKEVFPRIAADKGLFAMVLPGFWMDIGQPRDYITGLRLYLESLRKRAPARLAAGAHVLGNVLVHETATIGEGCLIGPDVAVGPGCVVEAGVRLSRCTVMRGARVKKHACISGSIVGWHSTVGKWARVENMTILGEDVHVCDEVYSNGGVVLPHKEIKSSILKPEIVM

SEQ ID NO: 16530 - DNA, 1283 bp, Triticum aestivum
  misc_feature (1)..(1283): Ceres Seq. ID no. 13662654
ataatttcgcctaatatcctcccgcgccgcgcgtctgcgcgggcaccacaaaccagaagaagaaatggcagcgggccccacgccatccaccgccgcgtccttccggccgcccctgccgcctccgccgccgtgcttcgactatcggtccgcgtcgctcgccgacacgcgtgccagcgcagccgcggcggacccagcgttggctgggttggtcgagtccggcgcactggtacgcgtcccgcggcggcggttcgggccggtgccggcgtggcggccgccggacttcgctgagcccgaggacgtgtggatcctcgggacctcgcacctctccgcggagtccgccgacgaggtcgagcgcgtgctccgtgccgtccgccccgacaacgtcgtcgtcgaactctgccggagcagagccgggatcatgtacgcttccgacgacgcctccggcgagccgctgttgaaatccaacatgttctcgctcggcggcgccaagttcttcggagccgtcaaccggagcatcaacctgggtggacagagtgctcttgctctgcgtttgctcctagctgttttttcgtccaagatttcttctggcgcgaaccggccgtttggggaggagttccgagcagctaggagggtgtctgaagatattggcgctcagctcgttcttggggatcgccctattgaaataactcttgaacgagctttgaaatccctcagctgggatgaaaagactaaactcgtaatctcattattccgtggaatcacttcaacgactgatatgccgcaggatgagaaagctgcggttagcccgtacgagctgtacgagaagcttagcagctcatatccttcactgctacagcctctcgtacatgagcgcgacatgttcatggcttggtccctaaagaggagcaaggccgtgaacaagagcaagacggtggttggggtcatcgggaaggggcatatgaacggcgtggtgtacgcgctgatctctgaccagggggacctgaggttccgcgacctcgtcggcagggaatcgtcggagacctgggctagctccgtcgtcaagggcctggtcagggatacggtgatagggctcgctctctgggctctgtacgaactgctgcaagctgccgccgtacatataaagctgtagctgaagtccatttttactggcaaagactgacattcgtaaccgtgcacgctctttgcaacgtccatgcagcttgagattgtaaagtcaagtgaagtactccatatgtaacttctataagacgttaagggattcc

SEQ ID NO: 16531 - protein, 361 aa, Triticum aestivum
  peptide (1)..(361): Ceres Seq. ID no. 13662655
  misc_feature (75)..(315): Pfam Name: Pfam Description:  TraB family
  misc_feature (6)..(350): NCBI GI NO: 19699285 NR Description: AT5g52030/MSG15_11 [Arabidopsis thaliana]
  misc_feature (20)..(350): NCBI GI NO: 10177738 NR Description: gene_id:MSG15
  misc_feature (119)..(350): NCBI GI NO: 22327748 NR Description: expressed protein [Arabidopsis thaliana]
  misc_feature (149)..(303): NCBI GI NO: 28828782 NR Description: similar to Plasmodium falciparum (isolate 3D7)
  misc_feature (81)..(134): NCBI GI NO: 28828782 NR Description: similar to Plasmodium falciparum (isolate 3D7)
  misc_feature (163)..(302): NCBI GI NO: 30679206 NR Description: expressed protein [Arabidopsis thaliana]
  misc_feature (78)..(119): NCBI GI NO: 30679206 NR Description: expressed protein [Arabidopsis thaliana]
  misc_feature (79)..(302): NCBI GI NO: 21357445 NR Description: CG12360-PA [Drosophila melanogaster]
  misc_feature (79)..(303): NCBI GI NO: 17540248 NR Description: TraB family [Caenorhabditis elegans]
  misc_feature (79)..(303): NCBI GI NO: 30794613 NR Description: Hypothetical protein F38A5.2a
MAAGPTPSTAASFRPPLPPPPPCFDYRSASLADTRASAAAADPALAGLVESGALVRVPRRRFGPVPAWRPPDFAEPEDVWILGTSHLSAESADEVERVLRAVRPDNVVVELCRSRAGIMYASDDASGEPLLKSNMFSLGGAKFFGAVNRSINLGGQSALALRLLLAVFSSKISSGANRPFGEEFRAARRVSEDIGAQLVLGDRPIEITLERALKSLSWDEKTKLVISLFRGITSTTDMPQDEKAAVSPYELYEKLSSSYPSLLQPLVHERDMFMAWSLKRSKAVNKSKTVVGVIGKGHMNGVVYALISDQGDLRFRDLVGRESSETWASSVVKGLVRDTVIGLALWALYELLQAAAVHIKL

SEQ ID NO: 16532 - protein, 243 aa, Triticum aestivum
  peptide (1)..(243): Ceres Seq. ID no. 13662656
  misc_feature (1)..(197): Pfam Name: Pfam Description:  TraB family
  misc_feature (1)..(232): NCBI GI NO: 19699285 NR Description: AT5g52030/MSG15_11 [Arabidopsis thaliana]
  misc_feature (1)..(232): NCBI GI NO: 10177738 NR Description: gene_id:MSG15
  misc_feature (1)..(232): NCBI GI NO: 22327748 NR Description: expressed protein [Arabidopsis thaliana]
  misc_feature (31)..(185): NCBI GI NO: 28828782 NR Description: similar to Plasmodium falciparum (isolate 3D7)
  misc_feature (1)..(16): NCBI GI NO: 28828782 NR Description: similar to Plasmodium falciparum (isolate 3D7)
  misc_feature (45)..(184): NCBI GI NO: 30679206 NR Description: expressed protein [Arabidopsis thaliana]
  misc_feature (1)..(184): NCBI GI NO: 21357445 NR Description: CG12360-PA [Drosophila melanogaster]
  misc_feature (1)..(185): NCBI GI NO: 17540248 NR Description: TraB family [Caenorhabditis elegans]
  misc_feature (1)..(185): NCBI GI NO: 30794613 NR Description: Hypothetical protein F38A5.2a
  misc_feature (1)..(185): NCBI GI NO: 30794614 NR Description: Hypothetical protein F38A5.2b
MYASDDASGEPLLKSNMFSLGGAKFFGAVNRSINLGGQSALALRLLLAVFSSKISSGANRPFGEEFRAARRVSEDIGAQLVLGDRPIEITLERALKSLSWDEKTKLVISLFRGITSTTDMPQDEKAAVSPYELYEKLSSSYPSLLQPLVHERDMFMAWSLKRSKAVNKSKTVVGVIGKGHMNGVVYALISDQGDLRFRDLVGRESSETWASSVVKGLVRDTVIGLALWALYELLQAAAVHIKL

SEQ ID NO: 16533 - protein, 227 aa, Triticum aestivum
  peptide (1)..(227): Ceres Seq. ID no. 13662657
  misc_feature (1)..(181): Pfam Name: Pfam Description:  TraB family
  misc_feature (1)..(216): NCBI GI NO: 19699285 NR Description: AT5g52030/MSG15_11 [Arabidopsis thaliana]
  misc_feature (1)..(216): NCBI GI NO: 10177738 NR Description: gene_id:MSG15
  misc_feature (1)..(216): NCBI GI NO: 22327748 NR Description: expressed protein [Arabidopsis thaliana]
  misc_feature (15)..(169): NCBI GI NO: 28828782 NR Description: similar to Plasmodium falciparum (isolate 3D7)
  misc_feature (29)..(168): NCBI GI NO: 30679206 NR Description: expressed protein [Arabidopsis thaliana]
  misc_feature (1)..(168): NCBI GI NO: 21357445 NR Description: CG12360-PA [Drosophila melanogaster]
  misc_feature (1)..(169): NCBI GI NO: 17540248 NR Description: TraB family [Caenorhabditis elegans]
  misc_feature (1)..(169): NCBI GI NO: 30794613 NR Description: Hypothetical protein F38A5.2a
  misc_feature (1)..(169): NCBI GI NO: 30794614 NR Description: Hypothetical protein F38A5.2b
  misc_feature (1)..(169): NCBI GI NO: 17540246 NR Description: TraB family [Caenorhabditis elegans]
MFSLGGAKFFGAVNRSINLGGQSALALRLLLAVFSSKISSGANRPFGEEFRAARRVSEDIGAQLVLGDRPIEITLERALKSLSWDEKTKLVISLFRGITSTTDMPQDEKAAVSPYELYEKLSSSYPSLLQPLVHERDMFMAWSLKRSKAVNKSKTVVGVIGKGHMNGVVYALISDQGDLRFRDLVGRESSETWASSVVKGLVRDTVIGLALWALYELLQAAAVHIKL

SEQ ID NO: 16534 - DNA, 1644 bp, Triticum aestivum
  misc_feature (1)..(1644): Ceres Seq. ID no. 13657789
atccaattccaaaaccacgcactagtcgacgacggccacctcgccgccgccgtaacgcgcacggtctcaccttaccactcattaccgcgcttccagttccgtacgcctcatgccgccggccgcgcgggtcaaacctcccaaaacatgaaactcggtgcaatggggtcgtgccgcttgcccccggccatcgcggccgccgcgctggccgcggctgcgctgctggtgctcttccgcgcctccccgtacgggctcgcctacccccgcgcgggcgtccagccagggccgccgctcgtggcgaggggtcccgggagcccgccctccttcgcgtactggatatccggcacgggcggagagggccgcagggtcctcaggctgctcagggcggtgtatcacccgaggaaccggtacctgctgcacctggacgcgggggcgtcgcgggacgagcggacggagctggccgccgctgcgcgggacgaggcggcgtggagggagttctcaaacgtcgacgtggtaggggagagctacgcggtagacaggacgggctcctcggtgctcgccgcggcgctgcacggcgccgccgtgctgctcaggattggggctgactgggactggttcgtcacgctcagctcctgggactatcctctcgtcacgcaggacgatctcttttatgcattttcttctgtaccaaggcacctcaactttattgatcacacaagtaacctcggatggaaagagcatgaaaggtttgaaaaacttattgtcgacgcaagtctatatatggacaagaatacccagccctttcctgcgacagaaacaagacaaatgcctgaggcattcaagatattcacaggctctccatgggtaattctgagtaggaacttcactgaacattgcgtgcatggctgggacaacctcccccgcaggctactgatgtactttgccaacgctgcttactccatggaatcatatttccagactgtcatatgcagttcatctgactttagaaacaccactgtcaacggcgatctacgtttctttgtttgggacgatcctcctgggctggagccgcgtattcttgatgaaacgcatctcgataacatggtgaacagcagcgctgccttcgcaaggcggtttgtggaggaagcaccagtgctgaagaaggttgatgatgagctactgaaccgttcttcggcccagttggttcctggtgtgtggtgccggaatttgggtgaaaagcaaggaggcggggatgtggaggcgtgctcggaatggggcgacattaacgttgtcaggcctgggcgtgctggagagcggttgaggcgcttcatatctgagatcattcatataagaggatgcacggtcgcagcagctagctgaaagccgaacccaccacaagtctggaattctttgtcaagagagcagttaaacaaagaatttaaggaacacattcttcgctgcaggtaaagcacgcgttgctgcagtcgacagttctaccaggctgcataataccactgacgctccttctacacaaactaggtacaagtattttcgaacgaagggaactgtataaagctgtaactgatttgccctttttttaaccatatggataggacatagaataggttacactgcagtagttacagt

SEQ ID NO: 16535 - protein, 458 aa, Triticum aestivum
  peptide (1)..(458): Ceres Seq. ID no. 13657790
  misc_feature (108)..(334): Pfam Name: Pfam Description:  Core-2/I-Branching enzyme
  misc_feature (58)..(453): NCBI GI NO: 32489778 NR Description: OSJNBb0018A10.9
  misc_feature (51)..(447): NCBI GI NO: 34895394 NR Description: P0445D12.4
  misc_feature (95)..(447): NCBI GI NO: 15242532 NR Description: N-acetylglucosaminyltransferase family
  misc_feature (92)..(447): NCBI GI NO: 18409754 NR Description: N-acetylglucosaminyltransferase family
  misc_feature (98)..(447): NCBI GI NO: 15242199 NR Description: N-acetylglucosaminyltransferase family
  misc_feature (104)..(447): NCBI GI NO: 15229570 NR Description: expressed protein [Arabidopsis thaliana]
  misc_feature (105)..(446): NCBI GI NO: 15218824 NR Description: N-acetylglucosaminyltransferase family
  misc_feature (56)..(447): NCBI GI NO: 34909950 NR Description: P0695H10.11
  misc_feature (106)..(447): NCBI GI NO: 15236287 NR Description: N-acetylglucosaminyltransferase family
  misc_feature (106)..(448): NCBI GI NO: 15146308 NR Description: AT3g15350/K7L4_15 [Arabidopsis thaliana]
IQFQNHALVDDGHLAAAVTRTVSPYHSLPRFQFRTPHAAGRAGQTSQNMKLGAMGSCRLPPAIAAAALAAAALLVLFRASPYGLAYPRAGVQPGPPLVARGPGSPPSFAYWISGTGGEGRRVLRLLRAVYHPRNRYLLHLDAGASRDERTELAAAARDEAAWREFSNVDVVGESYAVDRTGSSVLAAALHGAAVLLRIGADWDWFVTLSSWDYPLVTQDDLFYAFSSVPRHLNFIDHTSNLGWKEHERFEKLIVDASLYMDKNTQPFPATETRQMPEAFKIFTGSPWVILSRNFTEHCVHGWDNLPRRLLMYFANAAYSMESYFQTVICSSSDFRNTTVNGDLRFFVWDDPPGLEPRILDETHLDNMVNSSAAFARRFVEEAPVLKKVDDELLNRSSAQLVPGVWCRNLGEKQGGGDVEACSEWGDINVVRPGRAGERLRRFISEIIHIRGCTVAAAS

SEQ ID NO: 16536 - protein, 410 aa, Triticum aestivum
  peptide (1)..(410): Ceres Seq. ID no. 13657791
  misc_feature (60)..(286): Pfam Name: Pfam Description:  Core-2/I-Branching enzyme
  misc_feature (10)..(405): NCBI GI NO: 32489778 NR Description: OSJNBb0018A10.9
  misc_feature (3)..(399): NCBI GI NO: 34895394 NR Description: P0445D12.4
  misc_feature (47)..(399): NCBI GI NO: 15242532 NR Description: N-acetylglucosaminyltransferase family
  misc_feature (44)..(399): NCBI GI NO: 18409754 NR Description: N-acetylglucosaminyltransferase family
  misc_feature (50)..(399): NCBI GI NO: 15242199 NR Description: N-acetylglucosaminyltransferase family
  misc_feature (56)..(399): NCBI GI NO: 15229570 NR Description: expressed protein [Arabidopsis thaliana]
  misc_feature (57)..(398): NCBI GI NO: 15218824 NR Description: N-acetylglucosaminyltransferase family
  misc_feature (8)..(399): NCBI GI NO: 34909950 NR Description: P0695H10.11
  misc_feature (58)..(399): NCBI GI NO: 15236287 NR Description: N-acetylglucosaminyltransferase family
  misc_feature (58)..(400): NCBI GI NO: 15146308 NR Description: AT3g15350/K7L4_15 [Arabidopsis thaliana]
MKLGAMGSCRLPPAIAAAALAAAALLVLFRASPYGLAYPRAGVQPGPPLVARGPGSPPSFAYWISGTGGEGRRVLRLLRAVYHPRNRYLLHLDAGASRDERTELAAAARDEAAWREFSNVDVVGESYAVDRTGSSVLAAALHGAAVLLRIGADWDWFVTLSSWDYPLVTQDDLFYAFSSVPRHLNFIDHTSNLGWKEHERFEKLIVDASLYMDKNTQPFPATETRQMPEAFKIFTGSPWVILSRNFTEHCVHGWDNLPRRLLMYFANAAYSMESYFQTVICSSSDFRNTTVNGDLRFFVWDDPPGLEPRILDETHLDNMVNSSAAFARRFVEEAPVLKKVDDELLNRSSAQLVPGVWCRNLGEKQGGGDVEACSEWGDINVVRPGRAGERLRRFISEIIHIRGCTVAAAS

SEQ ID NO: 16537 - protein, 405 aa, Triticum aestivum
  peptide (1)..(405): Ceres Seq. ID no. 13657792
  misc_feature (55)..(281): Pfam Name: Pfam Description:  Core-2/I-Branching enzyme
  misc_feature (5)..(400): NCBI GI NO: 32489778 NR Description: OSJNBb0018A10.9
  misc_feature (1)..(394): NCBI GI NO: 34895394 NR Description: P0445D12.4
  misc_feature (42)..(394): NCBI GI NO: 15242532 NR Description: N-acetylglucosaminyltransferase family
  misc_feature (39)..(394): NCBI GI NO: 18409754 NR Description: N-acetylglucosaminyltransferase family
  misc_feature (45)..(394): NCBI GI NO: 15242199 NR Description: N-acetylglucosaminyltransferase family
  misc_feature (51)..(394): NCBI GI NO: 15229570 NR Description: expressed protein [Arabidopsis thaliana]
  misc_feature (52)..(393): NCBI GI NO: 15218824 NR Description: N-acetylglucosaminyltransferase family
  misc_feature (3)..(394): NCBI GI NO: 34909950 NR Description: P0695H10.11
  misc_feature (53)..(394): NCBI GI NO: 15236287 NR Description: N-acetylglucosaminyltransferase family
  misc_feature (53)..(395): NCBI GI NO: 15146308 NR Description: AT3g15350/K7L4_15 [Arabidopsis thaliana]
MGSCRLPPAIAAAALAAAALLVLFRASPYGLAYPRAGVQPGPPLVARGPGSPPSFAYWISGTGGEGRRVLRLLRAVYHPRNRYLLHLDAGASRDERTELAAAARDEAAWREFSNVDVVGESYAVDRTGSSVLAAALHGAAVLLRIGADWDWFVTLSSWDYPLVTQDDLFYAFSSVPRHLNFIDHTSNLGWKEHERFEKLIVDASLYMDKNTQPFPATETRQMPEAFKIFTGSPWVILSRNFTEHCVHGWDNLPRRLLMYFANAAYSMESYFQTVICSSSDFRNTTVNGDLRFFVWDDPPGLEPRILDETHLDNMVNSSAAFARRFVEEAPVLKKVDDELLNRSSAQLVPGVWCRNLGEKQGGGDVEACSEWGDINVVRPGRAGERLRRFISEIIHIRGCTVAAAS

SEQ ID NO: 16538 - DNA, 1410 bp, Triticum aestivum
  misc_feature (1)..(1410): Ceres Seq. ID no. 13657609
aatcgaaaaggaaaagtccattcaaccttcggaaaactttctacgccgtagctgcagcactgcacttccgctatgcaccgctcaaccaccattgccaagctcgccttgctcctcctcgccactgcagccatgtcatgcggcttcttcgccgtcgcccatgcgcatgcgcggaagagctgctggccgcgcgagagggacgtgttgctggccttgaagcagggcatcaacgacaccgacggcgtcctcgcctcatggcaaaaactgcgccatgactgctgccgctggacgggcgtcgcctgcagcaacgaaaccggccatgtcaccgagcttgacatcggtctcagctggttgttcggccagataagtccttccttgctttctctccagcatctcgactacctggatctcagcaccacctccctagttggaccaaacggcagcagtgtattcccagatttcttgtcttctttgcacaacttgagacatctcgatctcgcccgcacgccatactctggtagaattcctgctcagctttccaatctttcaaatttggagtatctcgatctcagttggacatccctgcatggtcgtgctcagttcctgttttcttacaaaaacttgagacatctcgatctctccagaatgctcttttctggtacactgccgcgacagctaggcaatctatcaaacttgcaacaccttgacctccgttatatgcaaaatatacacacagcagatgtctcatggataactcatatgcatttcctggaatatcttgacatgagtgacataaatctcagcaccgccgacgtgttccctgtgtccaacacaatcccaactctcaaggacctcattcttagtaactgctcacttccaaatgcaaaccagccgctaaaacacctaaacctcacaagacttgagctgcttgatctcagcagcaactatctaggccatcgaattgatacgagttggttttggaacataacaggcatcacaggtcagggtggacgcggtccggtccggtccgggctttgaccgagccagcctttggaccggccgcggccggtccggtccggaccggaccaaggtggccagcgagcctactatccaggaccggaccgagaggagcaaagctcggccagcccgaatggaccgaatgggaccgatggctgggactctgtttaggctattttccagcctgggagtgctttgttggccattgtttaggctgttttgacgtatttagactgtagctgtacctgggagtgctctattaagcgttttggccattatttagcagtgccctgttgcgctttttggccacaatttaggctgtccaaatttagtgagtgctctgtttctgtataatgactagtatggcataagtaatttggacagcattttatttgc

SEQ ID NO: 16539 - protein, 320 aa, Triticum aestivum
  peptide (1)..(320): Ceres Seq. ID no. 15220613
  misc_feature (4)..(238): NCBI GI NO: 5739323 NR Description: Cf2/Cf5 disease resistance protein homolog
  misc_feature (6)..(229): NCBI GI NO: 37530640 NR Description: putative Cf2/Cf5 disease resistance protein homolog
  misc_feature (106)..(307): NCBI GI NO: 37530640 NR Description: putative Cf2/Cf5 disease resistance protein homolog
  misc_feature (139)..(307): NCBI GI NO: 5739323 NR Description: Cf2/Cf5 disease resistance protein homolog
  misc_feature (12)..(299): NCBI GI NO: 38636680 NR Description: putative HcrVf3 protein
  misc_feature (10)..(292): NCBI GI NO: 34912370 NR Description: putative Cf2/Cf5 disease resistance protein
  misc_feature (1)..(305): NCBI GI NO: 34912372 NR Description: putative Cf2/Cf5 disease resistance protein
  misc_feature (1)..(290): NCBI GI NO: 14330716 NR Description: HcrVf2 protein [Malus floribunda]
  misc_feature (148)..(307): NCBI GI NO: 34912370 NR Description: putative Cf2/Cf5 disease resistance protein
  misc_feature (1)..(290): NCBI GI NO: 14330718 NR Description: HcrVf3 protein [Malus floribunda]
MHRSTTIAKLALLLLATAAMSCGFFAVAHAHARKSCWPRERDVLLALKQGINDTDGVLASWQKLRHDCCRWTGVACSNETGHVTELDIGLSWLFGQISPSLLSLQHLDYLDLSTTSLVGPNGSSVFPDFLSSLHNLRHLDLARTPYSGRIPAQLSNLSNLEYLDLSWTSLHGRAQFLFSYKNLRHLDLSRMLFSGTLPRQLGNLSNLQHLDLRYMQNIHTADVSWITHMHFLEYLDMSDINLSTADVFPVSNTIPTLKDLILSNCSLPNANQPLKHLNLTRLELLDLSSNYLGHRIDTSWFWNITGITGQGGRGPVRSGL

SEQ ID NO: 16540 - protein, 301 aa, Triticum aestivum
  peptide (1)..(301): Ceres Seq. ID no. 15220614
  misc_feature (1)..(219): NCBI GI NO: 5739323 NR Description: Cf2/Cf5 disease resistance protein homolog
  misc_feature (1)..(210): NCBI GI NO: 37530640 NR Description: putative Cf2/Cf5 disease resistance protein homolog
  misc_feature (87)..(288): NCBI GI NO: 37530640 NR Description: putative Cf2/Cf5 disease resistance protein homolog
  misc_feature (120)..(288): NCBI GI NO: 5739323 NR Description: Cf2/Cf5 disease resistance protein homolog
  misc_feature (1)..(280): NCBI GI NO: 38636680 NR Description: putative HcrVf3 protein
  misc_feature (1)..(273): NCBI GI NO: 34912370 NR Description: putative Cf2/Cf5 disease resistance protein
  misc_feature (1)..(286): NCBI GI NO: 34912372 NR Description: putative Cf2/Cf5 disease resistance protein
  misc_feature (1)..(271): NCBI GI NO: 14330716 NR Description: HcrVf2 protein [Malus floribunda]
  misc_feature (129)..(288): NCBI GI NO: 34912370 NR Description: putative Cf2/Cf5 disease resistance protein
  misc_feature (1)..(271): NCBI GI NO: 14330718 NR Description: HcrVf3 protein [Malus floribunda]
MSCGFFAVAHAHARKSCWPRERDVLLALKQGINDTDGVLASWQKLRHDCCRWTGVACSNETGHVTELDIGLSWLFGQISPSLLSLQHLDYLDLSTTSLVGPNGSSVFPDFLSSLHNLRHLDLARTPYSGRIPAQLSNLSNLEYLDLSWTSLHGRAQFLFSYKNLRHLDLSRMLFSGTLPRQLGNLSNLQHLDLRYMQNIHTADVSWITHMHFLEYLDMSDINLSTADVFPVSNTIPTLKDLILSNCSLPNANQPLKHLNLTRLELLDLSSNYLGHRIDTSWFWNITGITGQGGRGPVRSGL

SEQ ID NO: 16541 - DNA, 956 bp, Triticum aestivum
  misc_feature (1)..(956): Ceres Seq. ID no. 12620168
acaagtaaaagaaacttcgggtcgccatcctgataaggatctaaagggaaatatgaacttgctgcagcaacttggtatacttccttgtggtgctacggcatggttgagtttcgcacagtcagcacagtctagtgaaggagtaaagttaaatatggtttacgaggttggggagctgtttgagctgggaattcagctttcttatctgctcatactacttggtctgcttggaactggtacattttttgtcatccgccaggttcttgtccgcagggagcttgatctttctgcgaaagacttgcaggaacaagtgagaagtggtgagggaagcgctactgaactatttgagcttggagcagtcatgctccggagaaaattttaccctgcagctatcaaatatctacagcaagcaatccaaaaatgggatagagatgagcaagatcttgcacaggtgtacaatgccctgggggtgagctacaagcgggagaacaaactggacaaggcaatcaagcaattcgagaaggccgtggagctccaaccaggctatgtgacggcatggaacaacctcggcgatgcatatgagcagcagaaggacctcgcgtcagcgctcagggcgttcgaggaggtattgctctttgatccgaacaacaaggtggcaaggccgcgccgagacgacctcaagtcgcgtgtgggcatgtacaagggggtgccggtgaagacgacggacaagcgatagccgccacgggtggacgaattcgtgcctcagttttggacagtagcatttgtaaacatgatgagaagttgtatgtagcatattggcggcgtcatccgtccgatctggccattgtagaatgtttcgaatattagcgcaaaaaaaaagtagaatttgcttttgaggtccgctccaagcccataacagctattttttgcgcttgctaacaaataaattatttgtatcc

SEQ ID NO: 16542 - protein, 243 aa, Triticum aestivum
  peptide (1)..(243): Ceres Seq. ID no. 12620169
  misc_feature (110)..(143): Pfam Name: Pfam Description:  TPR Domain
  misc_feature (21)..(243): NCBI GI NO: 37535090 NR Description: putative stress inducible protein
  misc_feature (39)..(243): NCBI GI NO: 7487355 NR Description: hypothetical protein T22J18
  misc_feature (39)..(243): NCBI GI NO: 22329737 NR Description: expressed protein; protein id: At1g22700
  misc_feature (39)..(243): NCBI GI NO: 30687988 NR Description: tetratricopeptide repeat (TPR)-containing protein
  misc_feature (39)..(243): NCBI GI NO: 21537104 NR Description: unknown [Arabidopsis thaliana]
  misc_feature (21)..(150): NCBI GI NO: 37535100 NR Description: unknown protein
  misc_feature (33)..(150): NCBI GI NO: 38636894 NR Description: stress inducible protein-like
  misc_feature (67)..(229): NCBI GI NO: 22299949 NR Description: photosystem I assembly related protein
  misc_feature (67)..(229): NCBI GI NO: 23042213 NR Description: hypothetical protein
  misc_feature (67)..(229): NCBI GI NO: 23129236 NR Description: hypothetical protein [Nostoc punctiforme]
QVKETSGRHPDKDLKGNMNLLQQLGILPCGATAWLSFAQSAQSSEGVKLNMVYEVGELFELGIQLSYLLILLGLLGTGTFFVIRQVLVRRELDLSAKDLQEQVRSGEGSATELFELGAVMLRRKFYPAAIKYLQQAIQKWDRDEQDLAQVYNALGVSYKRENKLDKAIKQFEKAVELQPGYVTAWNNLGDAYEQQKDLASALRAFEEVLLFDPNNKVARPRRDDLKSRVGMYKGVPVKTTDKR

SEQ ID NO: 16543 - protein, 226 aa, Triticum aestivum
  peptide (1)..(226): Ceres Seq. ID no. 12620170
  misc_feature (93)..(126): Pfam Name: Pfam Description:  TPR Domain
  misc_feature (4)..(226): NCBI GI NO: 37535090 NR Description: putative stress inducible protein
  misc_feature (22)..(226): NCBI GI NO: 7487355 NR Description: hypothetical protein T22J18
  misc_feature (22)..(226): NCBI GI NO: 22329737 NR Description: expressed protein; protein id: At1g22700
  misc_feature (22)..(226): NCBI GI NO: 30687988 NR Description: tetratricopeptide repeat (TPR)-containing protein
  misc_feature (22)..(226): NCBI GI NO: 21537104 NR Description: unknown [Arabidopsis thaliana]
  misc_feature (4)..(133): NCBI GI NO: 37535100 NR Description: unknown protein
  misc_feature (16)..(133): NCBI GI NO: 38636894 NR Description: stress inducible protein-like
  misc_feature (50)..(212): NCBI GI NO: 22299949 NR Description: photosystem I assembly related protein
  misc_feature (50)..(212): NCBI GI NO: 23042213 NR Description: hypothetical protein
  misc_feature (50)..(212): NCBI GI NO: 23129236 NR Description: hypothetical protein [Nostoc punctiforme]
MNLLQQLGILPCGATAWLSFAQSAQSSEGVKLNMVYEVGELFELGIQLSYLLILLGLLGTGTFFVIRQVLVRRELDLSAKDLQEQVRSGEGSATELFELGAVMLRRKFYPAAIKYLQQAIQKWDRDEQDLAQVYNALGVSYKRENKLDKAIKQFEKAVELQPGYVTAWNNLGDAYEQQKDLASALRAFEEVLLFDPNNKVARPRRDDLKSRVGMYKGVPVKTTDKR

SEQ ID NO: 16544 - protein, 193 aa, Triticum aestivum
  peptide (1)..(193): Ceres Seq. ID no. 12620171
  misc_feature (60)..(93): Pfam Name: Pfam Description:  TPR Domain
  misc_feature (1)..(193): NCBI GI NO: 37535090 NR Description: putative stress inducible protein
  misc_feature (1)..(193): NCBI GI NO: 7487355 NR Description: hypothetical protein T22J18
  misc_feature (1)..(193): NCBI GI NO: 22329737 NR Description: expressed protein; protein id: At1g22700
  misc_feature (1)..(193): NCBI GI NO: 30687988 NR Description: tetratricopeptide repeat (TPR)-containing protein
  misc_feature (1)..(193): NCBI GI NO: 21537104 NR Description: unknown [Arabidopsis thaliana]
  misc_feature (1)..(100): NCBI GI NO: 37535100 NR Description: unknown protein
  misc_feature (1)..(100): NCBI GI NO: 38636894 NR Description: stress inducible protein-like
  misc_feature (17)..(179): NCBI GI NO: 22299949 NR Description: photosystem I assembly related protein
  misc_feature (17)..(179): NCBI GI NO: 23042213 NR Description: hypothetical protein
  misc_feature (17)..(179): NCBI GI NO: 23129236 NR Description: hypothetical protein [Nostoc punctiforme]
MVYEVGELFELGIQLSYLLILLGLLGTGTFFVIRQVLVRRELDLSAKDLQEQVRSGEGSATELFELGAVMLRRKFYPAAIKYLQQAIQKWDRDEQDLAQVYNALGVSYKRENKLDKAIKQFEKAVELQPGYVTAWNNLGDAYEQQKDLASALRAFEEVLLFDPNNKVARPRRDDLKSRVGMYKGVPVKTTDKR

SEQ ID NO: 16545 - DNA, 2052 bp, Triticum aestivum
  misc_feature (1)..(2052): Ceres Seq. ID no. 13657610
accctcaccaccaccaccgcccatccatcggtcggctcgccgccaccagtcgagcccgcccgaccccggccatggcgcgggaggagctgtcgacggagatcgtgaaccgcggcgtggagccgtcgggcccggacgccgggtcgccgaccttctcggtgcgcgtgcgccgccggctgcccgacttcttgcagtcggtgaacctcaagtacgtgcggctcggctaccactacctgctgagccacggcgtgtacctggccaccatcccggtgatcgtgctggtgtgcggcgccgaggtgggcagcctcagccgcgacgagctgtggcgcaaggtgtgggacgaggccacctacgacctcgccaccgtgctcgccttcctcgccgtcctcgccttcaccatctccgtctacatcatgtcccgccccaggcccatctacctcatcgacttcgccacctacaagcccgccgacgaactcaaggtgtccaaggcggagttcatcgagctggcgcgcaagtcgggcaagttcgacgaggagagcctggcgttccaggcgcggctgctggccaagtccggcatcggggacgagtcctacatgccgcgctgcgtcttccagcccgacgccaactgcgccaccatgaaggagggccgcgccgaggcctccgccgccatgttcgccgcgctcgacgagctcttcgacaagtgccgcgtccgccccaaggacgtcggcgtgctcgtcgtcaactgcagcctcttcaaccccaccccctccctctccgccatgatcgtcaaccactacaagatgcgcggcaacatcctcagctacaatctggggggcatgggctgcagcgcgggcgtcatctccatcgacctggcgcgtgacatgctccaggccagcggcgctgggctcgccgtcgtggtgagcaccgaggccgtgtcattcacgtggtacgccgggaagcgccggtccatgctcatccccaacgccttcttccgcgcgggcgccgccgccgtgctgctgtcgaaccgccgcagggacttccgccgcgccaagtaccagctggagcacgtggtgcgcacgcacaagggcgccgacgaccgcgccttccgctccgtgtaccaggaggaggacgagcagcggatcaagggcctgtccatcagccgcgacctggtggaggtcggcggccacgcgctcaagaccaacatcaccaccctcggcccgctggtgctgcccttctcggagcagctcctcttcttcgccggcgtgctgttccgccacctctacccgtccaagacgtccaccccgccgccgccggccgccaacggggacacctcggccgccgcgccctacatcccggacttcaagcgcgcgttcgagcacttctgcatgcacgcggccagccgcgacgtgctggagcacctgcagcgcaacctgggcctccgcgacgccgacctggaggcctcccgcgccgcgctgcaccgcttcggcaacacctccagcagcagcatctggtacgagctggcctacctggaggccaagggccgcgtccgccgcggcgaccgcgtgtggcagctcgccttcggctccgggttcaagtgcaacagcgccgtgtggcgcgccgtccgccgcgtgcgccgcccgtccaggagcccgtggctggactgcgtcgaccagtacccggcgcgcatggacgcctgacccgatcgagatggcgaagcaggcgcacgtgctaataattaagcgaggtaaaggaacacgtccgtcgtcgtcgcgcccgcgttgggtaagtgcaggctaatggagatggtgctatcgatttgcatgtaactgcatgcatgcagtgccgctggtttaaggtttgagctttgcttaatttgtgctggtgttgtagcggttatctattgttaaggggtttaatcatagactacgtaccataatgcgcaagtgtgtgtgcgcgctcttgtgaaacttatgtgaacttgattatctacgtgcaatttcatttaaaaaaaaaaaaaaaaagaaaaaaaaaaaaaaaaaagcttatcgataccgt

SEQ ID NO: 16546 - protein, 563 aa, Triticum aestivum
  peptide (1)..(563): Ceres Seq. ID no. 15219868
  misc_feature (354)..(540): Pfam Name: Pfam Description:  Chalcone and stilbene synthases
  misc_feature (12)..(563): NCBI GI NO: 24960748 NR Description: Putative fiddlehead-like protein
  misc_feature (24)..(560): NCBI GI NO: 18447765 NR Description: fiddlehead-like protein [Gossypium hirsutum]
  misc_feature (29)..(558): NCBI GI NO: 15225270 NR Description: beta-ketoacyl-CoA synthase family
  misc_feature (29)..(558): NCBI GI NO: 8177727 NR Description: fiddlehead protein [Arabidopsis thaliana]
  misc_feature (29)..(558): NCBI GI NO: 8177711 NR Description: fiddlehead protein [Arabidopsis thaliana]
  misc_feature (29)..(558): NCBI GI NO: 8177723 NR Description: fiddlehead protein [Arabidopsis thaliana]
  misc_feature (24)..(558): NCBI GI NO: 19351907 NR Description: putative beta-ketoacyl-CoA synthase
  misc_feature (29)..(561): NCBI GI NO: 28864534 NR Description: fiddlehead-like protein [Tropaeolum majus]
  misc_feature (29)..(520): NCBI GI NO: 8177719 NR Description: fiddlehead protein [Arabidopsis thaliana]
  misc_feature (25)..(563): NCBI GI NO: 29417540 NR Description: beta-ketoacyl-CoA-synthase [Marchantia polymorpha]
PHHHHRPSIGRLAATSRARPTPAMAREELSTEIVNRGVEPSGPDAGSPTFSVRVRRRLPDFLQSVNLKYVRLGYHYLLSHGVYLATIPVIVLVCGAEVGSLSRDELWRKVWDEATYDLATVLAFLAVLAFTISVYIMSRPRPIYLIDFATYKPADELKVSKAEFIELARKSGKFDEESLAFQARLLAKSGIGDESYMPRCVFQPDANCATMKEGRAEASAAMFAALDELFDKCRVRPKDVGVLVVNCSLFNPTPSLSAMIVNHYKMRGNILSYNLGGMGCSAGVISIDLARDMLQASGAGLAVVVSTEAVSFTWYAGKRRSMLIPNAFFRAGAAAVLLSNRRRDFRRAKYQLEHVVRTHKGADDRAFRSVYQEEDEQRIKGLSISRDLVEVGGHALKTNITTLGPLVLPFSEQLLFFAGVLFRHLYPSKTSTPPPPAANGDTSAAAPYIPDFKRAFEHFCMHAASRDVLEHLQRNLGLRDADLEASRAALHRFGNTSSSSIWYELAYLEAKGRVRRGDRVWQLAFGSGFKCNSAVWRAVRRVRRPSRSPWLDCVDQYPARMDA

SEQ ID NO: 16547 - protein, 540 aa, Triticum aestivum
  peptide (1)..(540): Ceres Seq. ID no. 15219869
  misc_feature (331)..(517): Pfam Name: Pfam Description:  Chalcone and stilbene synthases
  misc_feature (1)..(540): NCBI GI NO: 24960748 NR Description: Putative fiddlehead-like protein
  misc_feature (1)..(537): NCBI GI NO: 18447765 NR Description: fiddlehead-like protein [Gossypium hirsutum]
  misc_feature (6)..(535): NCBI GI NO: 15225270 NR Description: beta-ketoacyl-CoA synthase family
  misc_feature (6)..(535): NCBI GI NO: 8177727 NR Description: fiddlehead protein [Arabidopsis thaliana]
  misc_feature (6)..(535): NCBI GI NO: 8177711 NR Description: fiddlehead protein [Arabidopsis thaliana]
  misc_feature (6)..(535): NCBI GI NO: 8177723 NR Description: fiddlehead protein [Arabidopsis thaliana]
  misc_feature (1)..(535): NCBI GI NO: 19351907 NR Description: putative beta-ketoacyl-CoA synthase
  misc_feature (6)..(538): NCBI GI NO: 28864534 NR Description: fiddlehead-like protein [Tropaeolum majus]
  misc_feature (6)..(497): NCBI GI NO: 8177719 NR Description: fiddlehead protein [Arabidopsis thaliana]
  misc_feature (2)..(540): NCBI GI NO: 29417540 NR Description: beta-ketoacyl-CoA-synthase [Marchantia polymorpha]
MAREELSTEIVNRGVEPSGPDAGSPTFSVRVRRRLPDFLQSVNLKYVRLGYHYLLSHGVYLATIPVIVLVCGAEVGSLSRDELWRKVWDEATYDLATVLAFLAVLAFTISVYIMSRPRPIYLIDFATYKPADELKVSKAEFIELARKSGKFDEESLAFQARLLAKSGIGDESYMPRCVFQPDANCATMKEGRAEASAAMFAALDELFDKCRVRPKDVGVLVVNCSLFNPTPSLSAMIVNHYKMRGNILSYNLGGMGCSAGVISIDLARDMLQASGAGLAVVVSTEAVSFTWYAGKRRSMLIPNAFFRAGAAAVLLSNRRRDFRRAKYQLEHVVRTHKGADDRAFRSVYQEEDEQRIKGLSISRDLVEVGGHALKTNITTLGPLVLPFSEQLLFFAGVLFRHLYPSKTSTPPPPAANGDTSAAAPYIPDFKRAFEHFCMHAASRDVLEHLQRNLGLRDADLEASRAALHRFGNTSSSSIWYELAYLEAKGRVRRGDRVWQLAFGSGFKCNSAVWRAVRRVRRPSRSPWLDCVDQYPARMDA

SEQ ID NO: 16548 - protein, 427 aa, Triticum aestivum
  peptide (1)..(427): Ceres Seq. ID no. 15219870
  misc_feature (218)..(404): Pfam Name: Pfam Description:  Chalcone and stilbene synthases
  misc_feature (1)..(427): NCBI GI NO: 24960748 NR Description: Putative fiddlehead-like protein
  misc_feature (1)..(424): NCBI GI NO: 18447765 NR Description: fiddlehead-like protein [Gossypium hirsutum]
  misc_feature (1)..(422): NCBI GI NO: 15225270 NR Description: beta-ketoacyl-CoA synthase family
  misc_feature (1)..(422): NCBI GI NO: 8177727 NR Description: fiddlehead protein [Arabidopsis thaliana]
  misc_feature (1)..(422): NCBI GI NO: 8177711 NR Description: fiddlehead protein [Arabidopsis thaliana]
  misc_feature (1)..(422): NCBI GI NO: 8177723 NR Description: fiddlehead protein [Arabidopsis thaliana]
  misc_feature (1)..(422): NCBI GI NO: 19351907 NR Description: putative beta-ketoacyl-CoA synthase
  misc_feature (1)..(425): NCBI GI NO: 28864534 NR Description: fiddlehead-like protein [Tropaeolum majus]
  misc_feature (1)..(384): NCBI GI NO: 8177719 NR Description: fiddlehead protein [Arabidopsis thaliana]
  misc_feature (1)..(427): NCBI GI NO: 29417540 NR Description: beta-ketoacyl-CoA-synthase [Marchantia polymorpha]
MSRPRPIYLIDFATYKPADELKVSKAEFIELARKSGKFDEESLAFQARLLAKSGIGDESYMPRCVFQPDANCATMKEGRAEASAAMFAALDELFDKCRVRPKDVGVLVVNCSLFNPTPSLSAMIVNHYKMRGNILSYNLGGMGCSAGVISIDLARDMLQASGAGLAVVVSTEAVSFTWYAGKRRSMLIPNAFFRAGAAAVLLSNRRRDFRRAKYQLEHVVRTHKGADDRAFRSVYQEEDEQRIKGLSISRDLVEVGGHALKTNITTLGPLVLPFSEQLLFFAGVLFRHLYPSKTSTPPPPAANGDTSAAAPYIPDFKRAFEHFCMHAASRDVLEHLQRNLGLRDADLEASRAALHRFGNTSSSSIWYELAYLEAKGRVRRGDRVWQLAFGSGFKCNSAVWRAVRRVRRPSRSPWLDCVDQYPARMDA

SEQ ID NO: 16549 - DNA, 1778 bp, Triticum aestivum
  misc_feature (1)..(1778): Ceres Seq. ID no. 13657220
acatcctaatcgaaaaataaaatccattcccctataacaaaccgacccaatcgcattcgccagcccccgaatcgcgatcccctccgcacctcggccccgccatggaggtgttctactacctcgtcttcggcggcctcgccgccgtcgtggcggcgctggagctcggcaagtccggcaaggaccgcgtcgccaccccgacggccttcaactccttcaagaacaactacgtcctcgtctactccctcatgatgtctggggactggctgcaggggccctacgtgtactacctctacagccagtacgggttcgacaagggcgacatcggccgcctcttcatcgccggcttcggctcctccatgctcttcggcaccatcgtcgggtcgctcgccgacaagcagggaaggaagagggcgtgcatcacctactgtatcacctacatcctcagctgcatcacgaagcactccccgcagtacaggattctgatgattggccgtgtgcttggaggcattgcaacatcgctgctcttctcggcgttcgagtcgtggctcgtcgcggagcacaacaagagaggttttgatccgcagtggctgtcaataacattctccaaggctatatttcttgggaatggcctagttgccattgtcgcagggctatttgcaaatctactggctgataacttgggttttggccctgtcgctccatttgatgctactgcttgcttcctagcaataggcatggcaatcatcttatcgtcgtggggtgagaactatggagatgcatctgaaggaaaggacttgatggcccagttcaaggttgcagctaaagccattgcttccgatgaaaagattgcattgcttggagccatacagtcattgtttgagggttcaatgtacacttttgttttcttgtggactcctgctttgagcccaaatgaagaagacattcctcatggcttcatatttgccacattcatgctctcctcgatgttgggtagctcaattgcatctcgtctattagctcggaagatgaaggtcgaaggttatatgcagattgtgttctcaatatcagctttcactcttttcctccctgttgttaccaatttcatagtacccccctcagagaaaggtggaagcatctccttcggaggctgtgtacagcttcttggtttctgcatattcgagtcatgtgttggcatattctggccctcaatcatgaagatgagatctcaatatatccccgaggaggcgagaagcactatcatgaacttcttccgcataccacttaacctgtttgtatgtgtggtgctttacaatgtgaatgccttcccaatcgctgtcatgtttggcatgtgctccattttcctattcatcgcagcaattttgcagaggcggctgatgtccgtgtccgaccttcacagatcaactaccgcagagatgacagcagaagatgagccactaaacccttgaaacacaccagcagccattgacgtgaaccgggcatggaacggtctccaacttcatctgcttctctgcagggctgctgaataagatgggaaaccgaaggctgcaacaaaacctcgtttagtttgctttgttaggtgctctcacggtattcagttttgtcgggagagaggacacggctcggcatgtattgagatatatgcactgcacagtagagctttggcatagtaccggatctgtactttccctcctattcttacgtttgctaataggatgatggtatttgtatttaaatccaaccagtctcttgatgaaagc

SEQ ID NO: 16550 - protein, 454 aa, Triticum aestivum
  peptide (1)..(454): Ceres Seq. ID no. 15219860
  misc_feature (4)..(356): Pfam Name: DUF791 Pfam Description: Protein of unknown function
  misc_feature (1)..(454): NCBI GI NO: 37536124 NR Description: putative transporter
  misc_feature (1)..(454): NCBI GI NO: 34902182 NR Description: Putative transporter
  misc_feature (1)..(454): NCBI GI NO: 15217708 NR Description: expressed protein [Arabidopsis thaliana]
  misc_feature (1)..(450): NCBI GI NO: 6633826 NR Description: F1N19.22 [Arabidopsis thaliana]
  misc_feature (1)..(453): NCBI GI NO: 18417054 NR Description: expressed protein [Arabidopsis thaliana]
  misc_feature (1)..(452): NCBI GI NO: 30693172 NR Description: expressed protein [Arabidopsis thaliana]
  misc_feature (144)..(452): NCBI GI NO: 11292198 NR Description: hypothetical protein F2K15
  misc_feature (1)..(155): NCBI GI NO: 11292198 NR Description: hypothetical protein F2K15
  misc_feature (1)..(331): NCBI GI NO: 7487513 NR Description: hypothetical protein T29A15
  misc_feature (349)..(404): NCBI GI NO: 7487513 NR Description: hypothetical protein T29A15
MEVFYYLVFGGLAAVVAALELGKSGKDRVATPTAFNSFKNNYVLVYSLMMSGDWLQGPYVYYLYSQYGFDKGDIGRLFIAGFGSSMLFGTIVGSLADKQGRKRACITYCITYILSCITKHSPQYRILMIGRVLGGIATSLLFSAFESWLVAEHNKRGFDPQWLSITFSKAIFLGNGLVAIVAGLFANLLADNLGFGPVAPFDATACFLAIGMAIILSSWGENYGDASEGKDLMAQFKVAAKAIASDEKIALLGAIQSLFEGSMYTFVFLWTPALSPNEEDIPHGFIFATFMLSSMLGSSIASRLLARKMKVEGYMQIVFSISAFTLFLPVVTNFIVPPSEKGGSISFGGCVQLLGFCIFESCVGIFWPSIMKMRSQYIPEEARSTIMNFFRIPLNLFVCVVLYNVNAFPIAVMFGMCSIFLFIAAILQRRLMSVSDLHRSTTAEMTAEDEPLNP

SEQ ID NO: 16551 - protein, 406 aa, Triticum aestivum
  peptide (1)..(406): Ceres Seq. ID no. 15219861
  misc_feature (1)..(308): Pfam Name: DUF791 Pfam Description: Protein of unknown function
  misc_feature (1)..(406): NCBI GI NO: 37536124 NR Description: putative transporter
  misc_feature (1)..(406): NCBI GI NO: 34902182 NR Description: Putative transporter
  misc_feature (1)..(406): NCBI GI NO: 15217708 NR Description: expressed protein [Arabidopsis thaliana]
  misc_feature (1)..(402): NCBI GI NO: 6633826 NR Description: F1N19.22 [Arabidopsis thaliana]
  misc_feature (1)..(405): NCBI GI NO: 18417054 NR Description: expressed protein [Arabidopsis thaliana]
  misc_feature (1)..(404): NCBI GI NO: 30693172 NR Description: expressed protein [Arabidopsis thaliana]
  misc_feature (96)..(404): NCBI GI NO: 11292198 NR Description: hypothetical protein F2K15
  misc_feature (1)..(107): NCBI GI NO: 11292198 NR Description: hypothetical protein F2K15
  misc_feature (1)..(283): NCBI GI NO: 7487513 NR Description: hypothetical protein T29A15
  misc_feature (301)..(356): NCBI GI NO: 7487513 NR Description: hypothetical protein T29A15
MMSGDWLQGPYVYYLYSQYGFDKGDIGRLFIAGFGSSMLFGTIVGSLADKQGRKRACITYCITYILSCITKHSPQYRILMIGRVLGGIATSLLFSAFESWLVAEHNKRGFDPQWLSITFSKAIFLGNGLVAIVAGLFANLLADNLGFGPVAPFDATACFLAIGMAIILSSWGENYGDASEGKDLMAQFKVAAKAIASDEKIALLGAIQSLFEGSMYTFVFLWTPALSPNEEDIPHGFIFATFMLSSMLGSSIASRLLARKMKVEGYMQIVFSISAFTLFLPVVTNFIVPPSEKGGSISFGGCVQLLGFCIFESCVGIFWPSIMKMRSQYIPEEARSTIMNFFRIPLNLFVCVVLYNVNAFPIAVMFGMCSIFLFIAAILQRRLMSVSDLHRSTTAEMTAEDEPLNP

SEQ ID NO: 16552 - protein, 405 aa, Triticum aestivum
  peptide (1)..(405): Ceres Seq. ID no. 15219862
  misc_feature (1)..(307): Pfam Name: DUF791 Pfam Description: Protein of unknown function
  misc_feature (1)..(405): NCBI GI NO: 37536124 NR Description: putative transporter
  misc_feature (1)..(405): NCBI GI NO: 34902182 NR Description: Putative transporter
  misc_feature (1)..(405): NCBI GI NO: 15217708 NR Description: expressed protein [Arabidopsis thaliana]
  misc_feature (1)..(401): NCBI GI NO: 6633826 NR Description: F1N19.22 [Arabidopsis thaliana]
  misc_feature (1)..(404): NCBI GI NO: 18417054 NR Description: expressed protein [Arabidopsis thaliana]
  misc_feature (1)..(403): NCBI GI NO: 30693172 NR Description: expressed protein [Arabidopsis thaliana]
  misc_feature (95)..(403): NCBI GI NO: 11292198 NR Description: hypothetical protein F2K15
  misc_feature (1)..(106): NCBI GI NO: 11292198 NR Description: hypothetical protein F2K15
  misc_feature (1)..(282): NCBI GI NO: 7487513 NR Description: hypothetical protein T29A15
  misc_feature (300)..(355): NCBI GI NO: 7487513 NR Description: hypothetical protein T29A15
MSGDWLQGPYVYYLYSQYGFDKGDIGRLFIAGFGSSMLFGTIVGSLADKQGRKRACITYCITYILSCITKHSPQYRILMIGRVLGGIATSLLFSAFESWLVAEHNKRGFDPQWLSITFSKAIFLGNGLVAIVAGLFANLLADNLGFGPVAPFDATACFLAIGMAIILSSWGENYGDASEGKDLMAQFKVAAKAIASDEKIALLGAIQSLFEGSMYTFVFLWTPALSPNEEDIPHGFIFATFMLSSMLGSSIASRLLARKMKVEGYMQIVFSISAFTLFLPVVTNFIVPPSEKGGSISFGGCVQLLGFCIFESCVGIFWPSIMKMRSQYIPEEARSTIMNFFRIPLNLFVCVVLYNVNAFPIAVMFGMCSIFLFIAAILQRRLMSVSDLHRSTTAEMTAEDEPLNP

SEQ ID NO: 16553 - DNA, 1725 bp, Triticum aestivum
  misc_feature (1)..(1725): Ceres Seq. ID no. 14301572
aaagcttcacctcccctcaaaaaaaaaagatttaccttcaccggtctctctcgcgccaaccggcggcgctcgtctccctcgccgccgtaagcacggtggcgaagccgaacccaagcgaggtggccaagtagtcggtgagatgctgctagtagagctgctccgctgccagatccaggagtggtacccggcattccgccgccacaccgtccccaccgtcaccatccccctccccgccgccttcctccgctacctcgccggccagcccgcccaccccgtccccgacgcccctcaccaggacgcggaagggcctcccccattcctcctcccgtcgctcgcctccggccgcacccccttcccgccgctccacctcccggaccccgtcgaccacgacgacagctccgacctcttctccgtctgcgacgacgacgacgacgacgagagcccgcccctccccgccttccccgagctggaggccgcggtcgacgcggccatcgccgagctcggcggcgccgcgctccccaagctcaactggagcgcgcccaaggacgccgccttcatgtccgccgacggcaccgtccgctgcacctgcttcgccgaggtcgccatgctgctccgctcctcggactgcgtcgcgcacgacctctcctccgcgcgcccgtcctgccaggacttcgtgtgcgccagggaaggtgttcgacggaatgccggacagggcagtggtgccaaccaggcgggtgctccatcgaatggcggagggagcaccagtggtgctggttctctgagtgatcctcccactgaggatcgcaatgagggaggcaggcaagctgctgccgacagtgatgcttcggaagacgatgttggacaagaaagcggcgatgatagttgggtggacgatgggttccagtactacctcgccctccgcaagtggtacccgggcctgcgccccgaggcagagttccgatgcttcgtgcggggacggaagctggtcggcgtgtcgcagagggacacatctgcttactacccatcgttgcctgggtggagttctgaggtgcagccgaagatcgaggagttcttcgaagaagttgttgagtcgcagtttgcttctcagaattacacatttgatgtgtatgtcagagcagatggccgggtgaagctgattgatttcaatccttggggtggctatacattgccgcttatgtttacatgggaggagcttgaggatgagaagagaggagaggacaagctggagtttagagtggtaatggagcaaggtgcagtgaggccaggattaatgacagcagtgccgtatgatatgacggattggggagaagggagcggctgggatgtttttctgaagaaggctgacaatgaactgaatagacagatggcctcattagctatggattcgtaattgacatctggaacaaagcagcgcttgaggactccagtagttgaacaacttcaaccgtcgcctgtttgtaatgtttcacctgtcaaacgctagaagtaacagccttctttagattgtgatgcaaacctcacggcaatcggccgtttccccccatggcttttgcaatgctagattgctagtatgggagtaccgcatgctgcttcatctcagttttatgatatttacagaaaaatatttgtagtggaagtatatggcccatggctgaaattgcaaactctgaaacatgaatacacattccatatgcctttgctgtt

SEQ ID NO: 16554 - protein, 469 aa, Triticum aestivum
  peptide (1)..(469): Ceres Seq. ID no. 14301573
  misc_feature (302)..(460): NCBI GI NO: 15235584 NR Description: D123 -related protein [Arabidopsis thaliana]
  misc_feature (105)..(228): NCBI GI NO: 15235584 NR Description: D123 -related protein [Arabidopsis thaliana]
  misc_feature (51)..(84): NCBI GI NO: 15235584 NR Description: D123 -related protein [Arabidopsis thaliana]
  misc_feature (292)..(444): NCBI GI NO: 25742671 NR Description: D123 gene product [Rattus norvegicus]
  misc_feature (111)..(223): NCBI GI NO: 25742671 NR Description: D123 gene product [Rattus norvegicus]
  misc_feature (55)..(84): NCBI GI NO: 25742671 NR Description: D123 gene product [Rattus norvegicus]
  misc_feature (292)..(444): NCBI GI NO: 3551742 NR Description: HT-1080 protein [Homo sapiens]
  misc_feature (111)..(223): NCBI GI NO: 3551742 NR Description: HT-1080 protein [Homo sapiens]
  misc_feature (52)..(84): NCBI GI NO: 3551742 NR Description: HT-1080 protein [Homo sapiens]
  misc_feature (292)..(444): NCBI GI NO: 5174423 NR Description: D123 gene product [Homo sapiens]
KLHLPSKKKDLPSPVSLAPTGGARLPRRRKHGGEAEPKRGGQVVGEMLLVELLRCQIQEWYPAFRRHTVPTVTIPLPAAFLRYLAGQPAHPVPDAPHQDAEGPPPFLLPSLASGRTPFPPLHLPDPVDHDDSSDLFSVCDDDDDDESPPLPAFPELEAAVDAAIAELGGAALPKLNWSAPKDAAFMSADGTVRCTCFAEVAMLLRSSDCVAHDLSSARPSCQDFVCAREGVRRNAGQGSGANQAGAPSNGGGSTSGAGSLSDPPTEDRNEGGRQAAADSDASEDDVGQESGDDSWVDDGFQYYLALRKWYPGLRPEAEFRCFVRGRKLVGVSQRDTSAYYPSLPGWSSEVQPKIEEFFEEVVESQFASQNYTFDVYVRADGRVKLIDFNPWGGYTLPLMFTWEELEDEKRGEDKLEFRVVMEQGAVRPGLMTAVPYDMTDWGEGSGWDVFLKKADNELNRQMASLAMDS

SEQ ID NO: 16555 - protein, 423 aa, Triticum aestivum
  peptide (1)..(423): Ceres Seq. ID no. 14301574
  misc_feature (256)..(414): NCBI GI NO: 15235584 NR Description: D123 -related protein [Arabidopsis thaliana]
  misc_feature (59)..(182): NCBI GI NO: 15235584 NR Description: D123 -related protein [Arabidopsis thaliana]
  misc_feature (5)..(38): NCBI GI NO: 15235584 NR Description: D123 -related protein [Arabidopsis thaliana]
  misc_feature (246)..(398): NCBI GI NO: 25742671 NR Description: D123 gene product [Rattus norvegicus]
  misc_feature (65)..(177): NCBI GI NO: 25742671 NR Description: D123 gene product [Rattus norvegicus]
  misc_feature (9)..(38): NCBI GI NO: 25742671 NR Description: D123 gene product [Rattus norvegicus]
  misc_feature (246)..(398): NCBI GI NO: 3551742 NR Description: HT-1080 protein [Homo sapiens]
  misc_feature (65)..(177): NCBI GI NO: 3551742 NR Description: HT-1080 protein [Homo sapiens]
  misc_feature (6)..(38): NCBI GI NO: 3551742 NR Description: HT-1080 protein [Homo sapiens]
  misc_feature (246)..(398): NCBI GI NO: 5174423 NR Description: D123 gene product [Homo sapiens]
MLLVELLRCQIQEWYPAFRRHTVPTVTIPLPAAFLRYLAGQPAHPVPDAPHQDAEGPPPFLLPSLASGRTPFPPLHLPDPVDHDDSSDLFSVCDDDDDDESPPLPAFPELEAAVDAAIAELGGAALPKLNWSAPKDAAFMSADGTVRCTCFAEVAMLLRSSDCVAHDLSSARPSCQDFVCAREGVRRNAGQGSGANQAGAPSNGGGSTSGAGSLSDPPTEDRNEGGRQAAADSDASEDDVGQESGDDSWVDDGFQYYLALRKWYPGLRPEAEFRCFVRGRKLVGVSQRDTSAYYPSLPGWSSEVQPKIEEFFEEVVESQFASQNYTFDVYVRADGRVKLIDFNPWGGYTLPLMFTWEELEDEKRGEDKLEFRVVMEQGAVRPGLMTAVPYDMTDWGEGSGWDVFLKKADNELNRQMASLAMDS

SEQ ID NO: 16556 - protein, 284 aa, Triticum aestivum
  peptide (1)..(284): Ceres Seq. ID no. 14301575
  misc_feature (117)..(275): NCBI GI NO: 15235584 NR Description: D123 -related protein [Arabidopsis thaliana]
  misc_feature (1)..(43): NCBI GI NO: 15235584 NR Description: D123 -related protein [Arabidopsis thaliana]
  misc_feature (107)..(259): NCBI GI NO: 25742671 NR Description: D123 gene product [Rattus norvegicus]
  misc_feature (1)..(38): NCBI GI NO: 25742671 NR Description: D123 gene product [Rattus norvegicus]
  misc_feature (107)..(259): NCBI GI NO: 3551742 NR Description: HT-1080 protein [Homo sapiens]
  misc_feature (1)..(38): NCBI GI NO: 3551742 NR Description: HT-1080 protein [Homo sapiens]
  misc_feature (107)..(259): NCBI GI NO: 5174423 NR Description: D123 gene product [Homo sapiens]
  misc_feature (1)..(38): NCBI GI NO: 5174423 NR Description: D123 gene product [Homo sapiens]
  misc_feature (107)..(272): NCBI GI NO: 19527052 NR Description: RIKEN cDNA G431001I09 [Mus musculus]
  misc_feature (1)..(38): NCBI GI NO: 19527052 NR Description: RIKEN cDNA G431001I09 [Mus musculus]
MSADGTVRCTCFAEVAMLLRSSDCVAHDLSSARPSCQDFVCAREGVRRNAGQGSGANQAGAPSNGGGSTSGAGSLSDPPTEDRNEGGRQAAADSDASEDDVGQESGDDSWVDDGFQYYLALRKWYPGLRPEAEFRCFVRGRKLVGVSQRDTSAYYPSLPGWSSEVQPKIEEFFEEVVESQFASQNYTFDVYVRADGRVKLIDFNPWGGYTLPLMFTWEELEDEKRGEDKLEFRVVMEQGAVRPGLMTAVPYDMTDWGEGSGWDVFLKKADNELNRQMASLAMDS

SEQ ID NO: 16557 - DNA, 1866 bp, Triticum aestivum
  misc_feature (1)..(1866): Ceres Seq. ID no. 13657240
gaccaaacccaaagccccgtgttccccatctctcctcccagaaacctcctcttcttcctcctcctcctcctcgccgccgccgccgccaccgccgaggatggcggcgaagcagccgttggcggacgtggaggacgggctcctcgcccacctcaacgcgaacgccgagatccccgactcccggtccttcgcctcctccctcggcgtcccgcacaaagacgtggaggacgtcatcaagaggctcaccgccttccgcatcgttgagagtgcggtacggtaccctccccctccccaattcccccgagcctcgcttcgtccctgccccgatttcccccaagacccaacgagctttgctgcaggacatcaccaaggagacgtgggtgctcaccgatgaggccaaggggtatgccgcgaggggctcccccgaggtgcagctcgtcgcggccatcccgcccgagggtgcctccaagggcgcgctcaaggagagtttgggggacgtgttcgatattggaatgaaggctgcagccaagaacaagtggattggatttgagaagggaaacaaagacctcgtactgagaaaggttgaggataccaatgatgaattgcaagagcagcttataagactggagaatggggaggttattgctgacaaagtaatagatgatttgaagagaagaaagcttgtaacaaaagagaaatctatttggtattcactgaagaaggggcctgaatttgttgcaaagagaaaaacattggcaaccgatgtgacacgagaacatctcaagagtggcgactggaaggatctggaatttaaagattataactatggagctcaaggacaacctattgcgataggatatagccaaccgttgttagaggtccgtgaggcaatccagaacatttttctcgagatggggttcagtgagatgccaacgaacatgtatgtagagagcagcttctggaatttcgatgcactgttccagccacaacagcatcctgctcgtgattcacacgatacctttttcctcaaagcccctgctacaacaacacaattacccgatgactatcttgagaaagtaaagcaagtacatcagtctggtggccatggctccaaaggatatggttacaactggaagcgagatgaagcagagaaaaacctgcttcgtactcacacaactgcagtttcaacaaggatgctatacaagctagcacaggagaaaacttttgctcctaagagatactattctattgatcgtgttttccggaatgaagctgtggaccgaactcatcttgcagaattccaccagatagaaggtcttatttgtgattatggtttgacgcttggtgatctgataggtgtattggaagatttcttctccagactaggcatgtcaaagctgcgtttcaaacctgcctacaacccgtacactgaaccaagcatggaaattttcagctaccacgatggtctgaagaaatgggtggagataggcaactcaggcatgttcaggcctgaaatgttacttcccatgggactgccagagggcgttaatgttatcgcatggggtctttcacttgaaaggccaacaatgattctgtatgggattgacaacatacgtgatctctttgggccaaaggtcgacttcaatctgatcaagagcagcccgatttgccgcttggggctgtagtgtagtgagcttgatagaactttatctggatgtctggatgcgaagcatgtttatttgtggttataactttgaaaaccagtactttgcatttaacagagggagtgcagaaatacacacatgtagctctgaattgcaattttgaggtgttcatgttcgatacaagtagggtcttccatttctatgc

SEQ ID NO: 16558 - protein, 559 aa, Triticum aestivum
  peptide (1)..(559): Ceres Seq. ID no. 15219863
  misc_feature (212)..(438): NCBI GI NO: 37534124 NR Description: putative phenylalanyl-tRNA synthetase alpha chain
  misc_feature (93)..(219): NCBI GI NO: 37534124 NR Description: putative phenylalanyl-tRNA synthetase alpha chain
  misc_feature (453)..(559): NCBI GI NO: 37534124 NR Description: putative phenylalanyl-tRNA synthetase alpha chain
  misc_feature (117)..(559): NCBI GI NO: 22329256 NR Description: phenylalanyl-trna synthetase - like protein
  misc_feature (314)..(559): NCBI GI NO: 7437805 NR Description: phenylalanine-tRNA ligase (EC 6
  misc_feature (117)..(280): NCBI GI NO: 7437805 NR Description: phenylalanine-tRNA ligase (EC 6
  misc_feature (118)..(557): NCBI GI NO: 18858079 NR Description: CG2263-PA [Drosophila melanogaster]
  misc_feature (121)..(557): NCBI GI NO: 7804452 NR Description: phenylalanyl tRNA synthetase beta subunit
  misc_feature (121)..(557): NCBI GI NO: 4758340 NR Description: phenylalanine-tRNA synthetase-like protein
  misc_feature (121)..(557): NCBI GI NO: 30585361 NR Description: Homo sapiens phenylalanine-tRNA synthetase-like
PNPKPRVPHLSSQKPPLLPPPPPRRRRRHRRGWRRSSRWRTWRTGSSPTSTRTPRSPTPGPSPPPSASRTKTWRTSSRGSPPSASLRVRYGTLPLPNSPEPRFVPAPISPKTQRALLQDITKETWVLTDEAKGYAARGSPEVQLVAAIPPEGASKGALKESLGDVFDIGMKAAAKNKWIGFEKGNKDLVLRKVEDTNDELQEQLIRLENGEVIADKVIDDLKRRKLVTKEKSIWYSLKKGPEFVAKRKTLATDVTREHLKSGDWKDLEFKDYNYGAQGQPIAIGYSQPLLEVREAIQNIFLEMGFSEMPTNMYVESSFWNFDALFQPQQHPARDSHDTFFLKAPATTTQLPDDYLEKVKQVHQSGGHGSKGYGYNWKRDEAEKNLLRTHTTAVSTRMLYKLAQEKTFAPKRYYSIDRVFRNEAVDRTHLAEFHQIEGLICDYGLTLGDLIGVLEDFFSRLGMSKLRFKPAYNPYTEPSMEIFSYHDGLKKWVEIGNSGMFRPEMLLPMGLPEGVNVIAWGLSLERPTMILYGIDNIRDLFGPKVDFNLIKSSPICRLGL

SEQ ID NO: 16559 - protein, 390 aa, Triticum aestivum
  peptide (1)..(390): Ceres Seq. ID no. 15219864
  misc_feature (43)..(269): NCBI GI NO: 37534124 NR Description: putative phenylalanyl-tRNA synthetase alpha chain
  misc_feature (1)..(50): NCBI GI NO: 37534124 NR Description: putative phenylalanyl-tRNA synthetase alpha chain
  misc_feature (284)..(390): NCBI GI NO: 37534124 NR Description: putative phenylalanyl-tRNA synthetase alpha chain
  misc_feature (1)..(390): NCBI GI NO: 22329256 NR Description: phenylalanyl-trna synthetase - like protein
  misc_feature (145)..(390): NCBI GI NO: 7437805 NR Description: phenylalanine-tRNA ligase (EC 6
  misc_feature (1)..(111): NCBI GI NO: 7437805 NR Description: phenylalanine-tRNA ligase (EC 6
  misc_feature (1)..(388): NCBI GI NO: 18858079 NR Description: CG2263-PA [Drosophila melanogaster]
  misc_feature (1)..(388): NCBI GI NO: 7804452 NR Description: phenylalanyl tRNA synthetase beta subunit
  misc_feature (1)..(388): NCBI GI NO: 4758340 NR Description: phenylalanine-tRNA synthetase-like protein
  misc_feature (1)..(388): NCBI GI NO: 28175596 NR Description: similar to phenylalanine-tRNA synthetase-likeprotein
MKAAAKNKWIGFEKGNKDLVLRKVEDTNDELQEQLIRLENGEVIADKVIDDLKRRKLVTKEKSIWYSLKKGPEFVAKRKTLATDVTREHLKSGDWKDLEFKDYNYGAQGQPIAIGYSQPLLEVREAIQNIFLEMGFSEMPTNMYVESSFWNFDALFQPQQHPARDSHDTFFLKAPATTTQLPDDYLEKVKQVHQSGGHGSKGYGYNWKRDEAEKNLLRTHTTAVSTRMLYKLAQEKTFAPKRYYSIDRVFRNEAVDRTHLAEFHQIEGLICDYGLTLGDLIGVLEDFFSRLGMSKLRFKPAYNPYTEPSMEIFSYHDGLKKWVEIGNSGMFRPEMLLPMGLPEGVNVIAWGLSLERPTMILYGIDNIRDLFGPKVDFNLIKSSPICRLGL

SEQ ID NO: 16560 - DNA, 1862 bp, Triticum aestivum
  misc_feature (1)..(1862): Ceres Seq. ID no. 14302451
cccatcccctctcttctctatagcttactagcagcagcgctctcttcttgctcttcgctatctagctccactttgctcgttgtcctctccctcttggatcgatccggccttcggcggccatgaattgcgccggggtcgccgatgggttgcctgcaggcgagccggataccggcgtcgtcgaccagccacggaggaggagctgcctgtagcgtagctgagctatagtgctcggtcgatctgctgcttcttgggggcgaggaagaagaataaccgaggcttactctcgacgacaggtgcttcgcacagtcgcgatgtttaggaaggacacgtcggacagaagcatccgtttcaagagaaggggcacaaggcggagccagataatttccggtgacgcacaccatggatccccagacatttgtgaggctctcagtcgggcagcttggcctgaggctccccggcgcaagtgccagaaaggctttccactgcgagatccggctccgaggcttcccggttcagttagctccggtgcctctggaaaattcttcagagtttcatcttgatccgcacgcgaatgcggcggtgttctccctggacgagcccggcctcaaggcgctgccgacgtcgaggtggttccgaaccccggagccgccgtacctcgagatcgctgtgtacgtgagcaggcgcgacggcggcgggcattgcgtcgggttgaagcggcggctggtcggggctgtcagggtggatgtcgggccggagtggcgcgacggcaagcctgtgctgcttcgccatagctggacgggcatcggcagggcggcggagctgcacgtgagagtgagggtggaggctgaccctcggtacgtgttccggttcgaggacgaggtcgcgctgaacccgcaggtggtccagctccatggcggcgccagccagcccatctttagctgcaagttcatccgcgacgtgaggcgggcgtcgcagccggatcatttgggcgggaagtattggtcgagctccggaagcggcgaagagaaggagacggagatggcggggaggaggagggagaggaagggctggaaggtggcgatccacgacctgtccggctccgccgtggccgcggcgttcatggccacgccgttcgtgccggcgacgggctccgacacggtggcgcggtccaacccaggcgcgtggctcatcgtccgcgccgacacaacgggatcgtcggagagctggcagccgtggggccggctggaggcgtggcgggagtgcgctgcgccggcgggcggcaaggacgccgtgtgccttcggctgcatctcctcccggagcggcgggacgcgtgcgtactcgtgtccgagacgcctctgagctgtgataagggcggggagttctccatcgacatggacagacagtcgatcctcccggaggacgcagtggcgtcggagacgacgtcgtcgtcgtactgcgcagcgagcatgggacagtcgtgcgcgggcggcggcttcgtgatgagctgcagcgtgcagggcgaggcggcgacgagcagcaggccgccgctggtgcacctcgccgcgcggcacgtcatgtgcatggaagacgcagccatgttcctcgcgcttgcggctgccgtcgacctcagtgtcaaggcgtgccggccgttccggagcaagacggcggcggctaagaagaagacggctgctggctcctcttcccccgattccctggagctcgacacatagattagctagagctagcagtcctcactcctcagtcaagcatcagatcatccatggtcactctgtaaatccacttgtttcgaccaaacttgttgaaaactctaccagttttttctaggcctaacctgtagacg
